(19) United States
(12) Patent Application Publication
(10) Pub. No.: US 2007/0054278 A1
(43) Pub. Date: Mar. 8, 2007

(54) Polymorphisms in nucleic acid molecules encoding human enzyme proteins, methods of detection and uses thereof

(75) Inventor: Michele Cargill, San Francisco, CA (US)

Correspondence Address: CELERA GENOMICS;ATTN: WAYNE MONTGOMERY, VICE PRES, INTEL PROPERTY, 45 WEST GUDE DRIVE, C2-4#20, ROCKVILLE, MD, 20850, US

(73) Assignee: APPLERA CORPORATION, Norwalk, CT (US)

(21) Appl. No.: 10/990,328

(22) Filed: Nov. 17, 2004

Related U.S. Application Data
(60) Provisional application No. 60/520,637, filed on Nov. 18, 2003.

(51) Int. Cl. C12Q 1/68; C07H 21/04

(52) U.S. Cl. 435/6; 530/350; 530/388.22; 536/23.2

(57) ABSTRACT

The present invention is based on the discovery of polymorphisms in enzyme genes and encoded enzyme protein variants. In particular, the present invention relates to nucleic acid molecules containing the polymorphisms, variant proteins encoded by such nucleic acid molecules, reagents for detecting the polymorphic nucleic acid molecules and proteins, and methods of using the nucleic acid and proteins as well as methods of using reagents for their detection.

### FIELD OF THE INVENTION

[0001] The present invention is in the field of enzymes and diagnosis and therapy of enzyme-mediated disorders. In particular, the present invention relates to specific single nucleotide polymorphisms (SNPs) in human enzyme genes as well as polymorphic enzyme proteins encoded by these enzyme genes. The naturally-occurring SNPs disclosed herein can be used as targets for the design of diagnostic reagents and the development of therapeutic agents, as well as for disease association and linkage analysis. In particular, the SNPs of the present invention are useful for identifying an individual who is at an increased or decreased risk of developing enzyme-mediated disorders and for early detection of such disorders, for providing clinically important information for the prevention and/or treatment of enzyme-mediated disorders, and for screening and selecting therapeutic agents. The SNPs disclosed herein are also useful for human identification applications. Methods, assays, kits, and reagents for detecting the presence of these polymorphisms and their encoded products are provided.

### BACKGROUND OF THE INVENTION

[0002] Enzymes

[0003] Enzyme proteins are a major target for drug action and development and many human enzymes serve as targets for the action of pharmaceutically active compounds. Several classes of human enzymes that serve as such targets include, for example, helicases, steroid esterases and sulfatases, convertases, synthases, dehydrogenases, monoxygenases, transferases, glutanases, decarboxylases, isomerases and reductases. It is therefore important in developing new pharmaceutical compounds to identify target enzyme proteins, and naturally occurring variants of these target enzyme proteins, that can be put into high-throughput screening formats. Accordingly, it is valuable to the field of pharmaceutical development to identify and characterize previously unknown human enzyme variants. The present invention advances the state of the art by providing previously unidentified human enzyme variants and polymorphic nucleic acid molecules that encode these enzyme variants. These novel compositions are useful in the diagnosis, prevention, and treatment of biological processes associated with human diseases. These novel human enzyme variants are also useful as drug targets.

[0004] SNPs

[0005] The genomes of all organisms undergo spontaneous mutation in the course of their continuing evolution, generating variant forms of progenitor genetic sequences (Gusella, Ann. Rev. Biochem. 55, 831-854 (1986)). A variant form may confer an evolutionary advantage or disadvantage relative to a progenitor form or may be neutral. In some instances, a variant form confers an evolutionary advantage to the species and is eventually incorporated into the DNA of many or most members of the species and effectively becomes the progenitor form. Additionally, the effects of a variant form may be both beneficial and detrimental, depending on the circumstances. For example, a heterozygous sickle cell mutation confers resistance to malaria, but a homozygous sickle cell mutation is usually lethal. In many cases, both progenitor and variant forms survive and co-exist in a species population. The coexistence of multiple forms of a genetic sequence gives rise to genetic polymorphisms, including SNPs.

[0006] Approximately 90% of all polymorphisms in the human genome are SNPs. SNPs are single base positions in DNA at which different alleles, or alternative nucleotides, exist in a population. The SNP position (interchangeably referred to herein as SNP, SNP site, SNP locus, SNP marker, or marker) is usually preceded by and followed by highly conserved sequences of the allele (e.g., sequences that vary in less than 1/100 or 1/1000 members of the populations). An individual may be homozygous or heterozygous for an allele at each SNP position. A SNP can, in some instances, be referred to as a “cSNP” to denote that the nucleotide sequence containing the SNP is an amino acid coding sequence.

[0007] A SNP may arise from a substitution of one nucleotide for another at the polymorphic site. Substitutions can be transitions or transversions. A transition is the replacement of one purine nucleotide by another purine nucleotide, or one pyrimidine by another pyrimidine. A transversion is the replacement of a purine by a pyrimidine, or vice versa. A SNP may also be a single base insertion or deletion variant referred to as an “indel” (Weber et al., “Human diallelic insertion/deletion polymorphisms”, Am J Hum Genet 2002 October; 71(4):854-62).

[0008] A synonymous codon change, or silent mutation/SNP (terms such as “SNP”, “polymorphism”, “mutation”, “mutant”, “variation”, and “variant” are used herein interchangeably), is one that does not result in a change of amino acid due to the degeneracy of the genetic code. A substitution that changes a codon coding for one amino acid to a codon coding for a different amino acid (i.e., a non-synonymous codon change) is referred to as a missense mutation. A nonsense mutation results in a type of non-synonymous codon change in which a stop codon is formed, thereby leading to premature termination of a polypeptide chain and a truncated protein. A read-through mutation is another type of non-synonymous codon change that causes the destruction of a stop codon, thereby resulting in an extended polypeptide product. While SNPs can be bi-, tri-, or tetra-allelic, the vast majority of the SNPs are bi-allelic, and are thus often referred to as “bi-allelic markers”, or “di-allelic markers”.

[0009] As used herein, references to SNPs and SNP genotypes include individual SNPs and/or haplotypes, which are groups of SNPs that are generally inherited together. Haplotypes can have stronger correlations with diseases or other phenotypic effects compared with individual SNPs, and therefore may provide increased diagnostic accuracy in some cases (Stephens et al. Science 293, 489-493, 20 Jul. 2001).

[0010] Causative SNPs are those SNPs that produce alterations in gene expression or in the expression, structure, and/or function of a gene product, and therefore are most predictive of a possible clinical phenotype. One such class includes SNPs falling within regions of genes encoding a polypeptide product, i.e. cSNPs. These SNPs may result in an alteration of the amino acid sequence of the polypeptide product (i.e., non-synonymous codon changes) and give rise to the expression of a defective or other variant protein. Furthermore, in the case of nonsense mutations, a SNP may lead to premature termination of a polypeptide product. Such variant products can result in a pathological condition, e.g., genetic disease. Examples of genes in which a SNP within a coding sequence causes a genetic disease include sickle cell anemia and cystic fibrosis.

[0011] Causative SNPs do not necessarily have to occur in coding regions; causative SNPs can occur in, for example, any genetic region that can ultimately affect the expression, structure, and/or activity of the protein encoded by a nucleic acid. Such genetic regions include, for example, those involved in transcription, such as SNPs in transcription factor binding domains, SNPs in promoter regions, in areas involved in transcript processing, such as SNPs at intron-exon boundaries that may cause defective splicing, or SNPs in mRNA processing signal sequences such as polyadenylation signal regions. Some SNPs that are not causative SNPs nevertheless are in close association with, and therefore segregate with, a disease-causing sequence. In this situation, the presence of a SNP correlates with the presence of, or predisposition to, or an increased risk in developing the disease. These SNPs, although not causative, are nonetheless also useful for diagnostics, disease predisposition screening, and other uses.

[0012] An association study of a SNP and a specific disorder involves determining the presence or frequency of the SNP allele in biological samples from individuals with the disorder of interest, such as a enzyme-mediated disorder, and comparing the information to that of controls (i.e., individuals who do not have the disorder; controls may be also referred to as “healthy” or “normal” individuals) who are preferably of similar age and race. The appropriate selection of patients and controls is important to the success of SNP association studies. Therefore, a pool of individuals with well-characterized phenotypes is extremely desirable.

[0013] A SNP may be screened in diseased tissue samples or any biological sample obtained from a diseased individual, and compared to control samples, and selected for its increased (or decreased) occurrence in a specific pathological condition, such as pathologies related to enzyme-mediated disorders. Once a statistically significant association is established between one or more SNP(s) and a pathological condition (or other phenotype) of interest, then the region around the SNP can optionally be thoroughly screened to identify the causative genetic locus/sequence(s) (e.g., causative SNP/mutation, gene, regulatory region, etc.) that influences the pathological condition or phenotype. Association studies may be conducted within the general population and are not limited to studies performed on related individuals in affected families (linkage studies).

[0014] Clinical trials have shown that patient response to treatment with pharmaceuticals is often heterogeneous. There is a continuing need to improve pharmaceutical agent design and therapy. In that regard, SNPs can be used to identify patients most suited to therapy with particular pharmaceutical agents (this is often termed “pharmacogenomics”). Similarly, SNPs can be used to exclude patients from certain treatments due to the patient's increased likelihood of developing toxic side effects or their likelihood of not responding to the treatment. Pharmacogenomics can also be used in pharmaceutical research to assist the drug development and selection process. (Linder et al. (1997), Clinical Chemistry, 43, 254; Marshall (1997), Nature Biotechnology, 15, 1249; International Patent Application WO 97/40462, Spectra Biomedical; and Schafer et al. (1998), Nature Biotechnology, 16, 3).

### SUMMARY OF THE INVENTION

[0015] The present invention relates to the identification of novel SNPs, unique combinations of such SNPs, and haplotypes of SNPs in human enzyme genes, as well as polymorphic enzyme proteins encoded by these genes. The polymorphisms disclosed herein are directly useful as targets for the design of diagnostic reagents and the development of therapeutic agents for use in the diagnosis and treatment of enzyme-mediated disorders.

[0016] Based on the identification of SNPs in enzyme genes, the present invention also provides methods of detecting these variants as well as the design and preparation of detection reagents needed to accomplish this task. The invention specifically provides, for example, novel SNPs in enzyme-encoding nucleic acid molecules (i.e., enzyme genes), isolated nucleic acid molecules (including, for example, DNA and RNA molecules) containing these SNPs, variant enzyme proteins encoded by nucleic acid molecules containing such SNPs, antibodies to the encoded variant proteins, computer-based and data storage systems containing the novel SNP information, methods of detecting these SNPs in a test sample, methods of identifying individuals who have an altered (i.e., increased or decreased) risk of developing a enzyme-mediated disorder based on the presence or absence of one or more particular nucleotides (alleles) at one or more SNP sites disclosed herein or the detection of one or more encoded variant products (e.g., variant mRNA transcripts or variant enzyme proteins), methods of identifying individuals who are more or less likely to respond to a treatment (or more or less likely to experience undesirable side effects from a treatment, etc.), methods of screening for compounds useful in the treatment of a disorder associated with a variant enzyme gene/protein, compounds identified by these methods, methods of treating disorders mediated by a variant enzyme gene/protein, methods of using the novel SNPs of the present invention for human identification, etc.

[0017] In Tables 1-2, the present invention provides descriptive information (e.g., Genbank accession numbers, OMIM reference numbers, Panther protein family and subfamily classifications, etc.) for each enzyme gene/protein that enables one skilled in the art to recognize utilities that are well-established in the art for each enzyme, transcript sequences (SEQ ID NOS:1-7498), encoded amino acid sequences (SEQ ID NOS:7499-14,996), genomic sequences (SEQ ID NOS:93,193-98,281), transcript-based context sequences (SEQ ID NOS:14,997-93,192) and genomic-based context sequences (SEQ ID NOS:98,282-558,824) that contain the SNPs of the present invention, and extensive SNP information that includes observed alleles, allele frequencies, populations/ethnic groups in which alleles have been observed, information about the type of SNP and corresponding functional effect, and, for cSNPs, information about the encoded polypeptide product. The transcript sequences (SEQ ID NOS:1-7498), amino acid sequences (SEQ ID NOS:7499-14,996), genomic sequences (SEQ ID NOS:93,193-98,281), transcript-based SNP context sequences (SEQ ID NOS: 14,997-93,192), and genomic-based SNP context sequences (SEQ ID NOS:98,282-558,824) are also provided in the Sequence Listing.

[0018] In a specific embodiment of the present invention, SNPs which occur naturally in human enzyme genes are provided as isolated nucleic acid molecules. These SNPs can have a variety of uses in the diagnosis and/or treatment of enzyme-mediated disorders. One aspect of the present invention relates to an isolated nucleic acid molecule comprising a nucleotide sequence in which at least one nucleotide is a SNP disclosed in Tables 3 and/or 4. In an alternative embodiment, a nucleic acid of the invention is an amplified polynucleotide, which is produced by amplification of a SNP-containing nucleic acid template. In another embodiment, the invention provides for a variant enzyme protein which is encoded by a nucleic acid molecule containing a SNP disclosed herein.

[0019] In yet another embodiment of the invention, a reagent for detecting a SNP in the context of its naturally-occurring flanking nucleotide sequences (which can be, e.g., either DNA or mRNA) is provided. In particular, such a reagent may be in the form of, for example, a hybridization probe or an amplification primer that is useful in the specific detection of a SNP of interest. In an alternative embodiment, a protein detection reagent is used to detect a variant enzyme protein which is encoded by a nucleic acid molecule containing a SNP disclosed herein. A preferred embodiment of a protein detection reagent is an antibody or an antigen-reactive antibody fragment.

[0020] Various embodiments of the invention also provide kits comprising SNP detection reagents, and methods for detecting the SNPs disclosed herein by employing detection reagents. In a specific embodiment, the present invention provides for a method of identifying an individual having an increased or decreased risk of developing a enzyme-mediated disorder by detecting the presence or absence of one or more SNP alleles disclosed herein. In another embodiment, a method for diagnosis of a enzyme-mediated disorder by detecting the presence or absence of one or more SNP alleles disclosed herein is provided.

[0021] The nucleic acid molecules of the invention can be inserted in an expression vector, such as to produce a variant enzyme protein in a host cell. Thus, the present invention also provides for a vector comprising a SNP-containing nucleic acid molecule, genetically-engineered host cells containing a vector, and methods for expressing a recombinant variant protein using such host cells. In another specific embodiment, the host cells, SNP-containing nucleic acid molecules, and/or variant enzyme proteins can be used as targets in a method for screening and identifying therapeutic agents or pharmaceutical compounds useful in the treatment of enzyme-mediated disorders.

[0022] An aspect of this invention is a method for treating a enzyme-mediated disorder in a human subject wherein said human subject harbors a SNP, gene, transcript, and/or encoded protein identified in Tables 1-2, which method comprises administering to said human subject a therapeutically or prophylactically effective amount of one or more agents counteracting the effects of the disease, such as by inhibiting (or stimulating) the activity of the enzyme gene, transcript, and/or encoded protein identified in Tables 1-2.

[0023] Another aspect of this invention is a method for identifying an agent useful in therapeutically or prophylactically treating a enzyme-mediated disorder in a human subject wherein said human subject harbors a SNP, gene, transcript, and/or encoded protein identified in Tables 1-2, which method comprises contacting the enzyme gene, transcript, or encoded protein with a candidate agent under conditions suitable to allow formation of a binding complex between the enzyme gene, transcript; or encoded protein and the candidate agent and detecting the formation of the binding complex, wherein the presence of the complex identifies said agent.

[0024] Another aspect of this invention is a method for treating a enzyme-mediated disorder in a human subject, which method comprises:

[0025] (i) determining that said human subject harbors a SNP, gene, transcript, and/or encoded protein identified in Tables 1-2, and

[0026] (ii) administering to said subject a therapeutically or prophylactically effective amount of one or more agents counteracting the effects of the disease.

[0027] Many other uses and advantages of the present invention will be apparent to those skilled in the art upon review of the detailed description of the preferred embodiments herein. Solely for clarity of discussion, the invention is described in the sections below by way of non-limiting examples.

### DESCRIPTION OF THE FILES CONTAINED ON THE CD-R NAMED CL001495CDR

[0028] The CD-R named CL001495CDR contains the following five text (ASCII) files:

[0029] 1) File SEQLIST_{—}1495.txt provides the Sequence Listing. The Sequence Listing provides the transcript sequences (SEQ ID NOS:1-7498) and protein sequences (SEQ ID NOS:7499-14,996) as shown in Table 1, and genomic sequences (SEQ ID NOS:93,193-98,281) as shown in Table 2, for each enzyme gene that contains one or more SNPs of the present invention. Also provided in the Sequence Listing are context sequences flanking each SNP, including both transcript-based context sequences as shown in Table 1 (SEQ ID NOS:14,997-93,192) and genomic-based context sequences as shown in Table 2 (SEQ ID NOS:98,282-558,824). The context sequences generally provide 100 bp upstream (5′) and 100 bp downstream (3′) of each SNP, with the SNP in the middle of the context sequence, for a total of 200 bp of context sequence surrounding each SNP. File SEQLIST_{—}1495.txt is 594,526 KB in size, and was created on Nov. 18, 2003.

[0030] 2) File TABLE1_{—}1495.txt provides Table 1. File TABLE1_{—}1495.txt is 72,356 KB in size, and was created on Nov. 14, 2003.

[0031] 3) File TABLE2_{—}1495.txt provides Table 2. File TABLE2_{—}1495.txt is 507,889 KB in size, and was created on Nov. 14, 2003.

[0032] 4) File TABLE3_{—}1495.txt provides Table 3. File TABLE3_{—}1495.txt is 573 KB in size, and was created on Nov. 14, 2003.

[0033] 5) File TABLE4_{—}1495.txt provides Table 4. File TABLE4_{—}1495.txt is 1,174 KB in size, and was created on Nov. 14, 2003.

[0034] The material contained on the CD-R labeled CL001495CDR is hereby incorporated by reference pursuant to 37 CFR 1.77(b)(4).

LENGTHY TABLES FILED ON CD
The patent application contains a lengthy table section. A copy of the table is available in electronic form from the USPTO web site (http://seqdata.uspto.gov/?pageRequest=docDetail&DocID=US20070054278A1). An electronic copy of the table will also be available from the USPTO upon request and payment of the fee set forth in 37 CFR 1.19(b)(3).

### DESCRIPTION OF TABLE 1 AND TABLE 2

[0035] Table 1 and Table 2 (both provided on the CD-R) disclose the SNP and associated gene/transcript/protein information of the present invention. For each enzyme gene, Table 1 and Table 2 each provide a header containing gene/transcript/protein information, followed by a transcript and protein sequence (in Table 1) or genomic sequence (in Table 2), and then SNP information regarding each SNP found in that gene/transcript.

[0036] The header information for each gene in Tables 1-2 provides descriptive information (e.g., Genbank accession numbers, OMIM reference numbers, Panther protein family and subfamily classifications, etc.) to specifically identify each enzyme gene/protein, such that one skilled in the art would readily comprehend the utilities that are well-established in the art for each enzyme gene/protein.

[0037] NOTE: SNPs may be included in both Table 1 and Table 2; Table 1 presents the SNPs relative to their transcript sequences and encoded protein sequences, whereas Table 2 presents the SNPs relative to their genomic sequences (in some instances Table 2 may also include, after the last gene sequence, genomic sequences of one or more intergenic regions, as well as SNP context sequences and other SNP information for any SNPs that lie within these intergenic regions). SNPs can readily be cross-referenced between Tables based on their hCV (or, in some instances, hDV) identification numbers.

[0038] The gene/transcript/protein information includes:
[0039] a gene number (1 through n, where n=the total number of genes in the Table)
[0040] a Celera hCG and UID internal identification numbers for the gene
[0041] a Celera hCT and UID internal identification numbers for the transcript (Table 1 only)
[0042] a public Genbank accession number (e.g., RefSeq NM number) for the transcript (Table 1 only)
[0043] a Celera hCP and UID internal identification numbers for the protein encoded by the hCT transcript (Table 1 only)
[0044] a public Genbank accession number (e.g., RefSeq NP number) for the protein (Table 1 only)
[0045] an art-known gene symbol
[0046] an art-known gene/protein name
[0047] Celera genomic axis position (indicating start nucleotide position-stop nucleotide position)
[0048] the chromosome number of the chromosome on which the gene is located
[0049] protein family and subfamily classifications (as determined by the “Panther” algorithm), indicated as “Panther Family: and “Panther Subfamily:”
[0050] an OMIM (Online Mendelian Inheritance in Man; Johns Hopkins University/NCBI) public reference number for obtaining further information regarding the medical significance of each gene
[0051] alternative gene/protein name(s) and/or symbol(s) in the OMIM entry

[0052] The gene/transcript/protein header information provided for each gene in Tables 1-2 provides information that is well-recognized in the art (e.g., Genbank accession numbers, OMIM reference numbers, Panther protein family and subfamily classifications, etc.) to specifically characterize each enzyme gene/protein, thereby enabling one skilled in the art to readily comprehend the utilities that are well-established in the art for each enzyme gene/protein.

[0053] NOTE: Due to the presence of alternative splice forms, multiple transcript/protein entries can be provided for a single gene entry in Table 1; i.e., for a single Gene Number, multiple entries may be provided in series that differ in their transcript/protein information and sequences.

[0054] Following the gene/transcript/protein information is a transcript sequence and protein sequence (in Table 1), or a genomic sequence (in Table 2), for each gene, as follows:
[0055] transcript sequence (Table 1 only) (corresponding to SEQ ID NOS:1-7498 of the Sequence Listing), with SNPs identified by their IUB codes (transcript sequences can include 5′ UTR, protein coding, and 3′ UTR regions). (NOTE: If there are differences between the nucleotide sequence of the hCT transcript and the corresponding public transcript sequence identified by the Genbank accession number, the hCT transcript sequence (and encoded protein) is provided, unless the public sequence is a RefSeq transcript sequence identified by an NM number, in which case the RefSeq NM transcript sequence (and encoded protein) is provided. However, whether the hCT transcript or RefSeq NM transcript is used as the transcript sequence, the disclosed SNPs are represented by their IUB codes within the transcript.)
[0056] the encoded protein sequence (Table 1 only) (corresponding to SEQ ID NOS:7499-14,996 of the Sequence Listing)
[0057] the genomic sequence of the gene (Table 2 only), including 6 kb on each side of the gene boundaries (i.e., 6 kb on the 5′ side of the gene plus 6 kb on the 3′ side of the gene) (corresponding to SEQ ID NOS:93,193-98,281 of the Sequence Listing).

[0058] After the last gene sequence, Table 2 may include additional genomic sequences of intergenic regions (in such instances, these sequences are identified as “Intergenic region:” followed by a numerical identification number), as well as SNP context sequences and other SNP information for any SNPs that lie within each intergenic region (and such SNPs are identified as “INTERGENIC” for SNP type).

[0059] NOTE: The transcript, protein, and transcript-based SNP context sequences are provided in both Table 1 and in the Sequence Listing. The genomic and genomic-based SNP context sequences are provided in both Table 2 and in the Sequence Listing. SEQ ID NOS are indicated in Table 1 for each transcript sequence (SEQ ID NOS:1-7498), protein sequence (SEQ ID NOS:7499-14,996), and transcript-based SNP context sequence (SEQ ID NOS:14,997-93,192), and SEQ ID NOS are indicated in Table 2 for each genomic sequence (SEQ ID NOS:93,193-98,281), and genomic-based SNP context sequence (SEQ ID NOS:98,282-558,824).

[0060] The SNP information includes:
[0061] context sequence (taken from the transcript sequence in Table 1, and taken from the genomic sequence in Table 2) with the SNP represented by its IUB code, including 100 bp upstream (5′) of the SNP position plus 100 bp downstream (3′) of the SNP position (the transcript-based SNP context sequences in Table 1 are provided in the Sequence Listing as SEQ ID NOS:14,997-93,192; the genomic-based SNP context sequences in Table 2 are provided in the Sequence Listing as SEQ ID NOS:98,282-558,824).
[0062] Celera hCV internal identification number for the SNP (in some instances, an “hDV” number is given instead of an “hCV” number)
[0063] SNP position [position of the SNP within the given transcript sequence (Table 1) or within the given genomic sequence (Table 2)]
[0064] SNP source (may include any combination of one or more of the following five codes, depending on which internal sequencing projects and/or public databases the SNP has been observed in: “Applera”=SNP observed during the re-sequencing of genes and regulatory regions of 39 individuals, “Celera”=SNP observed during shotgun sequencing and assembly of the Celera human genome sequence, “Celera Diagnostics”=SNP observed during re-sequencing of nucleic acid samples from individuals who have a disease, “dbSNP”=SNP observed in the dbSNP public database, “HGBASE”=SNP observed in the HGBASE public database, “HGMD”=SNP observed in the Human Gene Mutation Database (HGMD) public database, “HapMap”=SNP observed in the International HapMap Project public database, “CSNP”=SNP observed in an internal Applied Biosystems (Foster City, Calif.) database of coding SNPS (cSNPs)) (NOTE: multiple “Applera” source entries for a single SNP indicate that the same SNP was covered by multiple overlapping amplification products and the re-sequencing results (e.g., observed allele counts) from each of these amplification products is being provided)
[0065] Population/allele/allele count information in the format of [population1(first_allele,count|second_allele,count)population2(first_allele,count|second_allele,count) total (first_allele,total count|second_allele,total count)]. The information in this field includes populations/ethnic groups in which particular SNP alleles have been observed (“cau”=Caucasian, “his”=Hispanic, “chn”=Chinese, and “afr”=African-American, “jpn”=Japanese, “ind”=Indian, “mex”=Mexican, “ain”=“American Indian, “cra”=Celera donor, “no_pop”=no population information available), identified SNP alleles, and observed allele counts (within each population group and total allele counts), where available [“-” in the allele field represents a deletion allele of an insertion/deletion (“indel”) polymorphism (in which case the corresponding insertion allele, which may be comprised of one or more nucleotides, is indicated in the allele field on the opposite side of the “|”); “-” in the count field indicates that allele count information is not available]. For certain SNPs from the public dbSNP database, population/ethnic information is indicated as follows (this population information is publicly available in dbSNP): “HISP1”=human individual DNA (anonymized samples) from 23 individuals of self-described HISPANIC heritage; “PAC1”=human individual DNA (anonymized samples) from 24 individuals of self-described PACIFIC RIM heritage; “CAUC1”=human individual DNA (anonymized samples) from 31 individuals of self-described CAUCASIAN heritage; “AFR1”=human individual DNA (anonymized samples) from 24 individuals of self-described AFRICAN/AFRICAN AMERICAN heritage; “P1”=human individual DNA (anonymized samples) from 102 individuals of self-described heritage; “PA130299515”; “SC_{—}12_A”=SANGER 12 DNAs of Asian origin from Corielle cell repositories, 6 of which are male and 6 female; “SC_{—}12_C”=SANGER 12 DNAs of Caucasian origin from Corielle cell repositories from the CEPH/UTAH library. Six male and 6 female; “SC_{—}12_AA”=SANGER 12 DNAs of African-American origin from Corielle cell repositories 6 of which are male and 6 female; “SC_{—}95_C”=SANGER 95 DNAs of Caucasian origin from Corielle cell repositories from the CEPH/UTAH library; and “SC_{—}12_CA”=Caucasians—12 DNAs from Corielle cell repositories that are from the CEPH/UTAH library. Six male and 6 female.

[0066] NOTE: For SNPs of “Applera” SNP source, genes/regulatory regions of 39 individuals (20 Caucasians and 19 African Americans) were re-sequenced and, since each SNP position is represented by two chromosomes in each individual (with the exception of SNPs on X and Y chromosomes in males, for which each SNP position is represented by a single chromosome), up to 78 chromosomes were genotyped for each SNP position. Thus, the sum of the African-American (“afr”) allele counts is up to 38, the sum of the Caucasian allele counts (“cau”) is up to 40, and the total sum of all allele counts is up to 78.

[0067] (NOTE: semicolons separate population/allele/count information corresponding to each indicated SNP source; i.e., if four SNP sources are indicated, such as “Celera”, “dbSNP”, “HGBASE”, and “HGMD”, then population/allele/count information is provided in four groups which are separated by semicolons and listed in the same order as the listing of SNP sources, with each population/allele/count information group corresponding to the respective SNP source based on order; thus, in this example, the first population/allele/count information group would correspond to the first listed SNP source (Celera) and the third population/allele/count information group separated by semicolons would correspond to the third listed SNP source (HGBASE); if population/allele/count information is not available for any particular SNP source, then a pair of semicolons is still inserted as a place-holder in order to maintain correspondence between the list of SNP sources and the corresponding listing of population/allele/count information)
[0068] SNP type (e.g., location within gene/transcript and/or predicted functional effect) [“MIS-SENSE MUTATION”=SNP causes a change in the encoded amino acid (i.e., a non-synonymous coding SNP); “SILENT MUTATION”=SNP does not cause a change in the encoded amino acid (i.e., a synonymous coding SNP); “STOP CODON MUTATION”=SNP is located in a stop codon; “NONSENSE MUTATION”=SNP creates or destroys a stop codon; “UTR 5”=SNP is located in a 5′ UTR of a transcript; “UTR 3”=SNP is located in a 3′ UTR of a transcript; “PUTATIVE UTR 5”=SNP is located in a putative 5′ UTR; “PUTATIVE UTR 3”=SNP is located in a putative 3′ UTR; “DONOR SPLICE SITE”=SNP is located in a donor splice site (5′ intron boundary); “ACCEPTOR SPLICE SITE”=SNP is located in an acceptor splice site (3′ intron boundary); “CODING REGION”=SNP is located in a protein-coding region of the transcript; “EXON”=SNP is located in an exon; “INTRON”=SNP is located in an intron; “hmCS”=SNP is located in a human-mouse conserved segment; “TFBS”=SNP is located in a transcription factor binding site; “UNKNOWN”=SNP type is not defined; “INTERGENIC”=SNP is intergenic, i.e., outside of any gene boundary]
[0069] Protein coding information (Table 1 only), where relevant, in the format of [protein SEQ ID NO:#, amino acid position, (amino acid-1, codon1) (amino acid-2, codon2)]. The information in this field includes SEQ ID NO of the encoded protein sequence, position of the amino acid residue within the protein identified by the SEQ ID NO that is encoded by the codon containing the SNP, amino acids (represented by one-letter amino acid codes) that are encoded by the alternative SNP alleles (in the case of stop codons, “X” is used for the one-letter amino acid code), and alternative codons containing the alternative SNP nucleotides which encode the amino acid residues (thus, for example, for missense mutation-type SNPs, at least two different amino acids and at least two different codons are generally indicated; for silent mutation-type SNPs, one amino acid and at least two different codons are generally indicated, etc.). In instances where the SNP is located outside of a protein-coding region (e.g., in a UTR region), “None” is indicated following the protein SEQ ID NO.

### DESCRIPTION OF TABLE 3 AND TABLE 4

[0070] Tables 3 and 4 (both provided on the CD-R) provide a list of a subset of SNPs from Table 1 (in the case of Table 3) or Table 2 (in the case of Table 4) for which the SNP source falls into one of the following three categories: 1) SNPs for which the SNP source is only “Applera” and none other, 2) SNPs for which the SNP source is only “Celera Diagnostics” and none other, and 3) SNPs for which the SNP source is both “Applera” and “Celera Diagnostics” but none other.

[0071] These SNPs have not been observed in any of the public databases (dbSNP, HGBASE, and HGMD), and were also not observed during shotgun sequencing and assembly of the Celera human genome sequence (i.e., “Celera” SNP source). Tables 3 and 4 provide the hCV identification number (or hDV identification number for SNPs having “Celera Diagnostics” SNP source) and the SEQ ID NO of the context sequence for each of these SNPs.

### DESCRIPTION OF THE FIGURE

[0072] FIG. 1 provides a diagrammatic representation of a computer-based discovery system containing the SNP information of the present invention in computer readable form.

### DETAILED DESCRIPTION OF THE INVENTION

[0073] The present invention provides enzyme-encoding nucleic acid molecules containing SNPs and variant enzyme proteins encoded by these nucleic acid molecules (see, e.g., Tables 1-2, and the Sequence Listing), methods and reagents for the detection of the SNPs disclosed herein, and uses of these SNPs for the development of detection reagents, and assays or kits that utilize such reagents. The SNPs disclosed herein are useful for diagnosing, screening for and evaluating predisposition to enzyme-mediated disorders in humans. Furthermore, such SNPs and their encoded products are useful targets for the development of therapeutic agents.

[0074] A large number of SNPs have been identified from re-sequencing DNA from 39 individuals, and they are indicated as “Applera” SNP source in Tables 1-2. Their allele frequencies observed in each of the Caucasian and African-American ethnic groups are provided. Additional SNPs included herein were previously identified during shotgun sequencing and assembly of the human genome, and they are indicated as “Celera” SNP source in Tables 1-2. Furthermore, the information provided in Table 1-2, particularly the allele frequency information obtained from 39 individuals and the identification of the precise position of each SNP within each gene/transcript, allows haplotypes (i.e., groups of SNPs that are co-inherited) to be readily inferred. The present invention encompasses SNP haplotypes, as well as individual SNPs.

[0075] Thus, the present invention provides individual novel SNPs, combinations of SNPs, and haplotypes in enzyme genes, polymorphic/variant transcript sequences (SEQ ID NOS:1-7498) and genomic sequences (SEQ ID NOS:93,193-98,281) containing SNPs, encoded amino acid sequences of variant enzyme proteins (SEQ ID NOS: 7499-14,996), and both transcript-based SNP context sequences (SEQ ID NOS: 14,997-93,192) and genomic-based SNP context sequences (SEQ ID NOS:98,282-558,824) (transcript sequences, protein sequences, and transcript-based SNP context sequences are provided in Table 1 and the Sequence Listing; genomic sequences and genomic-based SNP context sequences are provided in Table 2 and the Sequence Listing), methods of detecting these polymorphisms in a test sample, methods of determining the risk of an individual of having or developing a enzyme-mediated disorder, methods of screening for compounds useful for treating disorders associated with a variant enzyme gene/protein, compounds identified by these screening methods, methods of using the disclosed SNPs to select a treatment strategy, methods of treating a disorder associated with a variant protein gene/protein (i.e., therapeutic methods), and methods of using the SNPs of the present invention for human identification.

[0076] Particular SNP alleles of the present invention can be associated with either an increased risk of having or developing a enzyme-mediated disorder, or a decreased risk of having or developing a enzyme-mediated disorder. SNP alleles that are associated with a decreased risk of having or developing a enzyme-mediated disorder may be referred to as “protective” alleles, and SNP alleles that are associated with an increased risk of having or developing a enzyme-mediated disorder may be referred to as “susceptibility” alleles, “risk” alleles, or “risk factors”. Thus, whereas certain SNPs (or their encoded products) can be assayed to determine whether an individual possesses a SNP allele that is indicative of an increased risk of having or developing a enzyme-mediated disorder (i.e., a susceptibility allele), other SNPs (or their encoded products) can be assayed to determine whether an individual possesses a SNP allele that is indicative of a decreased risk of having or developing a enzyme-mediated disorder (i.e., a protective allele). Similarly, particular SNP alleles of the present invention can be associated with either an increased or decreased likelihood of responding to a particular treatment or therapeutic compound, or an increased or decreased likelihood of experiencing toxic effects from a particular treatment or therapeutic compound. The term “altered” may be used herein to encompass either of these two possibilities (e.g., an increased or a decreased risk/likelihood).

[0077] Those skilled in the art will readily recognize that nucleic acid molecules may be double-stranded molecules and that reference to a particular site on one strand refers, as well, to the corresponding site on a complementary strand. In defining a SNP position, SNP allele, or nucleotide sequence, reference to an adenine, a thymine (uridine), a cytosine, or a guanine at a particular site on one strand of a nucleic acid molecule also defines the thymine (uridine), adenine, guanine, or cytosine (respectively) at the corresponding site on a complementary strand of the nucleic acid molecule. Thus, reference may be made to either strand in order to refer to a particular SNP position, SNP allele, or nucleotide sequence. Probes and primers, may be designed to hybridize to either strand and SNP genotyping methods disclosed herein may generally target either strand. Throughout the specification, in identifying a SNP position, reference is generally made to the protein-encoding strand, only for the purpose of convenience.

[0078] References to variant peptides, polypeptides, or proteins of the present invention include peptides, polypeptides, proteins, or fragments thereof, that contain at least one amino acid residue that differs from the corresponding amino acid sequence of the art-known peptide/polypeptide/protein (the art-known protein may be interchangeably referred to as the “wild-type”, “reference”, or “normal” protein). Such variant peptides/polypeptides/proteins can result from a codon change caused by a nonsynonymous nucleotide substitution at a protein-coding SNP position (i.e., a missense mutation) disclosed by the present invention. Variant peptides/polypeptides/proteins of the present invention can also result from a nonsense mutation, i.e. a SNP that creates a premature stop codon, a SNP that generates a read-through mutation by abolishing a stop codon, or due to any SNP disclosed by the present invention that otherwise alters the structure, function/activity, or expression of a protein, such as a SNP in a regulatory region (e.g. a promoter or enhancer) or a SNP that leads to alternative or defective splicing, such as a SNP in an intron or a SNP at an exon/intron boundary. As used herein, the terms “polypeptide”, “peptide”, and “protein” are used interchangeably.

[0079] Isolated Nucleic Acid Molecules and SNP Detection Reagents & Kits

[0080] Tables 1 and 2 provide a variety of information about each SNP of the present invention, including the transcript sequences (SEQ ID NOS:1-7498), genomic sequences (SEQ ID NOS:93,193-98,281), and protein sequences (SEQ ID NOS:7499-14,996) of the encoded enzymes (with the SNPs indicated by IUB codes in the nucleic acid sequences). In addition, Tables 1 and 2 include SNP context sequences, which generally include 100 nucleotide upstream (5′) plus 100 nucleotides downstream (3′) of each SNP position (SEQ ID NOS:14,997-93,192 correspond to transcript-based SNP context sequences disclosed in Table 1, and SEQ ID NOS:98,282-558,824 correspond to genomic-based context sequences disclosed in Table 2), the alternative nucleotides (alleles) at each SNP position, and additional information about the variant where relevant, such as SNP type (coding, missense, splice site, UTR, etc.), human populations in which the SNP was observed, observed allele frequencies, information about the encoded protein, etc.

[0081] Isolated Nucleic Acid Molecules

[0082] The present invention provides isolated nucleic acid molecules that contain one or more SNPs disclosed Table 1 and/or Table 2. Preferred isolated nucleic acid molecules contain one or more SNPs identified in Table 3 and/or Table 4. Isolated nucleic acid molecules containing one or more SNPs disclosed in at least one of Tables 1-4 may be interchangeably referred to throughout the present text as “SNP-containing nucleic acid molecules”. Isolated nucleic acid molecules may optionally encode a full-length variant enzyme protein or fragment thereof. The isolated nucleic acid molecules of the present invention also include probes and primers (which are described in greater detail below in the section entitled “SNP Detection Reagents”), which may be used for assaying the disclosed SNPs, and isolated full-length enzyme genes, transcripts, cDNA molecules, and fragments thereof, which may be used for such purposes as expressing an encoded enzyme protein.

[0083] As used herein, an “isolated nucleic acid molecule” generally is one that contains a SNP of the present invention or one that hybridizes to such molecule such as a nucleic acid with a complementary sequence, and is separated from most other nucleic acids present in the natural source of the nucleic acid molecule. Moreover, an “isolated” nucleic acid molecule, such as a cDNA molecule containing a SNP of the present invention, can be substantially free of other cellular material, or culture medium when produced by recombinant techniques, or chemical precursors or other chemicals when chemically synthesized. A nucleic acid molecule can be fused to other coding or regulatory sequences and still be considered “isolated”. Nucleic acid molecules present in non-human transgenic animals, which do not naturally occur in the animal, are also considered “isolated”. For example, recombinant DNA molecules contained in a vector are considered “isolated”. Further examples of “isolated” DNA molecules include recombinant DNA molecules maintained in heterologous host cells, and purified (partially or substantially) DNA molecules in solution. Isolated RNA molecules include in vivo or in vitro RNA transcripts of the isolated SNP-containing DNA molecules of the present invention. Isolated nucleic acid molecules according to the present invention further include such molecules produced synthetically.

[0084] Generally, an isolated SNP-containing nucleic acid molecule comprises one or more SNP positions disclosed by the present invention with flanking nucleotide sequences on either side of the SNP positions. A flanking sequence can include nucleotide residues that are naturally associated with the SNP site and/or heterologous nucleotide sequences. Preferably the flanking sequence is up to about 500, 300, 100, 60, 50, 30, 25, 20, 15, 10, 8, or 4 nucleotides (or any other length in-between) on either side of a SNP position, or as long as the full-length enzyme gene or entire enzyme-encoding sequence (or any portion thereof such as an exon), especially if the SNP-containing nucleic acid molecule is to be used to produce a enzyme protein or fragment thereof.

[0085] For full-length enzyme genes and entire enzyme-encoding sequences, a SNP flanking sequence can be, for example, up to about 5 KB, 4 KB, 3 KB, 2 KB, 1 KB on either side of the SNP. Furthermore, in such instances, the isolated nucleic acid molecule comprises exonic sequences (including protein-coding and/or non-coding exonic sequences), but may also include intronic sequences. Thus, any protein coding sequence may be either contiguous or separated by introns. The important point is that the nucleic acid is isolated from remote and unimportant flanking sequences and is of appropriate length such that it can be subjected to the specific manipulations or uses described herein such as recombinant protein expression, preparation of probes and primers for assaying the SNP position, and other uses specific to the SNP-containing nucleic acid sequences.

[0086] An isolated SNP-containing nucleic acid molecule can comprise, for example, a full-length gene or transcript, such as a gene isolated from genomic DNA (e.g., by cloning or PCR amplification), a cDNA molecule, or an mRNA transcript molecule. Polymorphic transcript sequences are provided in Table 1 and in the Sequence Listing (SEQ ID NOS: 1-7498), and polymorphic genomic sequences are provided in Table 2 and in the Sequence Listing (SEQ ID NOS:93,193-98,281). Furthermore, fragments of such full-length genes and transcripts that contain one or more SNPs disclosed herein are also encompassed by the present invention, and such fragments may be used, for example, to express any part of a enzyme protein, such as a particular functional domain or an antigenic epitope.

[0087] Thus, the present invention also encompasses fragments of the nucleic acid sequences provided in Tables 1-2 (transcript sequences are provided in Table 1 as SEQ ID NOS:1-7498, genomic sequences are provided in Table 2 as SEQ ID NOS:93,193-98,281, transcript-based SNP context sequences are provided in Table 1 as SEQ ID NO:14,997-93,192, and genomic-based SNP context sequences are provided in Table 2 as SEQ ID NO:98,282-558,824) and their complements. A fragment typically comprises a contiguous nucleotide sequence at least about 8 or more nucleotides, more preferably at least about 12 or more nucleotides, and even more preferably at least about 16 or more nucleotides. Further, a fragment could comprise at least about 18, 20, 22, 25, 30, 40, 50, 60, 80, 100, 150, 200, 250 or 500 (or any other number in-between) nucleotides in length. The length of the fragment will be based on its intended use. For example, the fragment can encode epitope-bearing regions of a variant peptide or regions of a variant peptide that differ from the normal/wild-type protein, or can be useful as a polynucleotide probe or primer. Such fragments can be isolated using the nucleotide sequences provided in Table 1 and/or Table 2 for the synthesis of a polynucleotide probe. A labeled probe can then be used, for example, to screen a cDNA library, genomic DNA library, or mRNA to isolate nucleic acid corresponding to the coding region. Further, primers can be used in amplification reactions, such as for purposes of assaying one or more SNP sites or for cloning specific regions of a enzyme gene.

[0088] An isolated nucleic acid molecule of the present invention further encompasses a SNP-containing polynucleotide that is the product of any one of a variety of nucleic acid amplification methods, which are used to increase the copy numbers of a polynucleotide of interest in a nucleic acid sample. Such amplification methods are well known in the art, and they include but are not limited to, polymerase chain reaction (PCR) (U.S. Pat. Nos. 4,683,195; and 4,683,202; PCR Technology: Principles and Applicationsfor DNA Amplification, ed. H. A. Erlich, Freeman Press, NY, N.Y., 1992), ligase chain reaction (LCR) (Wu and Wallace, Genomics 4:560, 1989; Landegren et al., Science 241:1077, 1988), strand displacement amplification (SDA) (U.S. Pat. Nos. 5,270,184; and 5,422,252), transcription-mediated amplification (TMA) (U.S. Pat. No. 5,399,491), linked linear amplification (LLA) (U.S. Pat. No. 6,027,923), and the like, and isothermal amplification methods such as nucleic acid sequence based amplification (NASBA), and self-sustained sequence replication (Guatelli et al., Proc. Natl. Acad. Sci. USA 87: 1874, 1990). Based on such methodologies, a person skilled in the art can readily design primers in any suitable regions 5′ and 3′ to a SNP disclosed herein. Such primers may be used to amplify DNA of any length so long that it contains the SNP of interest in its sequence.

[0089] As used herein, an “amplified polynucleotide” of the invention is a SNP-containing nucleic acid molecule whose amount has been increased at least two fold by any nucleic acid amplification method performed in vitro as compared to its starting amount in a test sample. In other preferred embodiments, an amplified polynucleotide is the result of at least ten fold, fifty fold, one hundred fold, one thousand fold, or even ten thousand fold increase as compared to its starting amount in a test sample. In a typical PCR amplification, a polynucleotide of interest is often amplified at least fifty thousand fold in amount over the unamplified genomic DNA, but the precise amount of amplification needed for an assay depends on the sensitivity of the subsequent detection method used.

[0090] Generally, an amplified polynucleotide is at least about 16 nucleotides in length. More typically, an amplified polynucleotide is at least about 20 nucleotides in length. In a preferred embodiment of the invention, an amplified polynucleotide is at least about 30 nucleotides in length. In a more preferred embodiment of the invention, an amplified polynucleotide is at least about 32, 40, 45, 50, or 60 nucleotides in length. In yet another preferred embodiment of the invention, an amplified polynucleotide is at least about 100, 200, 300, 400, or 500 nucleotides in length. While the total length of an amplified polynucleotide of the invention can be as long as an exon, an intron or the entire gene where the SNP of interest resides, an amplified product is typically up to about 1,000 nucleotides in length (although certain amplification methods may generate amplified products greater than 1000 nucleotides in length). More preferably, an amplified polynucleotide is not greater than about 600-700 nucleotides in length. It is understood that irrespective of the length of an amplified polynucleotide, a SNP of interest may be located anywhere along its sequence.

[0091] In a specific embodiment of the invention, the amplified product is at least about 201 nucleotides in length, comprises one of the transcript-based context sequences or the genomic-based context sequences shown in Tables 1-2. Such a product may have additional sequences on its 5′ end or 3′ end or both. In another embodiment, the amplified product is about 101 nucleotides in length, and it contains a SNP disclosed herein. Preferably, the SNP is located at the middle of the amplified product (e.g., at position 101 in an amplified product that is 201 nucleotides in length, or at position 51 in an amplified product that is 101 nucleotides in length), or within 1, 2, 3, 4, 5, 6, 7, 8, 9, 10, 12, 15, or 20 nucleotides from the middle of the amplified product (however, as indicated above, the SNP of interest may be located anywhere along the length of the amplified product).

[0092] The present invention provides isolated nucleic acid molecules that comprise, consist of, or consist essentially of one or more polynucleotide sequences that contain one or more SNPs disclosed herein, complements thereof, and SNP-containing fragments thereof.

[0093] Accordingly, the present invention provides nucleic acid molecules that consist of any of the nucleotide sequences shown in Table 1 and/or Table 2 (transcript sequences are provided in Table 1 as SEQ ID NOS:1-7498, genomic sequences are provided in Table 2 as SEQ ID NOS:93,193-98,281, transcript-based SNP context sequences are provided in Table 1 as SEQ ID NO:14,997-93,192, and genomic-based SNP context sequences are provided in Table 2 as SEQ ID NO:98,282-558,824), or any nucleic acid molecule that encodes any of the variant enzyme proteins provided in Table 1 (SEQ ID NOS:7499-14,996). A nucleic acid molecule consists of a nucleotide sequence when the nucleotide sequence is the complete nucleotide sequence of the nucleic acid molecule.

[0094] The present invention further provides nucleic acid molecules that consist essentially of any of the nucleotide sequences shown in Table 1 and/or Table 2 (transcript sequences are provided in Table 1 as SEQ ID NOS:1-7498, genomic sequences are provided in Table 2 as SEQ ID NOS:93,193-98,281, transcript-based SNP context sequences are provided in Table 1 as SEQ ID NO:14,997-93,192, and genomic-based SNP context sequences are provided in Table 2 as SEQ ID NO:98,282-558,824), or any nucleic acid molecule that encodes any of the variant enzyme proteins provided in Table 1 (SEQ ID NOS:7499-14,996). A nucleic acid molecule consists essentially of a nucleotide sequence when such a nucleotide sequence is present with only a few additional nucleotide residues in the final nucleic acid molecule.

[0095] The present invention further provides nucleic acid molecules that comprise any of the nucleotide sequences shown in Table 1 and/or Table 2 or a SNP-containing fragment thereof (transcript sequences are provided in Table 1 as SEQ ID NOS:1-7498, genomic sequences are provided in Table 2 as SEQ ID NOS:93,193-98,281, transcript-based SNP context sequences are provided in Table 1 as SEQ ID NO:14,997-93,192, and genomic-based SNP context sequences are provided in Table 2 as SEQ ID NO:98,282-558,824), or any nucleic acid molecule that encodes any of the variant enzyme proteins provided in Table 1 (SEQ ID NOS:7499-14,996). A nucleic acid molecule comprises a nucleotide sequence when the nucleotide sequence is at least part of the final nucleotide sequence of the nucleic acid molecule. In such a fashion, the nucleic acid molecule can be only the nucleotide sequence or have additional nucleotide residues, such as residues that are naturally associated with it or heterologous nucleotide sequences. Such a nucleic acid molecule can have one to a few additional nucleotides or can comprise many more additional nucleotides. A brief description of how various types of these nucleic acid molecules can be readily made and isolated is provided below, and such techniques are well known to those of ordinary skill in the art (Sambrook and Russell, 2000, Molecular Cloning: A Laboratory Manual, Cold Spring Harbor Press, NY).

[0096] The isolated nucleic acid molecules can encode mature proteins plus additional amino or carboxyl-terminal amino acids or both, or amino acids interior to the mature peptide (when the mature form has more than one peptide chain, for instance). Such sequences may play a role in processing of a protein from precursor to a mature form, facilitate protein trafficking, prolong or shorten protein half-life, or facilitate manipulation of a protein for assay or production. As generally is the case in situ, the additional amino acids may be processed away from the mature protein by cellular enzymes.

[0097] Thus, the isolated nucleic acid molecules include, but are not limited to, nucleic acid molecules having a sequence encoding a peptide alone, a sequence encoding a mature peptide and additional coding sequences such as a leader or secretory sequence (e.g., a pre-pro or pro-protein sequence), a sequence encoding a mature peptide with or without additional coding sequences, plus additional non-coding sequences, for example introns and non-coding 5′ and 3′ sequences such as transcribed but untranslated sequences that play a role in, for example, transcription, mRNA processing (including splicing and polyadenylation signals), ribosome binding, and/or stability of mRNA. In addition, the nucleic acid molecules may be fused to heterologous marker sequences encoding, for example, a peptide that facilitates purification.

[0098] Isolated nucleic acid molecules can be in the form of RNA, such as mRNA, or in the form DNA, including cDNA and genomic DNA, which may be obtained, for example, by molecular cloning or produced by chemical synthetic techniques or by a combination thereof (Sambrook and Russell, 2000, Molecular Cloning: A Laboratory Manual, Cold Spring Harbor Press, NY). Furthermore, isolated nucleic acid molecules, particularly SNP detection reagents such as probes and primers, can also be partially or completely in the form of one or more types of nucleic acid analogs, such as peptide nucleic acid (PNA) (U.S. Pat. Nos. 5,539,082; 5,527,675; 5,623,049; 5,714,331). The nucleic acid, especially DNA, can be double-stranded or single-stranded. Single-stranded nucleic acid can be the coding strand (sense strand) or the complementary non-coding strand (anti-sense strand). DNA, RNA, or PNA segments can be assembled, for example, from fragments of the human genome (in the case of DNA or RNA) or single nucleotides, short oligonucleotide linkers, or from a series of oligonucleotides, to provide a synthetic nucleic acid molecule. Nucleic acid molecules can be readily synthesized using the sequences provided herein as a reference; oligonucleotide and PNA oligomer synthesis techniques are well known in the art (see, e.g., Corey, “Peptide nucleic acids: expanding the scope of nucleic acid recognition”, Trends Biotechnol. 1997 June; 15(6):224-9, and Hyrup et al., “Peptide nucleic acids (PNA): synthesis, properties and potential applications”, Bioorg Med. Chem. 1996 January; 4(1):5-23). Furthermore, large-scale automated oligonucleotide/PNA synthesis (including synthesis on an array or bead surface or other solid support) can readily be accomplished using commercially available nucleic acid synthesizers, such as the Applied Biosystems (Foster City, Calif.) 3900 High-Throughput DNA Synthesizer or Expedite 8909 Nucleic Acid Synthesis System, and the sequence information provided herein.

[0099] The present invention encompasses nucleic acid analogs that contain modified, synthetic, or non-naturally occurring nucleotides or structural elements or other alternative/modified nucleic acid chemistries known in the art. Such nucleic acid analogs are useful, for example, as detection reagents (e.g., primers/probes) for detecting one or more SNPs identified in Table 1 and/or Table 2. Furthermore, kits/systems (such as beads, arrays, etc.) that include these analogs are also encompassed by the present invention. For example, PNA oligomers that are based on the polymorphic sequences of the present invention are specifically contemplated. PNA oligomers are analogs of DNA in which the phosphate backbone is replaced with a peptide-like backbone (Lagriffoul et al., Bioorganic & Medicinal Chemistry Letters, 4: 1081-1082 (1994), Petersen et al., Bioorganic & Medicinal Chemistry Letters, 6: 793-796 (1996), Kumar et al., Organic Letters 3(9): 1269-1272 (2001), WO96/04000). PNA hybridizes to complementary RNA or DNA with higher affinity and specificity than conventional oligonucleotides and oligonucleotide analogs. The properties of PNA enable novel molecular biology and biochemistry applications unachievable with traditional oligonucleotides and peptides.

[0100] Additional examples of nucleic acid modifications that improve the binding properties and/or stability of a nucleic acid include the use of base analogs such as inosine, intercalators (U.S. Pat. No. 4,835,263) and the minor groove binders (U.S. Pat. No. 5,801,115). Thus, references herein to nucleic acid molecules, SNP-containing nucleic acid molecules, SNP detection reagents (e.g., probes and primers), oligonucleotides/polynucleotides include PNA oligomers and other nucleic acid analogs. Other examples of nucleic acid analogs and alternative/modified nucleic acid chemistries known in the art are described in Current Protocols in Nucleic Acid Chemistry, John Wiley & Sons, N.Y. (2002).

[0101] The present invention further provides nucleic acid molecules that encode fragments of the variant enzyme polypeptides disclosed herein as well as nucleic acid molecules that encode obvious variants of such variant polypeptides. Such nucleic acid molecules may be naturally occurring, such as paralogs (different locus) and orthologs (different organism), or may be constructed by recombinant DNA methods or by chemical synthesis. Non-naturally occurring variants may be made by mutagenesis techniques, including those applied to nucleic acid molecules, cells, or organisms. Accordingly, the variants can contain nucleotide substitutions, deletions, inversions and insertions (in addition to the SNPs disclosed in Tables 1-2). Variation can occur in either or both the coding and non-coding regions. The variations can produce conservative and/or non-conservative amino acid substitutions.

[0102] Further variants of the nucleic acid molecules disclosed in Tables 1-2, such as naturally occurring allelic variants (as well as orthologs and paralogs) and synthetic variants produced by mutagenesis techniques, can be identified and/or produced using methods well known in the art. Such further variants can comprise a nucleotide sequence that shares at least 70-80%, 80-85%, 85-90%, 91%, 92%, 93%, 94%, 95%, 96%, 97%, 98%, or 99% sequence identity with a nucleic acid sequence disclosed in Table 1 and/or Table 2 (or a fragment thereof) and that includes a novel SNP allele disclosed in Table 1 and/or Table 2. Further, variants can comprise a nucleotide sequence that encodes a polypeptide that shares at least 70-80%, 80-85%, 85-90%, 91%, 92%, 93%, 94%, 95%, 96%, 97%, 98%, or 99% sequence identity with a polypeptide sequence disclosed in Table 1 (or a fragment thereof) and that includes a novel SNP allele disclosed in Table 1 and/or Table 2. Thus, an aspect of the present invention that is specifically contemplated are isolated nucleic acid molecule that have a certain degree of sequence variation compared with the sequences shown in Tables 1-2, but that contain a novel SNP allele disclosed herein. In other words, as long as an isolated nucleic acid molecule contains a novel SNP allele disclosed herein, other portions of the nucleic acid molecule that flank the novel SNP allele can vary to some degree from the specific transcript, genomic, and context sequences shown in Tables 1-2, and can encode a polypeptide that varies to some degree from the specific polypeptide sequences shown in Table 1.

[0103] To determine the percent identity of two amino acid sequences or two nucleotide sequences of two molecules that share sequence homology, the sequences are aligned for optimal comparison purposes (e.g., gaps can be introduced in one or both of a first and a second amino acid or nucleic acid sequence for optimal alignment and non-homologous sequences can be disregarded for comparison purposes). In a preferred embodiment, at least 30%, 40%, 50%, 60%, 70%, 80%, or 90% or more of the length of a reference sequence is aligned for comparison purposes. The amino acid residues or nucleotides at corresponding amino acid positions or nucleotide positions are then compared. When a position in the first sequence is occupied by the same amino acid residue or nucleotide as the corresponding position in the second sequence, then the molecules are identical at that position (as used herein, amino acid or nucleic acid “identity” is equivalent to amino acid or nucleic acid “homology”). The percent identity between the two sequences is a function of the number of identical positions shared by the sequences, taking into account the number of gaps, and the length of each gap, which need to be introduced for optimal alignment of the two sequences.

[0104] The comparison of sequences and determination of percent identity between two sequences can be accomplished using a mathematical algorithm. (Computational Molecular Biology, Lesk, A.M., ed., Oxford University Press, New York, 1988; Biocomputing: Informatics and Genome Projects, Smith, D. W., ed., Academic Press, New York, 1993; Computer Analysis of Sequence Data, Part 1, Griffin, A. M., and Griffin, H. G., eds., Humana Press, New Jersey, 1994; Sequence Analysis in Molecular Biology, von Heinje, G., Academic Press, 1987; and Sequence Analysis Primer, Gribskov, M. and Devereux, J., eds., M Stockton Press, New York, 1991). In a preferred embodiment, the percent identity between two amino acid sequences is determined using the Needleman and Wunsch algorithm (J. Mol. Biol. (48):444-453 (1970)) which has been incorporated into the GAP program in the GCG software package, using either a Blossom 62 matrix or a PAM250 matrix, and a gap weight of 16, 14, 12, 10, 8, 6, or 4 and a length weight of 1, 2, 3, 4, 5, or 6.

[0105] In yet another preferred embodiment, the percent identity between two nucleotide sequences is determined using the GAP program in the GCG software package (Devereux, J., et al., Nucleic Acids Res. 12(1):387 (1984)), using a NWSgapdna.CMP matrix and a gap weight of 40, 50, 60, 70, or 80 and a length weight of 1, 2, 3, 4, 5, or 6. In another embodiment, the percent identity between two amino acid or nucleotide sequences is determined using the algorithm of E. Myers and W. Miller (CABIOS, 4:11-17 (1989)) which has been incorporated into the ALIGN program (version 2.0), using a PAM120 weight residue table, a gap length penalty of 12, and a gap penalty of 4.

[0106] The nucleotide and amino acid sequences of the present invention can further be used as a “query sequence” to perform a search against sequence databases to, for example, identify other family members or related sequences. Such searches can be performed using the NBLAST and XBLAST programs (version 2.0) of Altschul, et al. (J. Mol. Biol. 215:403-10 (1990)). BLAST nucleotide searches can be performed with the NBLAST program, score=100, wordlength=12 to obtain nucleotide sequences homologous to the nucleic acid molecules of the invention. BLAST protein searches can be performed with the XBLAST program, score=50, wordlength=3 to obtain amino acid sequences homologous to the proteins of the invention. To obtain gapped alignments for comparison purposes, Gapped BLAST can be utilized as described in Altschul et al. (Nucleic Acids Res. 25(17):3389-3402 (1997)). When utilizing BLAST and gapped BLAST programs, the default parameters of the respective programs (e.g., XBLAST and NBLAST) can be used. In addition to BLAST, examples of other search and sequence comparison programs used in the art include, but are not limited to, FASTA (Pearson, Methods Mol. Biol. 25, 365-389 (1994)) and KERR (Dufresne et al., Nat Biotechnol 2002 December; 20(12):1269-71). For further information regarding bioinformatics techniques, see Current Protocols in Bioinformatics, John Wiley & Sons, Inc., N.Y.

[0107] The present invention further provides non-coding fragments of the nucleic acid molecules disclosed in Table 1 and/or Table 2. Preferred non-coding fragments include, but are not limited to, promoter sequences, enhancer sequences, intronic sequences, 5′ untranslated regions (UTRs), 3′ untranslated regions, gene modulating sequences and gene termination sequences. Such fragments are useful, for example, in controlling heterologous gene expression and in developing screens to identify gene-modulating agents.

[0108] SNP Detection Reagents

[0109] In a specific aspect of the present invention, the SNPs disclosed in Table 1 and/or Table 2, and their associated transcript sequences (provided in Table 1 as SEQ ID NOS:1-7498), genomic sequences (provided in Table 2 as SEQ ID NOS:93,193-98,281), and context sequences (transcript-based context sequences are provided in Table 1 as SEQ ID NOS:14,997-93,192; genomic-based context sequences are provided in Table 2 as SEQ ID NOS:98,282-558,824), can be used for the design of SNP detection reagents. As used herein, a “SNP detection reagent” is a reagent that specifically detects a specific target SNP position disclosed herein, and that is preferably specific for a particular nucleotide (allele) of the target SNP position (i.e., the detection reagent preferably can differentiate between different alternative nucleotides at a target SNP position, thereby allowing the identity of the nucleotide present at the target SNP position to be determined). Typically, such detection reagent hybridizes to a target SNP-containing nucleic acid molecule by complementary base-pairing in a sequence specific manner, and discriminates the target variant sequence from other nucleic acid sequences such as an art-known form in a test sample. An example of a detection reagent is a probe that hybridizes to a target nucleic acid containing one or more of the SNPs provided in Table 1 and/or Table 2. In a preferred embodiment, such a probe can differentiate between nucleic acids having a particular nucleotide (allele) at a target SNP position from other nucleic acids that have a different nucleotide at the same target SNP position. In addition, a detection reagent may hybridize to a specific region 5′ and/or 3′ to a SNP position, particularly a region corresponding to the context sequences provided in Table 1 and/or Table 2 (transcript-based context sequences are provided in Table 1 as SEQ ID NOS:14,997-93,192; genomic-based context sequences are provided in Table 2 as SEQ ID NOS:98,282-558,824). Another example of a detection reagent is a primer which acts as an initiation point of nucleotide extension along a complementary strand of a target polynucleotide. The SNP sequence information provided herein is also useful for designing primers, e.g. allele-specific primers, to amplify (e.g., using PCR) any SNP of the present invention.

[0110] In one preferred embodiment of the invention, a SNP detection reagent is an isolated or synthetic DNA or RNA polynucleotide probe or primer or PNA oligomer, or a combination of DNA, RNA, and/or PNA, that hybridizes to a segment of a target nucleic acid molecule containing a SNP identified in Table 1 and/or Table 2. A detection reagent in the form of a polynucleotide may optionally contain modified base analogs, intercalators or minor groove binders. Multiple detection reagents such as probes may be, for example, affixed to a solid support (e.g., arrays or beads) or supplied in solution (e.g., probe/primer sets for enzymatic reactions such as PCR, RT-PCR, TaqMan assays, or primer-extension reactions) to form a SNP detection kit.

[0111] A probe or primer typically is a substantially purified oligonucleotide or PNA oligomer. Such oligonucleotide typically comprises a region of complementary nucleotide sequence that hybridizes under stringent conditions to at least about 8, 10, 12, 16, 18, 20, 22, 25, 30, 40, 50, 55, 60, 65, 70, 80, 90, 100, 120 (or any other number in-between) or more consecutive nucleotides in a target nucleic acid molecule. Depending on the particular assay, the consecutive nucleotides can either include the target SNP position, or be a specific region in close enough proximity 5′ and/or 3′ to the SNP position to carry out the desired assay.

[0112] Other preferred primer and probe sequences can readily be determined using the transcript sequences (SEQ ID NOS:1-7498), genomic sequences (SEQ ID NOS:93,193-98,281), and SNP context sequences (transcript-based context sequences are provided in Table 1 as SEQ ID NOS:14,997-93,192; genomic-based context sequences are provided in Table 2 as SEQ ID NOS:98,282-558,824) disclosed in the Sequence Listing and in Tables 1-2. It will be apparent to one of skill in the art that such primers and probes are directly useful as reagents for genotyping the SNPs of the present invention, and can be incorporated into any kit/system format.

[0113] In order to produce a probe or primer specific for a target SNP-containing sequence, the gene/transcript and/or context sequence surrounding the SNP of interest is typically examined using a computer algorithm which starts at the 5′ or at the 3′ end of the nucleotide sequence. Typical algorithms will then identify oligomers of defined length that are unique to the gene/SNP context sequence, have a GC content within a range suitable for hybridization, lack predicted secondary structure that may interfere with hybridization, and/or possess other desired characteristics or that lack other undesired characteristics.

[0114] A primer or probe of the present invention is typically at least about 8 nucleotides in length. In one embodiment of the invention, a primer or a probe is at least about 10 nucleotides in length. In a preferred embodiment, a primer or a probe is at least about 12 nucleotides in length. In a more preferred embodiment, a primer or probe is at least about 16, 17, 18, 19, 20, 21, 22, 23, 24, or 25 nucleotides in length. While the maximal length of a probe can be as long as the target sequence to be detected, depending on the type of assay in which it is employed, it is typically less than about 50, 60, 65, or 70 nucleotides in length. In the case of a primer, it is typically less than about 30 nucleotides in length. In a specific preferred embodiment of the invention, a primer or a probe is within the length of about 18 and about 28 nucleotides. However, in other embodiments, such as nucleic acid arrays and other embodiments in which probes are affixed to a substrate, the probes can be longer, such as on the order of 30-70, 75, 80, 90, 100, or more nucleotides in length (see the section below entitled “SNP Detection Kits and Systems”).

[0115] For analyzing SNPs, it may be appropriate to use oligonucleotides specific for alternative SNP alleles. Such oligonucleotides which detect single nucleotide variations in target sequences may be referred to by such terms as “allele-specific oligonucleotides”, “allele-specific probes”, or “allele-specific primers”. The design and use of allele-specific probes for analyzing polymorphisms is described in, e.g., Mutation Detection A Practical Approach, ed. Cotton et al. Oxford University Press, 1998; Saiki et al., Nature 324, 163-166 (1986); Dattagupta, EP235,726; and Saiki, WO 89/11548.

[0116] While the design of each allele-specific primer or probe depends on variables such as the precise composition of the nucleotide sequences flanking a SNP position in a target nucleic acid molecule, and the length of the primer or probe, another factor in the use of primers and probes is the stringency of the condition under which the hybridization between the probe or primer and the target sequence is performed. Higher stringency conditions utilize buffers with lower ionic strength and/or a higher reaction temperature, and tend to require a more perfect match between probe/primer and a target sequence in order to form a stable duplex. If the stringency is too high, however, hybridization may not occur at all. In contrast, lower stringency conditions utilize buffers with higher ionic strength and/or a lower reaction temperature, and permit the formation of stable duplexes with more mismatched bases between a probe/primer and a target sequence. By way of example and not limitation, exemplary conditions for high stringency hybridization conditions using an allele-specific probe are as follows: Prehybridization with a solution containing 5× standard saline phosphate EDTA (SSPE), 0.5% NaDodSO₄ (SDS) at 55° C., and incubating probe with target nucleic acid molecules in the same solution at the same temperature, followed by washing with a solution containing 2×SSPE, and 0.1% SDS at 55° C. or room temperature.

[0117] Moderate stringency hybridization conditions may be used for allele-specific primer extension reactions with a solution containing, e.g., about 50 mM KCl at about 46° C. Alternatively, the reaction may be carried out at an elevated temperature such as 60° C. In another embodiment, a moderately stringent hybridization condition suitable for oligonucleotide ligation assay (OLA) reactions wherein two probes are ligated if they are completely complementary to the target sequence may utilize a solution of about 100 mM KCl at a temperature of 46° C.

[0118] In a hybridization-based assay, allele-specific probes can be designed that hybridize to a segment of target DNA from one individual but do not hybridize to the corresponding segment from another individual due to the presence of different polymorphic forms (e.g., alternative SNP alleles/nucleotides) in the respective DNA segments from the two individuals. Hybridization conditions should be sufficiently stringent that there is a significant detectable difference in hybridization intensity between alleles, and preferably an essentially binary response, whereby a probe hybridizes to only one of the alleles or significantly more strongly to one allele. While a probe may be designed to hybridize to a target sequence that contains a SNP site such that the SNP site aligns anywhere along the sequence of the probe, the probe is preferably designed to hybridize to a segment of the target sequence such that the SNP site aligns with a central position of the probe (e.g., a position within the probe that is at least three nucleotides from either end of the probe). This design of probe generally achieves good discrimination in hybridization between different allelic forms.

[0119] In another embodiment, a probe or primer may be designed to hybridize to a segment of target DNA such that the SNP aligns with either the 5′ most end or the 3′ most end of the probe or primer. In a specific preferred embodiment which is particularly suitable for use in a oligonucleotide ligation assay (U.S. Pat. No. 4,988,617), the 3′ most nucleotide of the probe aligns with the SNP position in the target sequence.

[0120] Oligonucleotide probes and primers may be prepared by methods well known in the art. Chemical synthetic methods include, but are limited to, the phosphotriester method described by Narang et al., 1979, Methods in Enzymology 68:90; the phosphodiester method described by Brown et al., 1979, Methods in Enzymology 68:109, the diethylphosphoamidate method described by Beaucage et al., 1981, Tetrahedron Letters 22:1859; and the solid support method described in U.S. Pat. No. 4,458,066.

[0121] Allele-specific probes are often used in pairs (or, less commonly, in sets of 3 or 4, such as if a SNP position is known to have 3 or 4 alleles, respectively, or to assay both strands of a nucleic acid molecule for a target SNP allele), and such pairs may be identical except for a one nucleotide mismatch that represents the allelic variants at the SNP position. Commonly, one member of a pair perfectly matches a reference form of a target sequence that has a more common SNP allele (i.e., the allele that is more frequent in the target population) and the other member of the pair perfectly matches a form of the target sequence that has a less common SNP allele (i.e., the allele that is rarer in the target population). In the case of an array, multiple pairs of probes can be immobilized on the same support for simultaneous analysis of multiple different polymorphisms.

[0122] In one type of PCR-based assay, an allele-specific primer hybridizes to a region on a target nucleic acid molecule that overlaps a SNP position and only primes amplification of an allelic form to which the primer exhibits perfect complementarity (Gibbs, 1989, Nucleic Acid Res. 17 2427-2448). Typically, the primer's 3′-most nucleotide is aligned with and complementary to the SNP position of the target nucleic acid molecule. This primer is used in conjunction with a second primer that hybridizes at a distal site. Amplification proceeds from the two primers, producing a detectable product that indicates which allelic form is present in the test sample. A control is usually performed with a second pair of primers, one of which shows a single base mismatch at the polymorphic site and the other of which exhibits perfect complementarity to a distal site. The single-base mismatch prevents amplification or substantially reduces amplification efficiency, so that either no detectable product is formed or it is formed in lower amounts or at a slower pace. The method generally works most effectively when the mismatch is at the 3′-most position of the oligonucleotide (i.e., the 3′-most position of the oligonucleotide aligns with the target SNP position) because this position is most destabilizing to elongation from the primer (see, e.g., WO 93/22456). This PCR-based assay can be utilized as part of the TaqMan assay, described below.

[0123] In a specific embodiment of the invention, a primer of the invention contains a sequence substantially complementary to a segment of a target SNP-containing nucleic acid molecule except that the primer has a mismatched nucleotide in one of the three nucleotide positions at the 3′-most end of the primer, such that the mismatched nucleotide does not base pair with a particular allele at the SNP site. In a preferred embodiment, the mismatched nucleotide in the primer is the second from the last nucleotide at the 3′-most position of the primer. In a more preferred embodiment, the mismatched nucleotide in the primer is the last nucleotide at the 3′-most position of the primer.

[0124] In another embodiment of the invention, a SNP detection reagent of the invention is labeled with a fluorogenic reporter dye that emits a detectable signal. While the preferred reporter dye is a fluorescent dye, any reporter dye that can be attached to a detection reagent such as an oligonucleotide probe or primer is suitable for use in the invention. Such dyes include, but are not limited to, Acridine, AMCA, BODIPY, Cascade Blue, Cy2, Cy3, Cy5, Cy7, Dabcyl, Edans, Eosin, Erythrosin, Fluorescein, 6-Fam, Tet, Joe, Hex, Oregon Green, Rhodamine, Rhodol Green, Tamra, Rox, and Texas Red.

[0125] In yet another embodiment of the invention, the detection reagent may be further labeled with a quencher dye such as Tamra, especially when the reagent is used as a self-quenching probe such as a TaqMan (U.S. Pat. Nos. 5,210,015 and 5,538,848) or Molecular Beacon probe (U.S. Pat. Nos. 5,118,801 and 5,312,728), or other stemless or linear beacon probe (Livak et al., 1995, PCR Method Appl. 4:357-362; Tyagi et al., 1996, Nature Biotechnology 14: 303-308; Nazarenko et al., 1997, Nucl. Acids Res. 25:2516-2521; U.S. Pat. Nos. 5,866,336 and 6,117,635).

[0126] The detection reagents of the invention may also contain other labels, including but not limited to, biotin for streptavidin binding, hapten for antibody binding, and oligonucleotide for binding to another complementary oligonucleotide such as pairs of zipcodes.

[0127] The present invention also contemplates reagents that do not contain (or that are complementary to) a SNP nucleotide identified herein but that are used to assay one or more SNPs disclosed herein. For example, primers that flank, but do not hybridize directly to a target SNP position provided herein are useful in primer extension reactions in which the primers hybridize to a region adjacent to the target SNP position (i.e., within one or more nucleotides from the target SNP site). During the primer extension reaction, a primer is typically not able to extend past a target SNP site if a particular nucleotide (allele) is present at that target SNP site, and the primer extension product can be detected in order to determine which SNP allele is present at the target SNP site. For example, particular ddNTPs are typically used in the primer extension reaction to terminate primer extension once a ddNTP is incorporated into the extension product (a primer extension product which includes a ddNTP at the 3′-most end of the primer extension product, and in which the ddNTP is a nucleotide of a SNP disclosed herein, is a composition that is specifically contemplated by the present invention). Thus, reagents that bind to a nucleic acid molecule in a region adjacent to a SNP site and that are used for assaying the SNP site, even though the bound sequences do not necessarily include the SNP site itself, are also contemplated by the present invention.

[0128] SNP Detection Kits and Systems

[0129] A person skilled in the art will recognize that, based on the SNP and associated sequence information disclosed herein, detection reagents can be developed and used to assay any SNP of the present invention individually or in combination, and such detection reagents can be readily incorporated into one of the established kit or system formats which are well known in the art. The terms “kits” and “systems”, as used herein in the context of SNP detection reagents, are intended to refer to such things as combinations of multiple SNP detection reagents, or one or more SNP detection reagents in combination with one or more other types of elements or components (e.g., other types of biochemical reagents, containers, packages such as packaging intended for commercial sale, substrates to which SNP detection reagents are attached, electronic hardware components, etc.). Accordingly, the present invention further provides SNP detection kits and systems, including but not limited to, packaged probe and primer sets (e.g., TaqMan probe/primer sets), arrays/microarrays of nucleic acid molecules, and beads that contain one or more probes, primers, or other detection reagents for detecting one or more SNPs of the present invention. The kits/systems can optionally include various electronic hardware components; for example, arrays (“DNA chips”) and microfluidic systems (“lab-on-a-chip” systems) provided by various manufacturers typically comprise hardware components. Other kits/systems (e.g., probe/primer sets) may not include electronic hardware components, but may be comprised of, for example, one or more SNP detection reagents (along with, optionally, other biochemical reagents) packaged in one or more containers.

[0130] In some embodiments, a SNP detection kit typically contains one or more detection reagents and other components (e.g., a buffer, enzymes such as DNA polymerases or ligases, chain extension nucleotides such as deoxynucleotide triphosphates, and in the case of Sanger-type DNA sequencing reactions, chain terminating nucleotides, positive control sequences, negative control sequences, and the like) necessary to carry out an assay or reaction, such as amplification and/or detection of a SNP-containing nucleic acid molecule. A kit may further contain means for determining the amount of a target nucleic acid, and means for comparing the amount with a standard, and can comprise instructions for using the kit to detect the SNP-containing nucleic acid molecule of interest. In one embodiment of the present invention, kits are provided which contain the necessary reagents to carry out one or more assays to detect one or more SNPs disclosed herein. In a preferred embodiment of the present invention, SNP detection kits/systems are in the form of nucleic acid arrays, or compartmentalized kits, including microfluidic/lab-on-a-chip systems.

[0131] SNP detection kits/systems may contain, for example, one or more probes, or pairs of probes, that hybridize to a nucleic acid molecule at or near each target SNP position. Multiple pairs of allele-specific probes may be included in the kit/system to simultaneously assay large numbers of SNPs, at least one of which is a SNP of the present invention. In some kits/systems, the allele-specific probes are immobilized to a substrate such as an array or bead. For example, the same substrate can comprise allele-specific probes for detecting at least 1; 10; 100; 1000; 10,000; 100,000 (or any other number in-between) or substantially all of the SNPs shown in Table 1 and/or Table 2.

[0132] The terms “arrays”, “microarrays”, and “DNA chips” are used herein interchangeably to refer to an array of distinct polynucleotides affixed to a substrate, such as glass, plastic, paper, nylon or other type of membrane, filter, chip, or any other suitable solid support. The polynucleotides can be synthesized directly on the substrate, or synthesized separate from the substrate and then affixed to the substrate. In one embodiment, the microarray is prepared and used according to the methods described in U.S. Pat. No. 5,837,832, Chee et al., PCT application WO95/11995 (Chee et al.), Lockhart, D. J. et al. (1996; Nat. Biotech. 14: 1675-1680) and Schena, M. et al. (1996; Proc. Natl. Acad. Sci. 93: 10614-10619), all of which are incorporated herein in their entirety by reference. In other embodiments, such arrays are produced by the methods described by Brown et al., U.S. Pat. No. 5,807,522.

[0133] Nucleic acid arrays are reviewed in the following references: Zammatteo et al., “New chips for molecular biology and diagnostics”, Biotechnol Annu Rev. 2002; 8:85-101; Sosnowski et al., “Active microelectronic array system for DNA hybridization, genotyping and pharmacogenomic applications”, Psychiatr Genet. 2002 December; 12(4):181-92; Heller, “DNA microarray technology: devices, systems, and applications”, Annu Rev Biomed Eng. 2002; 4:129-53. Epub 2002 Mar. 22; Kolchinsky et al., “Analysis of SNPs and other genomic variations using gel-based chips”, Hum Mutat. 2002 April; 19(4):343-60; and McGall et al., “High-density genechip oligonucleotide probe arrays”, Adv Biochem Eng Biotechnol. 2002; 77:21-42.

[0134] Any number of probes, such as allele-specific probes, may be implemented in an array, and each probe or pair of probes can hybridize to a different SNP position. In the case of polynucleotide probes, they can be synthesized at designated areas (or synthesized separately and then affixed to designated areas) on a substrate using a light-directed chemical process. Each DNA chip can contain, for example, thousands to millions of individual synthetic polynucleotide probes arranged in a grid-like pattern and miniaturized (e.g., to the size of a dime). Preferably, probes are attached to a solid support in an ordered, addressable array.

[0135] A microarray can be composed of a large number of unique, single-stranded polynucleotides, usually either synthetic antisense polynucleotides or fragments of cDNAs, fixed to a solid support. Typical polynucleotides are preferably about 6-60 nucleotides in length, more preferably about 15-30 nucleotides in length, and most preferably about 18-25 nucleotides in length. For a certain types of microarrays or other detection kits/systems, it may be preferable to use oligonucleotides that are only about 7-20 nucleotides in length. In other types of arrays, such as arrays used in conjunction with chemiluminescent detection technology, preferred probe lengths can be, for example, about 15-80 nucleotides in length, preferably about 50-70 nucleotides in length, more preferably about 55-65 nucleotide in length, and most preferably about 60 nucleotides in length. The microarray or detection kit can contain polynucleotides that cover the known 5′ or 3′ sequence of a gene/transcript or target SNP site, sequential polynucleotides that cover the full-length sequence of a gene/transcript; or unique polynucleotides selected from particular areas along the length of a target gene/transcript sequence, particularly areas corresponding to one or more SNPs disclosed in Table 1 and/or Table 2. Polynucleotides used in the microarray or detection kit can be specific to a SNP or SNPs of interest (e.g., specific to a particular SNP allele at a target SNP site, or specific to particular SNP alleles at multiple different SNP sites), or specific to a polymorphic gene/transcript or genes/transcripts of interest.

[0136] Hybridization assays based on polynucleotide arrays rely on the differences in hybridization stability of the probes to perfectly matched and mismatched target sequence variants. For SNP genotyping, it is generally preferable that stringency conditions used in hybridization assays are high enough such that nucleic acid molecules that differ from one another at as little as a single SNP position can be differentiated (e.g., typical SNP hybridization assays are designed so that hybridization will occur only if one particular nucleotide is present at a SNP position, but will not occur if an alternative nucleotide is present at that SNP position). Such high stringency conditions may be preferable when using, for example, nucleic acid arrays of allele-specific probes for SNP detection. Such high stringency conditions are described in the preceding section, and are well known to those skilled in the art and can be found in, for example, Current Protocols in Molecular Biology, John Wiley & Sons, N.Y. (1989), 6.3.1-6.3.6.

[0137] In other embodiments, the arrays are used in conjunction with chemiluminescent detection technology. The following patents and patent applications, which are all hereby incorporated by reference, provide additional information pertaining to chemiluminescent detection: U.S. patent application Ser. Nos. 10/620,332 and 10/620,333 describe chemiluminescent approaches for microarray detection. U.S. Pat. Nos. 6,124,478, 6,107,024, 5,994,073, 5,981,768, 5,871,938, 5,843,681, 5,800,999, and 5,773,628 describe methods and compositions of dioxetane for performing chemiluminescent detection; and U.S. published application US2002/0110828 discloses methods and compositions for microarray controls.

[0138] In one embodiment of the invention, a nucleic acid array can comprise an array of probes of about 15-25 nucleotides in length. In further embodiments, a nucleic acid array can comprise an array containing any number of probes, in which at least one probe is capable of detecting one or more SNPs disclosed in Table 1 and/or Table 2, and/or at least one probe comprises a fragment of one of the sequences selected from the group consisting of those disclosed in Table 1, Table 2, the Sequence Listing, and sequences complementary thereto, said fragment comprising at least about 8 consecutive nucleotides, preferably 10, 12, 15, 16, 18, 20, more preferably 22, 25, 30, 40, 47, 50, 55, 60, 65, 70, 80, 90, 100, or more consecutive nucleotides (or any other number in-between) and containing (or being complementary to) a novel SNP allele disclosed in Table 1 and/or Table 2. In some embodiments, the nucleotide complementary to the SNP site is within 5, 4, 3, 2, or 1 nucleotide from the center of the probe, more preferably at the center of said probe.

[0139] A polynucleotide probe can be synthesized on the surface of the substrate by using a chemical coupling procedure and an ink jet application apparatus, as described in PCT application WO95/251116 (Baldeschweiler et al.) which is incorporated herein in its entirety by reference. In another aspect, a “gridded” array analogous to a dot (or slot) blot may be used to arrange and link cDNA fragments or oligonucleotides to the surface of a substrate using a vacuum system, thermal, UV, mechanical or chemical bonding procedures. An array, such as those described above, may be produced by hand or by using available devices (slot blot or dot blot apparatus), materials (any suitable solid support), and machines (including robotic instruments), and may contain 8, 24, 96, 384, 1536, 6144 or more polynucleotides, or any other number which lends itself to the efficient use of commercially available instrumentation.

[0140] Using such arrays or other kits/systems, the present invention provides methods of identifying the SNPs disclosed herein in a test sample. Such methods typically involve incubating a test sample of nucleic acids with an array comprising one or more probes corresponding to at least one SNP position of the present invention, and assaying for binding of a nucleic acid from the test sample with one or more of the probes. Conditions for incubating a SNP detection reagent (or a kit/system that employs one or more such SNP detection reagents) with a test sample vary. Incubation conditions depend on such factors as the format employed in the assay, the detection methods employed, and the type and nature of the detection reagents used in the assay. One skilled in the art will recognize that any one of the commonly available hybridization, amplification and array assay formats can readily be adapted to detect the SNPs disclosed herein.

[0141] A SNP detection kit/system of the present invention may include components that are used to prepare nucleic acids from a test sample for the subsequent amplification and/or detection of a SNP-containing nucleic acid molecule. Such sample preparation components can be used to produce nucleic acid extracts (including DNA and/or RNA), proteins or membrane extracts from any bodily fluids (such as blood, serum, plasma, urine, saliva, phlegm, gastric juices, semen, tears, sweat, etc.), skin, hair, cells (especially nucleated cells), biopsies, buccal swabs or tissue specimens. The test samples used in the above-described methods will vary based on such factors as the assay format, nature of the detection method, and the specific tissues, cells or extracts used as the test sample to be assayed. Methods of preparing nucleic acids, proteins, and cell extracts are well known in the art and can be readily adapted to obtain a sample that is compatible with the system utilized. Automated sample preparation systems for extracting nucleic acids from a test sample are commercially available, and examples are Qiagen's BioRobot 9600, Applied Biosystems' PRISM 6700, and Roche Molecular Systems'COBAS AmpliPrep System.

[0142] Another form of kit contemplated by the present invention is a compartmentalized kit. A compartmentalized kit includes any kit in which reagents are contained in separate containers. Such containers include, for example, small glass containers, plastic containers, strips of plastic, glass or paper, or arraying material such as silica. Such containers allow one to efficiently transfer reagents from one compartment to another compartment such that the test samples and reagents are not cross-contaminated, or from one container to another vessel not included in the kit, and the agents or solutions of each container can be added in a quantitative fashion from one compartment to another or to another vessel. Such containers may include, for example, one or more containers which will accept the test sample, one or more containers which contain at least one probe or other SNP detection reagent for detecting one or more SNPs of the present invention, one or more containers which contain wash reagents (such as phosphate buffered saline, Tris-buffers, etc.), and one or more containers which contain the reagents used to reveal the presence of the bound probe or other SNP detection reagents. The kit can optionally further comprise compartments and/or reagents for, for example, nucleic acid amplification or other enzymatic reactions such as primer extension reactions, hybridization, ligation, electrophoresis (preferably capillary electrophoresis), mass spectrometry, and/or laser-induced fluorescent detection. The kit may also include instructions for using the kit. Exemplary compartmentalized kits include microfluidic devices known in the art (see, e.g., Weigl et al., “Lab-on-a-chip for drug development”, Adv Drug Deliv Rev. 2003 Feb. 24; 55(3):349-77). In such microfluidic devices, the containers may be referred to as, for example, microfluidic “compartments”, “chambers”, or “channels”.

[0143] Microfluidic devices, which may also be referred to as “lab-on-a-chip” systems, biomedical micro-electro-mechanical systems (bioMEMs), or multicomponent integrated systems, are exemplary kits/systems of the present invention for analyzing SNPs. Such systems miniaturize and compartmentalize processes such as probe/target hybridization, nucleic acid amplification, and capillary electrophoresis reactions in a single functional device. Such microfluidic devices typically utilize detection reagents in at least one aspect of the system, and such detection reagents may be used to detect one or more SNPs of the present invention. One example of a microfluidic system is disclosed in U.S. Pat. No. 5,589,136, which describes the integration of PCR amplification and capillary electrophoresis in chips. Exemplary microfluidic systems comprise a pattern of microchannels designed onto a glass, silicon, quartz, or plastic wafer included on a microchip. The movements of the samples may be controlled by electric, electroosmotic or hydrostatic forces applied across different areas of the microchip to create functional microscopic valves and pumps with no moving parts. Varying the voltage can be used as a means to control the liquid flow at intersections between the micro-machined channels and to change the liquid flow rate for pumping across different sections of the microchip. See, for example, U.S. Pat. No. 6,153,073, Dubrow et al., and U.S. Pat. No. 6,156,181, Parce et al.

[0144] For genotyping SNPs, an exemplary microfluidic system may integrate, for example, nucleic acid amplification, primer extension, capillary electrophoresis, and a detection method such as laser induced fluorescence detection. In a first step of an exemplary process for using such an exemplary system, nucleic acid samples are amplified, preferably by PCR. Then, the amplification products are subjected to automated primer extension reactions using ddNTPs (specific fluorescence for each ddNTP) and the appropriate oligonucleotide primers to carry out primer extension reactions which hybridize just upstream of the targeted SNP. Once the extension at the 3′ end is completed, the primers are separated from the unincorporated fluorescent ddNTPs by capillary electrophoresis. The separation medium used in capillary electrophoresis can be, for example, polyacrylamide, polyethyleneglycol or dextran. The incorporated ddNTPs in the single nucleotide primer extension products are identified by laser-induced fluorescence detection. Such an exemplary microchip can be used to process, for example, at least 96 to 384 samples, or more, in parallel.

[0145] Uses of Nucleic Acid Molecules

[0146] The nucleic acid molecules of the present invention have a variety of uses, especially in the diagnosis and treatment of enzyme-mediated disorders. For example, the nucleic acid molecules are useful as hybridization probes, such as for genotyping SNPs in messenger RNA, transcript, cDNA, genomic DNA, amplified DNA or other nucleic acid molecules, and for isolating full-length cDNA and genomic clones encoding the variant enzyme peptides disclosed in Table 1 as well as their orthologs.

[0147] A probe can hybridize to any nucleotide sequence along the entire length of a nucleic acid molecule provided in Table 1 and/or Table 2. Preferably, a probe of the present invention hybridizes to a region of a target sequence that encompasses a SNP position indicated in Table 1 and/or Table 2. More preferably, a probe hybridizes to a SNP-containing target sequence in a sequence-specific manner such that it distinguishes the target sequence from other nucleotide sequences which vary from the target sequence only by which nucleotide is present at the SNP site. Such a probe is particularly useful for detecting the presence of a SNP-containing nucleic acid in a test sample, or for determining which nucleotide (allele) is present at a particular SNP site (i.e., genotyping the SNP site).

[0148] A nucleic acid hybridization probe may be used for determining the presence, level, form, and/or distribution of nucleic acid expression. The nucleic acid whose level is determined can be DNA or RNA. Accordingly, probes specific for the SNPs described herein can be used to assess the presence, expression and/or gene copy number in a given cell, tissue, or organism. These uses are relevant for diagnosis of disorders involving an increase or decrease in gene expression relative to normal levels. In vitro techniques for detection of mRNA include, for example, Northern blot hybridizations and in situ hybridizations. In vitro techniques for detecting DNA include Southern blot hybridizations and in situ hybridizations (Sambrook and Russell, 2000, Molecular Cloning: A Laboratory Manual, Cold Spring Harbor Press, Cold Spring Harbor, N.Y.).

[0149] Probes can be used as part of a diagnostic test kit for identifying cells or tissues in which a variant protein is expressed, such as by measuring the level of a variant protein-encoding nucleic acid (e.g., mRNA) in a sample of cells from a subject or determining if a polynucleotide contains a SNP of interest.

[0150] Thus, the nucleic acid molecules of the invention can be used as hybridization probes to detect the SNPs disclosed herein, thereby determining whether an individual with the polymorphisms is at risk for developing a enzyme-mediated disorder or has developed an early stage of a enzyme-mediated disorder. Detection of a SNP associated with a disease phenotype provides a diagnostic tool for an active disease and/or genetic predisposition to the disease.

[0151] Furthermore, the nucleic acid molecules of the invention are therefore useful for detecting a enzyme gene (gene information is disclosed in Table 2, for example) which contains a SNP disclosed herein and/or products of such enzyme genes, such as expressed mRNA transcript molecules (transcript information is disclosed in Table 1, for example), and are thus useful for detecting enzyme gene expression. The nucleic acid molecules can optionally be implemented in, for example, an array or kit format for use in detecting enzyme gene expression.

[0152] The nucleic acid molecules of the invention are also useful as primers to amplify any given region of a nucleic acid molecule, particularly a region containing a SNP identified in Table 1 and/or Table 2.

[0153] The nucleic acid molecules of the invention are also useful for constructing recombinant vectors (described in greater detail below). Such vectors include expression vectors that express a portion of, or all of, any of the variant peptide sequences provided in Table 1. Vectors also include insertion vectors, used to integrate into another nucleic acid molecule sequence, such as into the cellular genome, to alter in situ expression of a gene and/or gene product. For example, an endogenous coding sequence can be replaced via homologous recombination with all or part of the coding region containing one or more specifically introduced SNPs.

[0154] The nucleic acid molecules of the invention are also useful for expressing antigenic portions of the variant enzyme proteins, particularly antigenic portions that contain a variant amino acid sequence (e.g., an amino acid substitution) caused by a SNP disclosed in Table 1 and/or Table 2.

[0155] The nucleic acid molecules of the invention are also useful for constructing vectors containing a gene regulatory region of the nucleic acid molecules of the present invention.

[0156] The nucleic acid molecules of the invention are also useful for designing ribozymes corresponding to all, or a part, of an mRNA molecule expressed from a SNP-containing nucleic acid molecule described herein.

[0157] The nucleic acid molecules of the invention are also useful for constructing host cells expressing a part, or all, of the nucleic acid molecules and variant peptides.

[0158] The nucleic acid molecules of the invention are also useful for constructing transgenic animals expressing all, or a part, of the nucleic acid molecules and variant peptides. The production of recombinant cells and transgenic animals having nucleic acid molecules which contain the SNPs disclosed in Table 1 and/or Table 2 allow, for example, effective clinical design of treatment compounds and dosage regimens.

[0159] The nucleic acid molecules of the invention are also useful in assays for drug screening to identify compounds that, for example, modulate nucleic acid expression.

[0160] The nucleic acid molecules of the invention are also useful in gene therapy in patients whose cells have aberrant gene expression. Thus, recombinant cells, which include a patient's cells that have been engineered ex vivo and returned to the patient, can be introduced into an individual where the recombinant cells produce the desired protein to treat the individual.

[0161] SNP Genotyping Methods

[0162] The process of determining which specific nucleotide (i.e., allele) is present at each of one or more SNP positions, such as a SNP position in a nucleic acid molecule disclosed in Table 1 and/or Table 2, is referred to as SNP genotyping. The present invention provides methods of SNP genotyping, such as for use in screening for enzyme-mediated disorders, or determining predisposition thereto, or determining responsiveness to a form of treatment, or in genome mapping or SNP association analysis, etc.

[0163] Nucleic acid samples can be genotyped to determine which allele(s) is/are present at any given genetic region (e.g., SNP position) of interest by methods well known in the art. The neighboring sequence can be used to design SNP detection reagents such as oligonucleotide probes, which may optionally be implemented in a kit format. Exemplary SNP genotyping methods are described in Chen et al., “Single nucleotide polymorphism genotyping: biochemistry, protocol, cost and throughput”, Pharmacogenomics J. 2003; 3(2):77-96; Kwok et al., “Detection of single nucleotide polymorphisms”, Curr Issues Mol. Biol. 2003 April; 5(2):43-60; Shi, “Technologies for individual genotyping: detection of genetic polymorphisms in drug targets and disease genes”, Am J Pharmacogenomics. 2002; 2(3):197-205; and Kwok, “Methods for genotyping single nucleotide polymorphisms”, Annu Rev Genomics Hum Genet 2001; 2:235-58. Exemplary techniques for high-throughput SNP genotyping are described in Marnellos, “High-throughput SNP analysis for genetic association studies”, Curr Opin Drug Discov Devel. 2003 May; 6(3):317-21. Common SNP genotyping methods include, but are not limited to, TaqMan assays, molecular beacon assays, nucleic acid arrays, allele-specific primer extension, allele-specific PCR, arrayed primer extension, homogeneous primer extension assays, primer extension with detection by mass spectrometry, pyrosequencing, multiplex primer extension sorted on genetic arrays, ligation with rolling circle amplification, homogeneous ligation, OLA (U.S. Pat. No. 4,988,167), multiplex ligation reaction sorted on genetic arrays, restriction-fragment length polymorphism, single base extension-tag assays, and the Invader assay. Such methods may be used in combination with detection mechanisms such as, for example, luminescence or chemiluminescence detection, fluorescence detection, time-resolved fluorescence detection, fluorescence resonance energy transfer, fluorescence polarization, mass spectrometry, and electrical detection.

[0164] Various methods for detecting polymorphisms include, but are not limited to, methods in which protection from cleavage agents is used to detect mismatched bases in RNA/RNA or RNA/DNA duplexes (Myers et al., Science 230:1242 (1985); Cotton et al., PNAS 85:4397 (1988); and Saleeba et al., Meth. Enzymol. 217:286-295 (1992)), comparison of the electrophoretic mobility of variant and wild type nucleic acid molecules (Orita et al., PNAS 86:2766 (1989); Cotton et al., Mutat. Res. 285:125-144 (1993); and Hayashi et al., Genet. Anal. Tech. Appl. 9:73-79 (1992)), and assaying the movement of polymorphic or wild-type fragments in polyacrylamide gels containing a gradient of denaturant using denaturing gradient gel electrophoresis (DGGE) (Myers et al, Nature 313:495 (1985)). Sequence variations at specific locations can also be assessed by nuclease protection assays such as RNase and S1 protection or chemical cleavage methods.

[0165] In a preferred embodiment, SNP genotyping is performed using the TaqMan assay, which is also known as the 5′ nuclease assay (U.S. Pat. Nos. 5,210,015 and 5,538,848). The TaqMan assay detects the accumulation of a specific amplified product during PCR. The TaqMan assay utilizes an oligonucleotide probe labeled with a fluorescent reporter dye and a quencher dye. The reporter dye is excited by irradiation at an appropriate wavelength, it transfers energy to the quencher dye in the same probe via a process called fluorescence resonance energy transfer (FRET). When attached to the probe, the excited reporter dye does not emit a signal. The proximity of the quencher dye to the reporter dye in the intact probe maintains a reduced fluorescence for the reporter. The reporter dye and quencher dye may be at the 5′ most and the 3′ most ends, respectively, or vice versa. Alternatively, the reporter dye may be at the 5′ or 3′ most end while the quencher dye is attached to an internal nucleotide, or vice versa. In yet another embodiment, both the reporter and the quencher may be attached to internal nucleotides at a distance from each other such that fluorescence of the reporter is reduced.

[0166] During PCR, the 5′ nuclease activity of DNA polymerase cleaves the probe, thereby separating the reporter dye and the quencher dye and resulting in increased fluorescence of the reporter. Accumulation of PCR product is detected directly by monitoring the increase in fluorescence of the reporter dye. The DNA polymerase cleaves the probe between the reporter dye and the quencher dye only if the probe hybridizes to the target SNP-containing template which is amplified during PCR, and the probe is designed to hybridize to the target SNP site only if a particular SNP allele is present.

[0167] Preferred TaqMan primer and probe sequences can readily be determined using the SNP and associated nucleic acid sequence information provided herein. A number of computer programs, such as Primer Express (Applied Biosystems, Foster City, Calif.), can be used to rapidly obtain optimal primer/probe sets. It will be apparent to one of skill in the art that such primers and probes for detecting the SNPs of the present invention are useful in diagnostic assays for enzyme-mediated disorders and related pathologies, and can be readily incorporated into a kit format. The present invention also includes modifications of the Taqman assay well known in the art such as the use of Molecular Beacon probes (U.S. Pat. Nos. 5,118,801 and 5,312,728) and other variant formats (U.S. Pat. Nos. 5,866,336 and 6,117,635).

[0168] Another preferred method for genotyping the SNPs of the present invention is the use of two oligonucleotide probes in an OLA (see, e.g., U.S. Pat. No. 4,988,617). In this method, one probe hybridizes to a segment of a target nucleic acid with its 3′ most end aligned with the SNP site. A second probe hybridizes to an adjacent segment of the target nucleic acid molecule directly 3′ to the first probe. The two juxtaposed probes hybridize to the target nucleic acid molecule, and are ligated in the presence of a linking agent such as a ligase if there is perfect complementarity between the 3′ most nucleotide of the first probe with the SNP site. If there is a mismatch, ligation would not occur. After the reaction, the ligated probes are separated from the target nucleic acid molecule, and detected as indicators of the presence of a SNP.

[0169] The following patents, patent applications, and published international patent applications, which are all hereby incorporated by reference, provide additional information pertaining to techniques for carrying out various types of OLA: U.S. Pat. Nos. 6,027,889, 6,268,148, 5,494,810, 5,830,711, and 6,054,564 describe OLA strategies for performing SNP detection; WO 97/31256 and WO 00/56927 describe OLA strategies for performing SNP detection using universal arrays, wherein a zipcode sequence can be introduced into one of the hybridization probes, and the resulting product, or amplified product, hybridized to a universal zip code array; U.S. application Ser. Nos. 01/17329 (and 09/584,905) describes OLA (or LDR) followed by PCR, wherein zipcodes are incorporated into OLA probes, and amplified PCR products are determined by electrophoretic or universal zipcode array readout; U.S. application 60/427,818, 60/445,636, and 60/445,494 describe SNPlex methods and software for multiplexed SNP detection using OLA followed by PCR, wherein zipcodes are incorporated into OLA probes, and amplified PCR products are hybridized with a zipchute reagent, and the identity of the SNP determined from electrophoretic readout of the zipchute. In some embodiments, OLA is carried out prior to PCR (or another method of nucleic acid amplification). In other embodiments, PCR (or another method of nucleic acid amplification) is carried out prior to OLA.

[0170] Another method for SNP genotyping is based on mass spectrometry. Mass spectrometry takes advantage of the unique mass of each of the four nucleotides of DNA. SNPs can be unambiguously genotyped by mass spectrometry by measuring the differences in the mass of nucleic acids having alternative SNP alleles. MALDI-TOF (Matrix Assisted Laser Desorption Ionization-Time of Flight) mass spectrometry technology is preferred for extremely precise determinations of molecular mass, such as SNPs. Numerous approaches to SNP analysis have been developed based on mass spectrometry. Preferred mass spectrometry-based methods of SNP genotyping include primer extension assays, which can also be utilized in combination with other approaches, such as traditional gel-based formats and microarrays.

[0171] Typically, the primer extension assay involves designing and annealing a primer to a template PCR amplicon upstream (5′) from a target SNP position. A mix of dideoxynucleotide triphosphates (ddNTPs) and/or deoxynucleotide triphosphates (dNTPs) are added to a reaction mixture containing template (e.g., a SNP-containing nucleic acid molecule which has typically been amplified, such as by PCR), primer, and DNA polymerase. Extension of the primer terminates at the first position in the template where a nucleotide complementary to one of the ddNTPs in the mix occurs. The primer can be either immediately adjacent (i.e., the nucleotide at the 3′ end of the primer hybridizes to the nucleotide next to the target SNP site) or two or more nucleotides removed from the SNP position. If the primer is several nucleotides removed from the target SNP position, the only limitation is that the template sequence between the 3′ end of the primer and the SNP position cannot contain a nucleotide of the same type as the one to be detected, or this will cause premature termination of the extension primer. Alternatively, if all four ddNTPs alone, with no dNTPs, are added to the reaction mixture, the primer will always be extended by only one nucleotide, corresponding to the target SNP position. In this instance, primers are designed to bind one nucleotide upstream from the SNP position (i.e., the nucleotide at the 3′ end of the primer hybridizes to the nucleotide that is immediately adjacent to the target SNP site on the 5′ side of the target SNP site). Extension by only one nucleotide is preferable, as it minimizes the overall mass of the extended primer, thereby increasing the resolution of mass differences between alternative SNP nucleotides. Furthermore, mass-tagged ddNTPs can be employed in the primer extension reactions in place of unmodified ddNTPs. This increases the mass difference between primers extended with these ddNTPs, thereby providing increased sensitivity and accuracy, and is particularly useful for typing heterozygous base positions. Mass-tagging also alleviates the need for intensive sample-preparation procedures and decreases the necessary resolving power of the mass spectrometer.

[0172] The extended primers can then be purified and analyzed by MALDI-TOF mass spectrometry to determine the identity of the nucleotide present at the target SNP position. In one method of analysis, the products from the primer extension reaction are combined with light absorbing crystals that form a matrix. The matrix is then hit with an energy source such as a laser to ionize and desorb the nucleic acid molecules into the gas-phase. The ionized molecules are then ejected into a flight tube and accelerated down the tube towards a detector. The time between the ionization event, such as a laser pulse, and collision of the molecule with the detector is the time of flight of that molecule. The time of flight is precisely correlated with the mass-to-charge ratio (m/z) of the ionized molecule. Ions with smaller m/z travel down the tube faster than ions with larger m/z and therefore the lighter ions reach the detector before the heavier ions. The time-of-flight is then converted into a corresponding, and highly precise, m/z. In this manner, SNPs can be identified based on the slight differences in mass, and the corresponding time of flight differences, inherent in nucleic acid molecules having different nucleotides at a single base position. For further information regarding the use of primer extension assays in conjunction with MALDI-TOF mass spectrometry for SNP genotyping, see, e.g., Wise et al., “A standard protocol for single nucleotide primer extension in the human genome using matrix-assisted laser desorption/ionization time-of-flight mass spectrometry”, Rapid Commun Mass Spectrom. 2003; 17(11):1195-202.

[0173] The following references provide further information describing mass spectrometry-based methods for SNP genotyping: Bocker, “SNP and mutation discovery using base-specific cleavage and MALDI-TOF mass spectrometry”, Bioinformatics. 2003 July; 19 Suppl 1:I44-I53; Storm et al., “MALDI-TOF mass spectrometry-based SNP genotyping”, Methods Mol. Biol. 2003; 212:241-62; Jurinke et al., “The use of MassARRAY technology for high throughput genotyping”, Adv Biochem Eng Biotechnol. 2002; 77:57-74; and Jurinke et al., “Automated genotyping using the DNA MassArray technology”, Methods Mol. Biol. 2002; 187:179-92.

[0174] SNPs can also be scored by direct DNA sequencing. A variety of automated sequencing procedures can be utilized ((1995) Biotechniques 19:448), including sequencing by mass spectrometry (see, e.g., PCT International Publication No. WO94/16101; Cohen et al., Adv. Chromatogr. 36:127-162 (1996); and Griffin et al., Appl. Biochem. Biotechnol. 38:147-159 (1993)). The nucleic acid sequences of the present invention enable one of ordinary skill in the art to readily design sequencing primers for such automated sequencing procedures. Commercial instrumentation, such as the Applied Biosystems 377, 3100, 3700, 3730, and 3730x1 DNA Analyzers (Foster City, Calif.), is commonly used in the art for automated sequencing.

[0175] Other methods that can be used to genotype the SNPs of the present invention include single-strand conformational polymorphism (SSCP), and denaturing gradient gel electrophoresis (DGGE) (Myers et al., Nature 313:495 (1985)). SSCP identifies base differences by alteration in electrophoretic migration of single stranded PCR products, as described in Orita et al., Proc. Nat. Acad. Single-stranded PCR products can be generated by heating or otherwise denaturing double stranded PCR products. Single-stranded nucleic acids may refold or form secondary structures that are partially dependent on the base sequence. The different electrophoretic mobilities of single-stranded amplification products are related to base-sequence differences at SNP positions. DGGE differentiates SNP alleles based on the different sequence-dependent stabilities and melting properties inherent in polymorphic DNA and the corresponding differences in electrophoretic migration patterns in a denaturing gradient gel (Erlich, ed., PCR Technology, Principles and Applications for DNA Amplification, W.H. Freeman and Co, New York, 1992, Chapter 7).

[0176] Sequence-specific ribozymes (U.S. Pat. No. 5,498,531) can also be used to score SNPs based on the development or loss of a ribozyme cleavage site. Perfectly matched sequences can be distinguished from mismatched sequences by nuclease cleavage digestion assays or by differences in melting temperature. If the SNP affects a restriction enzyme cleavage site, the SNP can be identified by alterations in restriction enzyme digestion patterns, and the corresponding changes in nucleic acid fragment lengths determined by gel electrophoresis

[0177] SNP genotyping can, include the steps of, for example, collecting a biological sample from a human subject (e.g., sample of tissues, cells, fluids, secretions, etc.), isolating nucleic acids (e.g., genomic DNA, mRNA or both) from the cells of the sample, contacting the nucleic acids with one or more primers which specifically hybridize to a region of the isolated nucleic acid containing a target SNP under conditions such that hybridization and amplification of the target nucleic acid region occurs, and determining the nucleotide present at the SNP position of interest, or, in some assays, detecting the presence or absence of an amplification product (assays can be designed so that hybridization and/or amplification will only occur if a particular SNP allele is present or absent). In some assays, the size of the amplification product is detected and compared to the length of a control sample; for example, deletions and insertions can be detected by a change in size of the amplified product compared to a normal genotype.

[0178] SNP genotyping is useful for numerous practical applications, as described below. Examples of such applications include, but are not limited to, SNP-disease association analysis, disease predisposition screening, disease diagnosis, disease prognosis, disease progression monitoring, determining therapeutic strategies based on an individual's genotype (“pharmacogenomics”), developing therapeutic agents based on SNP genotypes associated with a disease or likelihood of responding to a drug, stratifying a patient population for clinical trial for a treatment regimen, predicting the likelihood that an individual will experience toxic side effects from a therapeutic agent, and human identification applications such as forensics.

[0179] Analysis of Genetic Association Between SNPs and Phenotypic Traits

[0180] Different study designs may be used for genetic association studies (Modern Epidemiology, Lippincott Williams & Wilkins (1998), 609-622). Observational studies are most frequently carried out in which the response of the patients is not interfered with. The first type of observational study identifies a sample of persons in whom the suspected cause of the disease is present and another sample of persons in whom the suspected cause is absent, and then the frequency of development of disease in the two samples is compared. These sampled populations are called cohorts, and the study is a prospective study. The other type of observational study is case-control or a retrospective study. In typical case-control studies, samples are collected from individuals with the phenotype of interest (cases) such as certain manifestations of a disease, and from individuals without the phenotype (controls) in a population (target population) that conclusions are to be drawn from. Then the possible causes of the disease are investigated retrospectively. As the time and costs of collecting samples in case-control studies are considerably less than those for prospective studies, case-control studies are the more commonly used study design in genetic association studies, at least during the exploration and discovery stage.

[0181] In both types of observational studies, there may be potential confounding factors that should be taken into consideration. Confounding factors are those that are associated with both the real cause(s) of the disease and the disease itself, and they include demographic information such as age, gender, ethnicity as well as environmental factors. When confounding factors are not matched in cases and controls in a study, and are not controlled properly, spurious association results can arise. If potential confounding factors are identified, they should be controlled for by analysis methods explained below.

[0182] In a genetic association study, the cause of interest to be tested is a certain allele or a SNP or a combination of alleles or a haplotype from several SNPs. Thus, tissue specimens (e.g., whole blood) from the sampled individuals may be collected and genomic DNA genotyped for the SNP(s) of interest. In addition to the phenotypic trait of interest, other information such as demographic (e.g., age, gender, ethnicity, etc.), clinical, and environmental information that may influence the outcome of the trait can be collected to further characterize and define the sample set. In many cases, these factors are known to be associated with diseases and/or SNP allele frequencies. There are likely gene-environment and/or gene-gene interactions as well. Analysis methods to address gene-environment and gene-gene interactions (for example, the effects of the presence of both susceptibility alleles at two different genes can be greater than the effects of the individual alleles at two genes combined) are discussed below.

[0183] After all the relevant phenotypic and genotypic information has been obtained, statistical analyses are carried out to determine if there is any significant correlation between the presence of an allele or a genotype with the phenotypic characteristics of an individual. Preferably, data inspection and cleaning are first performed before carrying out statistical tests for genetic association. Epidemiological and clinical data of the samples can be summarized by descriptive statistics with tables and graphs. Data validation is preferably performed to check for data completion, inconsistent entries, and outliers. Chi-squared tests and t-tests (Wilcoxon rank-sum tests if distributions are not normal) may then be used to check for significant differences between cases and controls for discrete and continuous variables, respectively. To ensure genotyping quality, Hardy-Weinberg disequilibrium tests can be performed on cases and controls separately. Significant deviation from Hardy-Weinberg equilibrium (HWE) in both cases and controls for individual markers can be indicative of genotyping errors. If HWE is violated in a majority of markers, it is indicative of population substructure that should be further investigated. Moreover, Hardy-Weinberg disequilibrium in cases only can indicate genetic association of the markers with the disease (Genetic Data Analysis, Weir B., Sinauer (1990)).

[0184] To test whether an allele of a single SNP is associated with the case or control status of a phenotypic trait, one skilled in the art can compare allele frequencies in cases and controls. Standard chi-squared tests and Fisher exact tests can be carried out on a 2×2 table (2 SNP alleles×2 outcomes in the categorical trait of interest). To test whether genotypes of a SNP are associated, chi-squared tests can be carried out on a 3×2 table (3 genotypes×2 outcomes). Score tests are also carried out for genotypic association to contrast the three genotypic frequencies (major homozygotes, heterozygotes and minor homozygotes) in cases and controls, and to look for trends using 3 different modes of inheritance, namely dominant (with contrast coefficients 2, −1, −1), additive (with contrast coefficients 1, 0, −1) and recessive (with contrast coefficients 1, 1, −2). Odds ratios for minor versus major alleles, and odds ratios for heterozygote and homozygote variants versus the wild type genotypes are calculated with the desired confidence limits, usually 95%.

[0185] In order to control for confounders and to test for interaction and effect modifiers, stratified analyses may be performed using stratified factors that are likely to be confounding, including demographic information such as age, ethnicity, and gender, or an interacting element or effect modifier, such as a known major gene (e.g., APOE for Alzheimer's disease or HLA genes for autoimmune diseases), or environmental factors such as smoking in lung cancer. Stratified association tests may be carried out using Cochran-Mantel-Haenszel tests that take into account the ordinal nature of genotypes with 0, 1, and 2 variant alleles. Exact tests by StatXact may also be performed when computationally possible. Another way to adjust for confounding effects and test for interactions is to perform stepwise multiple logistic regression analysis using statistical packages such as SAS or R. Logistic regression is a model-building technique in which the best fitting and most parsimonious model is built to describe the relation between the dichotomous outcome (for instance, getting a certain disease or not) and a set of independent variables (for instance, genotypes of different associated genes, and the associated demographic and environmental factors). The most common model is one in which the logit transformation of the odds ratios is expressed as a linear combination of the variables (main effects) and their cross-product terms (interactions) (Applied Logistic Regression, Hosmer and Lemeshow, Wiley (2000)). To test whether a certain variable or interaction is significantly associated with the outcome, coefficients in the model are first estimated and then tested for statistical significance of their departure from zero.

[0186] In addition to performing association tests one marker at a time, haplotype association analysis may also be performed to study a number of markers that are closely linked together. Haplotype association tests can have better power than genotypic or allelic association tests when the tested markers are not the disease-causing mutations themselves but are in linkage disequilibrium with such mutations. The test will even be more powerful if the disease is indeed caused by a combination of alleles on a haplotype (e.g., APOE is a haplotype formed by 2 SNPs that are very close to each other). In order to perform haplotype association effectively, marker-marker linkage disequilibrium measures, both D′ and R², are typically calculated for the markers within a gene to elucidate the haplotype structure. Recent studies (Daly et al, Nature Genetics, 29, 232-235, 2001) in linkage disequilibrium indicate that SNPs within a gene are organized in block pattern, and a high degree of linkage disequilibrium exists within blocks and very little linkage disequilibrium exists between blocks. Haplotype association with the disease status can be performed using such blocks once they have been elucidated.

[0187] Haplotype association tests can be carried out in a similar fashion as the allelic and genotypic association tests. Each haplotype in a gene is analogous to an allele in a multi-allelic marker. One skilled in the art can either compare the haplotype frequencies in cases and controls or test genetic association with different pairs of haplotypes. It has been proposed (Schaid et al, Am. J. Hum. Genet., 70, 425-434, 2002) that score tests can be done on haplotypes using the program “haplo.score”. In that method, haplotypes are first inferred by EM algorithm and score tests are carried out with a generalized linear model (GLM) framework that allows the adjustment of other factors.

[0188] An important decision in the performance of genetic association tests is the determination of the significance level at which significant association can be declared when the p-value of the tests reaches that level. In an exploratory analysis where positive hits will be followed up in subsequent confirmatory testing, an unadjusted p-value <0.1 (a significance level on the lenient side) may be used for generating hypotheses for significant association of a SNP with certain phenotypic characteristics of a disease. It is preferred that a p-value <0.05 (a significance level traditionally used in the art) is achieved in order for a SNP to be considered to have an association with a disease. It is more preferred that a p-value <0.01 (a significance level on the stringent side) is achieved for an association to be declared. When hits are followed up in confirmatory analyses in more samples of the same source or in different samples from different sources, adjustment for multiple testing will be performed as to avoid excess number of hits while maintaining the experiment-wise error rates at 0.05. While there are different methods to adjust for multiple testing to control for different kinds of error rates, a commonly used but rather conservative method is Bonferroni correction to control the experiment-wise or family-wise error rate (Multiple comparisons and multiple tests, Westfall et al, SAS Institute (1999)). Permutation tests to control for the false discovery rates, FDR, can be more powerful (Benjamini and Hochberg, Journal of the Royal Statistical Society, Series B 57, 1289-1300, 1995, Resampling-based Multiple Testing, Westfall and Young, Wiley (1993)). Such methods to control for multiplicity would be preferred when the tests are dependent and controlling for false discovery rates is sufficient as opposed to controlling for the experiment-wise error rates.

[0189] In replication studies using samples from different populations after statistically significant markers have been identified in the exploratory stage, meta-analyses can then be performed by combining evidence of different studies (Modern Epidemiology, Lippincott Williams & Wilkins, 1998, 643-673). If available, association results known in the art for the same SNPs can be included in the meta-analyses.

[0190] Since both genotyping and disease status classification can involve errors, sensitivity analyses may be performed to see how odds ratios and p-values would change upon various estimates on genotyping and disease classification error rates.

[0191] It has been well known that subpopulation-based sampling bias between cases and controls can lead to spurious results in case-control association studies (Ewens and Spielman, Am. J. Hum. Genet. 62, 450-458, 1995) when prevalence of the disease is associated with different subpopulation groups. Such bias can also lead to a loss of statistical power in genetic association studies. To detect population stratification, Pritchard and Rosenberg (Pritchard et al. Am. J. Hum. Gen. 1999, 65:220-228) suggested typing markers that are unlinked to the disease and using results of association tests on those markers to determine whether there is any population stratification. When stratification is detected, the genomic control (GC) method as proposed by Devlin and Roeder (Devlin et al. Biometrics 1999, 55:997-1004) can be used to adjust for the inflation of test statistics due to population stratification. GC method is robust to changes in population structure levels as well as being applicable to DNA pooling designs (Devlin et al. Genet. Epidem. 20001, 21:273-284).

[0192] While Pritchard's method recommended using 15-20 unlinked microsatellite markers, it suggested using more than 30 biallelic markers to get enough power to detect population stratification. For the GC method, it has been shown (Bacanu et al. Am. J. Hum. Genet. 2000, 66:1933-1944) that about 60-70 biallelic markers are sufficient to estimate the inflation factor for the test statistics due to population stratification. Hence, 70 intergenic SNPs can be chosen in unlinked regions as indicated in a genome scan (Kehoe et al. Hum. Mol. Genet. 1999, 8:237-245).

[0193] Once individual risk factors, genetic or non-genetic, have been found for the predisposition to disease, the next step is to set up a classification/prediction scheme to predict the category (for instance, disease or no-disease) that an individual will be in depending on his genotypes of associated SNPs and other non-genetic risk factors. Logistic regression for discrete trait and linear regression for continuous trait are standard techniques for such tasks (Applied Regression Analysis, Draper and Smith, Wiley (1998)). Moreover, other techniques can also be used for setting up classification. Such techniques include, but are not limited to, MART, CART, neural network, and discriminant analyses that are suitable for use in comparing the performance of different methods (The Elements of Statistical Learning, Hastie, Tibshirani & Friedman, Springer (2002)).

[0194] Disease Diagnosis and Predisposition Screening

[0195] Information on association/correlation between genotypes and disease-related phenotypes can be exploited in several ways. For example, in the case of a highly statistically significant association between one or more SNPs with predisposition to a disease for which treatment is available, detection of such a genotype pattern in an individual may justify immediate administration of treatment, or at least the institution of regular monitoring of the individual. Detection of the susceptibility alleles associated with serious disease in a couple contemplating having children may also be valuable to the couple in their reproductive decisions. In the case of a weaker but still statistically significant association between a SNP and a human disease, immediate therapeutic intervention or monitoring may not be justified after detecting the susceptibility allele or SNP. Nevertheless, the subject can be motivated to begin simple life-style changes (e.g., diet, exercise) that can be accomplished at little or no cost to the individual but would confer potential benefits in reducing the risk of developing conditions for which that individual may have an increased risk by virtue of having the susceptibility allele(s).

[0196] The SNPs of the invention may contribute to enzyme-mediated disorders in different ways. Some polymorphisms occur within a protein coding sequence and contribute to disease phenotype by affecting protein structure. Other polymorphisms occur in noncoding regions but may exert phenotypic effects indirectly via influence on, for example, replication, transcription, and/or translation. A single SNP may affect more than one phenotypic trait. Likewise, a single phenotypic trait may be affected by multiple SNPs in different genes.

[0197] As used herein, the terms “diagnose”, “diagnosis”, and “diagnostics” include, but are not limited to any of the following: detection of a enzyme-mediated disorder that an individual may presently have, predisposition/susceptibility screening (i.e., determining the increased risk of an individual in developing a enzyme-mediated disorder in the future, or determining whether an individual has a decreased risk of developing a enzyme-mediated disorder in the future), determining a particular type or subclass of a enzyme-mediated disorder in an individual known to have a enzyme-mediated disorder, confirming or reinforcing a previously made diagnosis of a enzyme-mediated disorder, pharmacogenomic evaluation of an individual to determine which therapeutic strategy that individual is most likely to positively respond to or to predict whether a patient is likely to respond to a particular treatment, predicting whether a patient is likely to experience toxic effects from a particular treatment or therapeutic compound, and evaluating the future prognosis of an individual having a enzyme-mediated disorder. Such diagnostic uses are based on the SNPs individually or in a unique combination or SNP haplotypes of the present invention.

[0198] Haplotypes are particularly useful in that, for example, fewer SNPs can be genotyped to determine if a particular genomic region harbors a locus that influences a particular phenotype, such as in linkage disequilibrium-based SNP association analysis.

[0199] Linkage disequilibrium (LD) refers to the co-inheritance of alleles (e.g., alternative nucleotides) at two or more different SNP sites at frequencies greater than would be expected from the separate frequencies of occurrence of each allele in a given population. The expected frequency of co-occurrence of two alleles that are inherited independently is the frequency of the first allele multiplied by the frequency of the second allele. Alleles that co-occur at expected frequencies are said to be in “linkage equilibrium”. In contrast, LD refers to any non-random genetic association between allele(s) at two or more different SNP sites, which is generally due to the physical proximity of the two loci along a chromosome. LD can occur when two or more SNPs sites are in close physical proximity to each other on a given chromosome and therefore alleles at these SNP sites will tend to remain unseparated for multiple generations with the consequence that a particular nucleotide (allele) at one SNP site will show a non-random association with a particular nucleotide (allele) at a different SNP site located nearby. Hence, genotyping one of the SNP sites will give almost the same information as genotyping the other SNP site that is in LD.

[0200] Various degrees of LD can be encountered between two or more SNPs with the result being that some SNPs are more closely associated (i.e., in stronger LD) than others. Furthermore, the physical distance over which LD extends along a chromosome differs between different regions of the genome, and therefore the degree of physical separation between two or more SNP sites necessary for LD to occur can differ between different regions of the genome.

[0201] For diagnostic purposes and similar uses, if a particular SNP site is found to be useful for diagnosing a enzyme-mediated condition (e.g., has a significant statistical association with the condition and/or is recognized as a causative polymorphism for the condition), then the skilled artisan would recognize that other SNP sites which are in LD with this SNP site would also be useful for diagnosing the condition. Thus, polymorphisms (e.g., SNPs and/or haplotypes) that are not the actual disease-causing (causative) polymorphisms, but are in LD with such causative polymorphisms, are also useful. In such instances, the genotype of the polymorphism(s) that is/are in LD with the causative polymorphism is predictive of the genotype of the causative polymorphism and, consequently, predictive of the phenotype (e.g., a enzyme-mediated disorder) that is influenced by the causative SNP(s). Therefore, polymorphic markers that are in LD with causative polymorphisms are useful as diagnostic markers, and are particularly useful when the actual causative polymorphism(s) is/are unknown.

[0202] Examples of polymorphisms that can be in LD with one or more causative polymorphisms (and/or in LD with one or more polymorphisms that have a significant statistical association with a condition) and therefore useful for diagnosing the same condition that the causative/associated SNP(s) is used to diagnose, include, for example, other SNPs in the same gene, protein-coding, or mRNA transcript-coding region as the causative/associated SNP, other SNPs in the same exon or same intron as the causative/associated SNP, other SNPs in the same haplotype block as the causative/associated SNP, other SNPs in the same intergenic region as the causative/associated SNP, SNPs that are outside but near a gene (e.g., within 6 kb on either side, 5′ or 3′, of a gene boundary) that harbors a causative/associated SNP, etc. Such useful LD SNPs can be selected from among the SNPs disclosed in Tables 1-2, for example.

[0203] Linkage disequilibrium in the human genome is reviewed in: Wall et al., “Haplotype blocks and linkage disequilibrium in the human genome”, Nat Rev Genet. 2003 August; 4(8):587-97; Garner et al., “On selecting markers for association studies: patterns of linkage disequilibrium between two and three diallelic loci”, Genet Epidemiol. 2003 January; 24(1):57-67; Ardlie et al., “Patterns of linkage disequilibrium in the human genome”, Nat Rev Genet. 2002 April; 3(4):299-309 (erratum in Nat Rev Genet 2002 July; 3(7):566); and Remm et al., “High-density genotyping and linkage disequilibrium in the human genome using chromosome 22 as a model”; Curr Opin Chem Biol. 2002 February; 6(1):24-30.

[0204] The contribution or association of particular SNPs and/or SNP haplotypes with disease phenotypes, such as enzyme-mediated disorders, enables the SNPs of the present invention to be used to develop superior diagnostic tests capable of identifying individuals who express a detectable trait, such as a enzyme-mediated disorder, as the result of a specific genotype, or individuals whose genotype places them at an increased or decreased risk of developing a detectable trait at a subsequent time as compared to individuals who do not have that genotype. As described herein, diagnostics may be based on a single SNP or a group of SNPs. Combined detection of a plurality of SNPs (for example, 2, 3, 4, 5, 6, 7, 8, 9, 10, 11, 12, 13, 14, 15, 16, 17, 18, 19, 20, 24, 25, 30, 32, 48, 50, 64, 96, 100, or any other number in-between, or more, of the SNPs provided in Table 1 and/or Table 2) typically increases the probability of an accurate diagnosis. For example, the presence of a single SNP known to correlate with a enzyme-mediated disorder might indicate a probability of 20% that an individual has or is at risk of developing a enzyme-mediated disorder, whereas detection of five SNPs, each of which correlates with a enzyme-mediated disorder, might indicate a probability of 80% that an individual has or is at risk of developing a enzyme-mediated disorder. To further increase the accuracy of diagnosis or predisposition screening, analysis of the SNPs of the present invention can be combined with that of other polymorphisms or other risk factors of enzyme-mediated disorders, such as disease symptoms, pathological characteristics, family history, diet, environmental factors, or lifestyle factors.

[0205] It will, of course, be understood by practitioners skilled in the treatment or diagnosis of enzyme-mediated disorders that the present invention generally does not intend to provide an absolute identification of individuals who are at risk (or less at risk) of developing enzyme-mediated disorders and/or related pathologies, but rather to indicate a certain increased (or decreased) degree or likelihood of developing the disease based on statistically significant association results. However, this information is extremely valuable as it can be used to, for example, initiate preventive treatments or to allow an individual carrying one or more significant SNPs or SNP haplotypes to foresee warning signs such as minor clinical symptoms, or to have regularly scheduled physical exams to monitor for appearance of a condition in order to identify and begin treatment of the condition at an early stage. Particularly with diseases that are extremely debilitating or fatal if not treated on time, the knowledge of a potential predisposition, even if this predisposition is not absolute, would likely contribute in a very significant manner to treatment efficacy.

[0206] The diagnostic techniques of the present invention may employ a variety of methodologies to determine whether a test subject has a SNP or a SNP pattern associated with an increased or decreased risk of developing a detectable trait or whether the individual suffers from a detectable trait as a result of a particular polymorphism/mutation, including, for example, methods which enable the analysis of individual chromosomes for haplotyping, family studies, single sperm DNA analysis, or somatic hybrids. The trait analyzed using the diagnostics of the invention may be any detectable trait that is commonly observed in pathologies and disorders related to enzyme-mediated disorders.

[0207] Another aspect of the present invention relates to a method of determining whether an individual is at risk (or less at risk) of developing one or more traits or whether an individual expresses one or more traits as a consequence of possessing a particular trait-causing or trait-influencing allele. These methods generally involve obtaining a nucleic acid sample from an individual and assaying the nucleic acid sample to determine which nucleotide(s) is/are present at one or more SNP positions, wherein the assayed nucleotide(s) is/are indicative of an increased or decreased risk of developing the trait or indicative that the individual expresses the trait as a result of possessing a particular trait-causing or trait-influencing allele.

[0208] In another embodiment, the SNP detection reagents of the present invention are used to determine whether an individual has one or more SNP allele(s) affecting the level (e.g., the concentration of mRNA or protein in a sample, etc.) or pattern (e.g., the kinetics of expression, rate of decomposition, stability profile, Km, Vmax, etc.) of gene expression (collectively, the “gene response” of a cell or bodily fluid). Such a determination can be accomplished by screening for mRNA or protein expression (e.g., by using nucleic acid arrays, RT-PCR, TaqMan assays, or mass spectrometry), identifying genes having altered expression in an individual, genotyping SNPs disclosed in Table 1 and/or Table 2 that could affect the expression of the genes having altered expression (e.g., SNPs that are in and/or around the gene(s) having altered expression, SNPs in regulatory/control regions, SNPs in and/or around other genes that are involved in pathways that could affect the expression of the gene(s) having altered expression, or all SNPs could be genotyped), and correlating SNP genotypes with altered gene expression. In this manner, specific SNP alleles at particular SNP sites can be identified that affect gene expression.

[0209] Pharmacogenomics and Therapeutics/Drug Development

[0210] The present invention provides methods for assessing the pharmacogenomics of a subject harboring particular SNP alleles or haplotypes to a particular therapeutic agent or pharmaceutical compound, or to a class of such compounds. Pharmacogenomics deals with the roles which clinically significant hereditary variations (e.g., SNPs) play in the response to drugs due to altered drug disposition and/or abnormal action in affected persons. See, e.g., Roses, Nature 405, 857-865 (2000); Gould Rothberg, Nature Biotechnology 19, 209-211 (2001); Eichelbaum, Clin. Exp. Pharmacol. Physiol. 23(10-11):983-985 (1996); and Linder, Clin. Chem. 43(2):254-266 (1997). The clinical outcomes of these variations can result in severe toxicity of therapeutic drugs in certain individuals or therapeutic failure of drugs in certain individuals as a result of individual variation in metabolism. Thus, the SNP genotype of an individual can determine the way a therapeutic compound acts on the body or the way the body metabolizes the compound. For example, SNPs in drug metabolizing enzymes can affect the activity of these enzymes, which in turn can affect both the intensity and duration of drug action, as well as drug metabolism and clearance.

[0211] The discovery of SNPs in drug metabolizing enzymes, drug transporters, proteins for pharmaceutical agents, and other drug targets has explained why some patients do not obtain the expected drug effects, show an exaggerated drug effect, or experience serious toxicity from standard drug dosages. SNPs can be expressed in the phenotype of the extensive metabolizer and in the phenotype of the poor metabolizer. Accordingly, SNPs may lead to allelic variants of a protein in which one or more of the protein functions in one population are different from those in another population. SNPs and the encoded variant peptides thus provide targets to ascertain a genetic predisposition that can affect treatment modality. For example, in a ligand-based treatment, SNPs may give rise to amino terminal extracellular domains and/or other ligand-binding regions of a receptor that are more or less active in ligand binding, thereby affecting subsequent protein activation. Accordingly, ligand dosage would necessarily be modified to maximize the therapeutic effect within a given population containing particular SNP alleles or haplotypes.

[0212] As an alternative to genotyping, specific variant proteins containing variant amino acid sequences encoded by alternative SNP alleles could be identified. Thus, pharmacogenomic characterization of an individual permits the selection of effective compounds and effective dosages of such compounds for prophylactic or therapeutic uses based on the individual's SNP genotype, thereby enhancing and optimizing the effectiveness of the therapy. Furthermore, the production of recombinant cells and transgenic animals containing particular SNPs/haplotypes allow effective clinical design and testing of treatment compounds and dosage regimens. For example, transgenic animals can be produced that differ only in specific SNP alleles in a gene that is orthologous to a human disease susceptibility gene.

[0213] Pharmacogenomic uses of the SNPs of the present invention provide several significant advantages for patient care, particularly in treating enzyme-mediated disorders. Pharmacogenomic characterization of an individual, based on an individual's SNP genotype, can identify those individuals unlikely to respond to treatment with a particular medication and thereby allows physicians to avoid prescribing the ineffective medication to those individuals. On the other hand, SNP genotyping of an individual may enable physicians to select the appropriate medication and dosage regimen that will be most effective based on an individual's SNP genotype. This information increases a physician's confidence in prescribing medications and motivates patients to comply with their drug regimens. Furthermore, pharmacogenomics may identify patients predisposed to toxicity and adverse reactions to particular drugs or drug dosages. Adverse drug reactions lead to more than 100,000 avoidable deaths per year in the United States alone and therefore represent a significant cause of hospitalization and death, as well as a significant economic burden on the healthcare system (Pfost et. al., Trends in Biotechnology, August 2000.). Thus, pharmacogenomics based on the SNPs disclosed herein has the potential to both save lives and reduce healthcare costs substantially.

[0214] Pharmacogenomics in general is discussed further in Rose et al., “Pharmacogenetic analysis of clinically relevant genetic polymorphisms”, Methods Mol Med. 2003; 85:225-37. Pharmacogenomics as it relates to Alzheimer's disease and other neurodegenerative disorders is discussed in Cacabelos, “Pharmacogenomics for the treatment of dementia”, Ann Med. 2002; 34(5):357-79, Maimone et al., “Pharmacogenomics of neurodegenerative diseases”, Eur J Pharmacol. 2001 Feb. 9; 413(1):11-29, and Poirier, “Apolipoprotein E: a pharmacogenetic target for the treatment of Alzheimer's disease”, Mol Diagn. 1999 December; 4(4):335-41. Pharmacogenomics as it relates to cardiovascular disorders is discussed in Siest et al., “Pharmacogenomics of drugs affecting the cardiovascular system”, Clin Chem Lab Med. 2003 April; 41(4):590-9, Mukherjee et al., “Pharmacogenomics in cardiovascular diseases”, Prog Cardiovasc Dis. 2002 May-June; 44(6):479-98, and Mooser et al., “Cardiovascular pharmacogenetics in the SNP era”, J Thromb Haemost. 2003 July; 1(7): 1398-402. Pharmacogenomics as it relates to cancer is discussed in McLeod et al., “Cancer pharmacogenomics: SNPs, chips, and the individual patient”, Cancer Invest. 2003; 21(4):630-40 and Watters et al., “Cancer pharmacogenomics: current and future applications”, Biochim Biophys Acta. 2003 Mar. 17; 1603(2):99-111.

[0215] The SNPs of the present invention can also be used to identify novel therapeutic targets for enzyme-mediated disorders. For example, enzyme genes containing the disease-associated variants (“variant enzyme genes”) or their products, as well as genes or their products that are directly or indirectly regulated by or interacting with these variant enzyme genes or their products, can be targeted for the development of therapeutics that, for example, treat the disease or prevent or delay disease onset. The therapeutics may be composed of, for example, small molecules, proteins, protein fragments or peptides, antibodies, nucleic acids, or their derivatives or mimetics which modulate the functions or levels of the target genes or gene products.

[0216] The SNP-containing nucleic acid molecules disclosed herein, and their complementary nucleic acid molecules, may be used as antisense constructs to control gene expression in cells, tissues, and organisms. Antisense technology is well established in the art and extensively reviewed in Antisense Drug Technology: Principles, Strategies, and Applications, Crooke (ed.), Marcel Dekker, Inc.: New York (2001). An antisense nucleic acid molecule is generally designed to be complementary to a region of mRNA expressed by a gene so that the antisense molecule hybridizes to the mRNA and thereby blocks translation of mRNA into protein. Various classes of antisense oligonucleotides are used in the art, two of which are cleavers and blockers. Cleavers, by binding to target RNAs, activate intracellular nucleases (e.g., RNaseH or RNase L) that cleave the target RNA. Blockers, which also bind to target RNAs, inhibit protein translation through steric hindrance of ribosomes. Exemplary blockers include peptide nucleic acids, morpholinos, locked nucleic acids, and methylphosphonates (see, e.g., Thompson, Drug Discovery Today, 7 (17): 912-917 (2002)). Antisense oligonucleotides are directly useful as therapeutic agents, and are also useful for determining and validating gene function (e.g., in gene knock-out or knock-down experiments).

[0217] Antisense technology is further reviewed in: Layery et al., “Antisense and RNAi: powerful tools in drug target discovery and validation”, Curr Opin Drug Discov Devel. 2003 July; 6(4):561-9; Stephens et al., “Antisense oligonucleotide therapy in cancer”, Curr Opin Mol Ther. 2003 April; 5(2):118-22; Kurreck, “Antisense technologies. Improvement through novel chemical modifications”, Eur J. Biochem. 2003 April; 270(8): 1628-44; Dias et al., “Antisense oligonucleotides: basic concepts and mechanisms”, Mol Cancer Ther. 2002 March; 1(5):347-55; Chen, “Clinical development of antisense oligonucleotides as anti-cancer therapeutics”, Methods Mol Med. 2003; 75:621-36; Wang et al., “Antisense anticancer oligonucleotide therapeutics”, Curr Cancer Drug Targets. 2001 November; 1(3):177-96; and Bennett, “Efficiency of antisense oligonucleotide drug discovery”, Antisense Nucleic Acid Drug Dev. 2002 June; 12(3):215-24.

[0218] The SNPs of the present invention are particularly useful for designing antisense reagents that are specific for particular nucleic acid variants. Based on the SNP information disclosed herein, antisense oligonucleotides can be produced that specifically target mRNA molecules that contain one or more particular SNP nucleotides. In this manner, expression of mRNA molecules that contain one or more undesired polymorphisms (e.g., SNP nucleotides that lead to a defective protein such as an amino acid substitution in a catalytic domain) can be inhibited or completely blocked. Thus, antisense oligonucleotides can be used to specifically bind a particular polymorphic form (e.g., a SNP allele that encodes a defective protein), thereby inhibiting translation of this form, but which do not bind an alternative polymorphic form (e.g., an alternative SNP nucleotide that encodes a protein having normal function).

[0219] Antisense molecules can be used to inactivate mRNA in order to inhibit gene expression and production of defective proteins. Accordingly, these molecules can be used to treat a disorder, such as a enzyme-mediated disorder, characterized by abnormal or undesired gene expression or expression of certain defective proteins. This technique can involve cleavage by means of ribozymes containing nucleotide sequences complementary to one or more regions in the mRNA that attenuate the ability of the mRNA to be translated. Possible mRNA regions include, for example, protein-coding regions and particularly protein-coding regions corresponding to catalytic activities, substrate/ligand binding, or other functional activities of a protein.

[0220] The SNPs of the present invention are also useful for designing RNA interference reagents that specifically target nucleic acid molecules having particular SNP variants.

[0221] RNA interference (RNAi), also referred to as gene silencing, is based on using double-stranded RNA (dsRNA) molecules to turn genes off. When introduced into a cell, dsRNAs are processed by the cell into short fragments (generally about 21, 22, or 23 nucleotides in length) known as small interfering RNAs (siRNAs) which the cell uses in a sequence-specific manner to recognize and destroy complementary RNAs (Thompson, Drug Discovery Today, 7 (17): 912-917 (2002)). Accordingly, an aspect of the present invention specifically contemplates isolated nucleic acid molecules that are about 18-26 nucleotides in length, preferably 19-25 nucleotides in length, and more preferably 20, 21, 22, or 23 nucleotides in length, and the use of these nucleic acid molecules for RNAi. Because RNAi molecules, including siRNAs, act in a sequence-specific manner, the SNPs of the present invention can be used to design RNAi reagents that recognize and destroy nucleic acid molecules having specific SNP alleles/nucleotides (such as deleterious alleles that lead to the production of defective proteins), while not affecting nucleic acid molecules having alternative SNP alleles (such as alleles that encode proteins having normal function). As with antisense reagents, RNAi reagents may be directly useful as therapeutic agents (e.g., for turning off defective, disease-causing genes), and are also useful for characterizing and validating gene function (e.g., in gene knock-out or knock-down experiments).

[0222] The following references provide a further review of RNAi: Reynolds et al., “Rational siRNA design for RNA interference”, Nat Biotechnol. 2004 March; 22(3):326-30. Epub 2004 Feb. 1; Chi et al., “Genomewide view of gene silencing by small interfering RNAs”, PNAS 100(11):6343-6346, 2003; Vickers et al., “Efficient Reduction of Target RNAs by Small Interfering RNA and RNase H-dependent Antisense Agents”, J. Biol. Chem. 278: 7108-7118, 2003; Agami, “RNAi and related mechanisms and their potential use for therapy”, Curr Opin Chem Biol. 2002 December; 6(6):829-34; Layery et al., “Antisense and RNAi: powerful tools in drug target discovery and validation”, Curr Opin Drug Discov Devel. 2003 July; 6(4):561-9; Shi, “Mammalian RNAi for the masses”, Trends Genet 2003 January; 19(1):9-12), Shuey et al., “RNAi: gene-silencing in therapeutic intervention”, Drug Discovery Today 2002 October; 7(20): 1040-1046; McManus et al., Nat Rev Genet 2002 October; 3(10):737-47; Xia et al., Nat Biotechnol 2002 October; 20(10):1006-10; Plasterk et al., Curr Opin Genet Dev 2000 October; 10(5):562-7; Bosher et al., Nat Cell Biol 2000 February; 2(2):E31-6; and Hunter, Curr Biol 1999 Jun. 17; 9(12):R440-2).

[0223] A subject suffering from a pathological condition, such as a enzyme-mediated disorder, ascribed to a SNP may be treated so as to correct the genetic defect (see Kren et al., Proc. Natl. Acad. Sci. USA 96:10349-10354 (1999)). Such a subject can be identified by any method that can detect the polymorphism in a biological sample drawn from the subject. Such a genetic defect may be permanently corrected by administering to such a subject a nucleic acid fragment incorporating a repair sequence that supplies the normal/wild-type nucleotide at the position of the SNP. This site-specific repair sequence can encompass an RNA/DNA oligonucleotide that operates to promote endogenous repair of a subject's genomic DNA. The site-specific repair sequence is administered in an appropriate vehicle, such as a complex with polyethylenimine, encapsulated in anionic liposomes, a viral vector such as an adenovirus, or other pharmaceutical composition that promotes intracellular uptake of the administered nucleic acid. A genetic defect leading to an inborn pathology may then be overcome, as the chimeric oligonucleotides induce incorporation of the normal sequence into the subject's genome. Upon incorporation, the normal gene product is expressed, and the replacement is propagated, thereby engendering a permanent repair and therapeutic enhancement of the clinical condition of the subject.

[0224] In cases in which a cSNP results in a variant protein that is ascribed to be the cause of, or a contributing factor to, a pathological condition, a method of treating such a condition can include administering to a subject experiencing the pathology the wild-type/normal cognate of the variant protein. Once administered in an effective dosing regimen, the wild-type cognate provides complementation or remediation of the pathological condition.

[0225] The invention further provides a method for identifying a compound or agent that can be used to treat a enzyme-mediated disorder. The SNPs disclosed herein are useful as targets for the identification and/or development of therapeutic agents. A method for identifying a therapeutic agent or compound typically includes assaying the ability of the agent or compound to modulate the activity and/or expression of a SNP-containing nucleic acid or the encoded product and thus identifying an agent or a compound that can be used to treat a disorder characterized by undesired activity or expression of the SNP-containing nucleic acid or the encoded product. The assays can be performed in cell-based and cell-free systems. Cell-based assays can include cells naturally expressing the nucleic acid molecules of interest or recombinant cells genetically engineered to express certain nucleic acid molecules.

[0226] Variant gene expression in a patient having a enzyme-mediated disorder can include, for example, either expression of a SNP-containing nucleic acid sequence (for instance, a gene that contains a SNP can be transcribed into an mRNA transcript molecule containing the SNP, which can in turn be translated into a variant protein) or altered expression of a normal/wild-type nucleic acid sequence due to one or more SNPs (for instance, a regulatory/control region can contain a SNP that affects the level or pattern of expression of a normal transcript).

[0227] Assays for variant gene expression can involve direct assays of nucleic acid levels (e.g., mRNA levels), expressed protein levels, or of collateral compounds involved in a signal pathway. Further, the expression of genes that are up- or down-regulated in response to the signal pathway can also be assayed. In this embodiment, the regulatory regions of these genes can be operably linked to a reporter gene such as luciferase.

[0228] Modulators of variant gene expression can be identified in a method wherein, for example, a cell is contacted with a candidate compound/agent and the expression of mRNA determined. The level of expression of mRNA in the presence of the candidate compound is compared to the level of expression of mRNA in the absence of the candidate compound. The candidate compound can then be identified as a modulator of variant gene expression based on this comparison and be used to treat a disorder such as a enzyme-mediated disorder that is characterized by variant gene expression (e.g., either expression of a SNP-containing nucleic acid or altered expression of a normal/wild-type nucleic acid molecule due to one or more SNPs that affect expression of the nucleic acid molecule) due to one or more SNPs of the present invention. When expression of mRNA is statistically significantly greater in the presence of the candidate compound than in its absence, the candidate compound is identified as a stimulator of nucleic acid expression. When nucleic acid expression is statistically significantly less in the presence of the candidate compound than in its absence, the candidate compound is identified as an inhibitor of nucleic acid expression.

[0229] The invention further provides methods of treatment, with the SNP or associated nucleic acid domain (e.g., catalytic domain, ligand/substrate-binding domain, regulatory/control region, etc.) or gene, or the encoded mRNA transcript, as a target, using a compound identified through drug screening as a gene modulator to modulate variant nucleic acid expression. Modulation can include either up-regulation (i.e., activation or agonization) or down-regulation (i.e., suppression or antagonization) of nucleic acid expression.

[0230] Expression of mRNA transcripts and encoded proteins, either wild type or variant, may be altered in individuals with a particular SNP allele in a regulatory/control element, such as a promoter or transcription factor binding domain, that regulates expression. In this situation, methods of treatment and compounds can be identified, as discussed herein, that regulate or overcome the variant regulatory/control element, thereby generating normal, or healthy, expression levels of either the wild type or variant protein.

[0231] The SNP-containing nucleic acid molecules of the present invention are also useful for monitoring the effectiveness of modulating compounds on the expression or activity of a variant gene, or encoded product, in clinical trials or in a treatment regimen. Thus, the gene expression pattern can serve as an indicator for the continuing effectiveness of treatment with the compound, particularly with compounds to which a patient can develop resistance, as well as an indicator for toxicities. The gene expression pattern can also serve as a marker indicative of a physiological response of the affected cells to the compound. Accordingly, such monitoring would allow either increased administration of the compound or the administration of alternative compounds to which the patient has not become resistant. Similarly, if the level of nucleic acid expression falls below a desirable level, administration of the compound could be commensurately decreased.

[0232] In another aspect of the present invention, there is provided a pharmaceutical pack comprising a therapeutic agent (e.g., a small molecule drug, antibody, peptide, antisense or RNAi nucleic acid molecule, etc.) and a set of instructions for administration of the therapeutic agent to humans diagnostically tested for one or more SNPs or SNP haplotypes provided by the present invention.

[0233] The SNPs/haplotypes of the present invention are also useful for improving many different aspects of the drug development process. For instance, an aspect of the present invention includes selecting individuals for clinical trials based on their SNP genotype. For example, individuals with SNP genotypes that indicate that they are likely to positively respond to a drug can be included in the trials, whereas those individuals whose SNP genotypes indicate that they are less likely to or would not respond to the drug, or who are at risk for suffering toxic effects or other adverse reactions, can be excluded from the clinical trials. This not only can improve the safety of clinical trials, but also can enhance the chances that the trial will demonstrate statistically significant efficacy. Furthermore, the SNPs of the present invention may explain why certain previously developed drugs performed poorly in clinical trials and may help identify a subset of the population that would benefit from a drug that had previously performed poorly in clinical trials, thereby “rescuing” previously developed drugs, and enabling the drug to be made available to a particular patient population that can benefit from it.

[0234] SNPs have many important uses in drug discovery, screening, and development. A high probability exists that, for any gene/protein selected as a potential drug target, variants of that gene/protein will exist in a patient population. Thus, determining the impact of gene/protein variants on the selection and delivery of a therapeutic agent should be an integral aspect of the drug discovery and development process. (Jazwinska, A Trends Guide to Genetic Variation and Genomic Medicine, 2002 March; S30-S36).

[0235] Knowledge of variants (e.g., SNPs and any corresponding amino acid polymorphisms) of a particular therapeutic target (e.g., a enzyme gene, mRNA transcript, or enzyme protein) enables parallel screening of the variants in order to identify therapeutic candidates (e.g., small molecule compounds, antibodies, antisense or RNAi nucleic acid compounds, etc.) that demonstrate efficacy across variants (Rothberg, Nat Biotechnol 2001 March; 19(3):209-11). Such therapeutic candidates would be expected to show equal efficacy across a larger segment of the patient population, thereby leading to a larger potential market for the therapeutic candidate.

[0236] Furthermore, identifying variants of a potential therapeutic target enables the most common form of the target to be used for selection of therapeutic candidates, thereby helping to ensure that the experimental activity that is observed for the selected candidates reflects the real activity expected in the largest proportion of a patient population (Jazwinska, A Trends Guide to Genetic Variation and Genomic Medicine, 2002 March; S30-S36).

[0237] Additionally, screening therapeutic candidates against all known variants of a target can enable the early identification of potential toxicities and adverse reactions relating to particular variants. For example, variability in drug absorption, distribution, metabolism and excretion (ADME) caused by, for example, SNPs in therapeutic targets, enzymes, or drug metabolizing genes, can be identified, and this information can be utilized during the drug development process to minimize variability in drug disposition and develop therapeutic agents that are safer across a wider range of a patient population. The SNPs of the present invention, including the variant enzyme proteins and encoding polymorphic nucleic acid molecules provided in Tables 1-2, are useful in conjunction with a variety of toxicology methods established in the art, such as those set forth in Current Protocols in Toxicology, John Wiley & Sons, Inc., N.Y.

[0238] Furthermore, therapeutic agents that target any art-known enzymes (or encoding nucleic acid molecules, either RNA or DNA) may cross-react with the variant enzymes (or polymorphic nucleic acid molecules) disclosed in Table 1, thereby significantly affecting the pharmacokinetic properties of the drug. Consequently, the enzyme variants and the SNP-containing nucleic acid molecules disclosed in Tables 1-2 are useful in developing, screening, and evaluating therapeutic agents that target corresponding art-known enzymes (or encoding nucleic acid molecules). Additionally, as discussed above, knowledge of all polymorphic forms of a particular drug target enables the design of therapeutic agents that are effective against most or all such polymorphic forms of the drug target.

[0239] Pharmaceutical Compositions and Administration Thereof

[0240] Any of the enzyme proteins, and encoding nucleic acid molecules, disclosed herein can be used as therapeutic targets (or directly used themselves as therapeutic compounds) for treating enzyme-mediated disorders, and the present disclosure enables therapeutic compounds (e.g., small molecules, antibodies, therapeutic proteins, RNAi and antisense molecules, etc.) to be developed that target (or are comprised of) any of these therapeutic targets.

[0241] In general, a therapeutic compound will be administered in a therapeutically effective amount by any of the accepted modes of administration for agents that serve similar utilities. The actual amount of the therapeutic compound of this invention, i.e., the active ingredient, will depend upon numerous factors such as the severity of the disease to be treated, the age and relative health of the subject, the potency of the compound used, the route and form of administration, and other factors.

[0242] Therapeutically effective amounts of therapeutic compounds may range from, for example, approximately 0.01-50 mg per kilogram body weight of the recipient per day; preferably about 0.1-20 mg/kg/day. Thus, as an example, for administration to a 70 kg person, the dosage range would most preferably be about 7 mg to 1.4 g per day.

[0243] In general, therapeutic compounds will be administered as pharmaceutical compositions by any one of the following routes: oral, systemic (e.g., transdermal, intranasal, or by suppository), or parenteral (e.g., intramuscular, intravenous, or subcutaneous) administration. The preferred manner of administration is oral or parenteral using a convenient daily dosage regimen, which can be adjusted according to the degree of affliction. Oral compositions can take the form of tablets, pills, capsules, semisolids, powders, sustained release formulations, solutions, suspensions, elixirs, aerosols, or any other appropriate compositions.

[0244] The choice of formulation depends on various factors such as the mode of drug administration (e.g., for oral administration, formulations in the form of tablets, pills, or capsules are preferred) and the bioavailability of the drug substance. Recently, pharmaceutical formulations have been developed especially for drugs that show poor bioavailability based upon the principle that bioavailability can be increased by increasing the surface area, i.e., decreasing particle size. For example, U.S. Pat. No. 4,107,288 describes a pharmaceutical formulation having particles in the size range from 10 to 1,000 nm in which the active material is supported on a cross-linked matrix of macromolecules. U.S. Pat. No. 5,145,684 describes the production of a pharmaceutical formulation in which the drug substance is pulverized to nanoparticles (average particle size of 400 nm) in the presence of a surface modifier and then dispersed in a liquid medium to give a pharmaceutical formulation that exhibits remarkably high bioavailability.

[0245] Pharmaceutical compositions are comprised of, in general, a therapeutic compound in combination with at least one pharmaceutically acceptable excipient. Acceptable excipients are non-toxic, aid administration, and do not adversely affect the therapeutic benefit of the therapeutic compound. Such excipients may be any solid, liquid, semi-solid or, in the case of an aerosol composition, gaseous excipient that is generally available to one skilled in the art.

[0246] Solid pharmaceutical excipients include starch, cellulose, talc, glucose, lactose, sucrose, gelatin, malt, rice, flour, chalk, silica gel, magnesium stearate, sodium stearate, glycerol monostearate, sodium chloride, dried skim milk and the like. Liquid and semisolid excipients may be selected from glycerol, propylene glycol, water, ethanol and various oils, including those of petroleum, animal, vegetable or synthetic origin, e.g., peanut oil, soybean oil, mineral oil, sesame oil, etc. Preferred liquid carriers, particularly for injectable solutions, include water, saline, aqueous dextrose, and glycols.

[0247] Compressed gases may be used to disperse a compound of this invention in aerosol form. Inert gases suitable for this purpose are nitrogen, carbon dioxide, etc.

[0248] Other suitable pharmaceutical excipients and their formulations are described in Remington's Pharmaceutical Sciences, edited by E. W. Martin (Mack Publishing Company, 18th ed., 1990).

[0249] The amount of the therapeutic compound in a formulation can vary within the full range employed by those skilled in the art. Typically, the formulation will contain, on a weight percent (wt %) basis, from about 0.01-99.99 wt % of the therapeutic compound based on the total formulation, with the balance being one or more suitable pharmaceutical excipients. Preferably, the compound is present at a level of about 1-80 wt %.

[0250] Therapeutic compounds can be administered alone or in combination with other therapeutic compounds or in combination with one or more other active ingredient(s). For example, an inhibitor or stimulator of a enzyme protein can be administered in combination with another agent that inhibits or stimulates the activity of the same or a different enzyme protein to thereby counteract the affects of a enzyme-mediated disorder.

[0251] For further information regarding pharmacology, see Current Protocols in Pharmacology, John Wiley & Sons, Inc., N.Y.

[0252] Human Identification Applications

[0253] In addition to their diagnostic and therapeutic uses for enzyme-mediated disorders and related pathologies, the SNPs provided by the present invention are also useful as human identification markers for such applications as forensics, paternity testing, and biometrics (see, e.g., Gill, “An assessment of the utility of single nucleotide polymorphisms (SNPs) for forensic purposes”, Int J Legal Med. 2001; 114(4-5):204-10). Genetic variations in the nucleic acid sequences between individuals can be used as genetic markers to identify individuals and to associate a biological sample with an individual. Determination of which nucleotides occupy a set of SNP positions in an individual identifies a set of SNP markers that distinguishes the individual. The more SNP positions that are analyzed, the lower the probability that the set of SNPs in one individual is the same as that in an unrelated individual. Preferably, if multiple sites are analyzed, the sites are unlinked (i.e., inherited independently). Thus, preferred sets of SNPs can be selected from among the SNPs disclosed herein, which may include SNPs on different chromosomes, SNPs on different chromosome arms, and/or SNPs that are dispersed over substantial distances along the same chromosome arm.

[0254] Furthermore, among the SNPs disclosed herein, preferred SNPs for use in certain forensic/human identification applications include SNPs located at degenerate codon positions (i.e., the third position in certain codons which can be one of two or more alternative nucleotides and still encode the same amino acid), since these SNPs do not affect the encoded protein. SNPs that do not affect the encoded protein are expected to be under less selective pressure and are therefore expected to be more polymorphic in a population, which is typically an advantage for forensic/human identification applications. However, for certain forensics/human identification applications, such as predicting phenotypic characteristics (e.g., inferring ancestry or inferring one or more physical characteristics of an individual) from a DNA sample, it may be desirable to utilize SNPs that do affect the encoded protein.

[0255] For many of the SNPs disclosed in Tables 1-2 (which are identified as “Applera” SNP source), Tables 1-2 provide SNP allele frequencies obtained by re-sequencing the DNA of chromosomes from 39 individuals (Tables 1-2 also provide allele frequency information for “Celera” source SNPs and, where available, public SNPs from dbEST, HGBASE, and/or HGMD). The allele frequencies provided in Tables 1-2 enable these SNPs to be readily used for human identification applications. Although any SNP disclosed in Table 1 and/or Table 2 could be used for human identification, the closer that the frequency of the minor allele at a particular SNP site is to 50%, the greater the ability of that SNP to discriminate between different individuals in a population since it becomes increasingly likely that two randomly selected individuals would have different alleles at that SNP site. Using the SNP allele frequencies provided in Tables 1-2, one of ordinary skill in the art could readily select a subset of SNPs for which the frequency of the minor allele is, for example, at least 1%, 2%, 5%, 10%, 20%, 25%, 30%, 40%, 45%, or 50%, or any other frequency in-between. Thus, since Tables 1-2 provide allele frequencies based on the re-sequencing of the chromosomes from 39 individuals, a subset of SNPs could readily be selected for human identification in which the total allele count of the minor allele at a particular SNP site is, for example, at least 1, 2, 4, 8, 10, 16, 20, 24, 30, 32, 36, 38, 39, 40, or any other number in-between.

[0256] Furthermore, Tables 1-2 also provide population group (interchangeably referred to herein as ethnic or racial groups) information coupled with the extensive allele frequency information. For example, the group of 39 individuals whose DNA was re-sequenced was made-up of 20 Caucasians and 19 African-Americans. This population group information enables further refinement of SNP selection for human identification. For example, preferred SNPs for human identification can be selected from Tables 1-2 that have similar allele frequencies in both the Caucasian and African-American populations; thus, for example, SNPs can be selected that have equally high discriminatory power in both populations. Alternatively, SNPs can be selected for which there is a statistically significant difference in allele frequencies between the Caucasian and African-American populations (as an extreme example, a particular allele may be observed only in either the Caucasian or the African-American population group but not observed in the other population group); such SNPs are useful, for example, for predicting the race/ethnicity of an unknown perpetrator from a biological sample such as a hair or blood stain recovered at a crime scene. For a discussion of using SNPs to predict ancestry from a DNA sample, including statistical methods, see Frudakis et al., “A Classifier for the SNP-Based Inference of Ancestry”, Journal of Forensic Sciences 2003; 48(4):771-782.

[0257] SNPs have numerous advantages over other types of polymorphic markers, such as short tandem repeats (STRs). For example, SNPs can be easily scored and are amenable to automation, making SNPs the markers of choice for large-scale forensic databases. SNPs are found in much greater abundance throughout the genome than repeat polymorphisms. Population frequencies of two polymorphic forms can usually be determined with greater accuracy than those of multiple polymorphic forms at multi-allelic loci. SNPs are mutationaly more stable than repeat polymorphisms. SNPs are not susceptible to artefacts such as stutter bands that can hinder analysis. Stutter bands are frequently encountered when analyzing repeat polymorphisms, and are particularly troublesome when analyzing samples such as crime scene samples that may contain mixtures of DNA from multiple sources. Another significant advantage of SNP markers over STR markers is the much shorter length of nucleic acid needed to score a SNP. For example, STR markers are generally several hundred base pairs in length. A SNP, on the other hand, comprises a single nucleotide, and generally a short conserved region on either side of the SNP position for primer and/or probe binding. This makes SNPs more amenable to typing in highly degraded or aged biological samples that are frequently encountered in forensic casework in which DNA may be fragmented into short pieces.

[0258] SNPs also are not subject to microvariant and “off-ladder” alleles frequently encountered when analyzing STR loci. Microvariants are deletions or insertions within a repeat unit that change the size of the amplified DNA product so that the amplified product does not migrate at the same rate as reference alleles with normal sized repeat units. When separated by size, such as by electrophoresis on a polyacrylamide gel, microvariants do not align with a reference allelic ladder of standard sized repeat units, but rather migrate between the reference alleles. The reference allelic ladder is used for precise sizing of alleles for allele classification; therefore alleles that do not align with the reference allelic ladder lead to substantial analysis problems. Furthermore, when analyzing multi-allelic repeat polymorphisms, occasionally an allele is found that consists of more or less repeat units than has been previously seen in the population, or more or less repeat alleles than are included in a reference allelic ladder. These alleles will migrate outside the size range of known alleles in a reference allelic ladder, and therefore are referred to as “off-ladder” alleles. In extreme cases, the allele may contain so few or so many repeats that it migrates well out of the range of the reference allelic ladder. In this situation, the allele may not even be observed, or, with multiplex analysis, it may migrate within or close to the size range for another locus, further confounding analysis.

[0259] SNP analysis avoids the problems of microvariants and off-ladder alleles encountered in STR analysis. Importantly, microvariants and off-ladder alleles may provide significant problems, and may be completely missed, when using analysis methods such as oligonucleotide hybridization arrays, which utilize oligonucleotide probes specific for certain known alleles. Furthermore, off-ladder alleles and microvariants encountered with STR analysis, even when correctly typed, may lead to improper statistical analysis, since their frequencies in the population are generally unknown or poorly characterized, and therefore the statistical significance of a matching genotype may be questionable. All these advantages of SNP analysis are considerable in light of the consequences of most DNA identification cases, which may lead to life imprisonment for an individual, or re-association of remains to the family of a deceased individual.

[0260] DNA can be isolated from biological samples such as blood, bone, hair, saliva, or semen, and compared with the DNA from a reference source at particular SNP positions. Multiple SNP markers can be assayed simultaneously in order to increase the power of discrimination and the statistical significance of a matching genotype. For example, oligonucleotide arrays can be used to genotype a large number of SNPs simultaneously. The SNPs provided by the present invention can be assayed in combination with other polymorphic genetic markers, such as other SNPs known in the art or STRs, in order to identify an individual or to associate an individual with a particular biological sample.

[0261] Furthermore, the SNPs provided by the present invention can be genotyped for inclusion in a database of DNA genotypes, for example, a criminal DNA databank such as the FBI's Combined DNA Index System (CODIS) database. A genotype obtained from a biological sample of unknown source can then be queried against the database to find a matching genotype, with the SNPs of the present invention providing nucleotide positions at which to compare the known and unknown DNA sequences for identity. Accordingly, the present invention provides a database comprising novel SNPs or SNP alleles of the present invention (e.g., the database can comprise information indicating which alleles are possessed by individual members of a population at one or more novel SNP sites of the present invention), such as for use in forensics, biometrics, or other human identification applications. Such a database typically comprises a computer-based system in which the SNPs or SNP alleles of the present invention are recorded on a computer readable medium (see the section of the present specification entitled “Computer-Related Embodiments”).

[0262] The SNPs of the present invention can also be assayed for use in paternity testing. The object of paternity testing is usually to determine whether a male is the father of a child. In most cases, the mother of the child is known and thus, the mother's contribution to the child's genotype can be traced. Paternity testing investigates whether the part of the child's genotype not attributable to the mother is consistent with that of the putative father. Paternity testing can be performed by analyzing sets of polymorphisms in the putative father and the child, with the SNPs of the present invention providing nucleotide positions at which to compare the putative father's and child's DNA sequences for identity. If the set of polymorphisms in the child attributable to the father does not match the set of polymorphisms of the putative father, it can be concluded, barring experimental error, that the putative father is not the father of the child. If the set of polymorphisms in the child attributable to the father match the set of polymorphisms of the putative father, a statistical calculation can be performed to determine the probability of coincidental match, and a conclusion drawn as to the likelihood that the putative father is the true biological father of the child.

[0263] In addition to paternity testing, SNPs are also useful for other types of kinship testing, such as for verifying familial relationships for immigration purposes, or for cases in which an individual alleges to be related to a deceased individual in order to claim an inheritance from the deceased individual, etc. For further information regarding the utility of SNPs for paternity testing and other types of kinship testing, including methods for statistical analysis, see Krawczak, “Informativity assessment for biallelic single nucleotide polymorphisms”, Electrophoresis 1999 June; 20(8):1676-81.

[0264] The use of the SNPs of the present invention for human identification further extends to various authentication systems, commonly referred to as biometric systems, which typically convert physical characteristics of humans (or other organisms) into digital data. Biometric systems include various technological devices that measure such unique anatomical or physiological characteristics as finger, thumb, or palm prints; hand geometry; vein patterning on the back of the hand; blood vessel patterning of the retina and color and texture of the iris; facial characteristics; voice patterns; signature and typing dynamics; and DNA. Such physiological measurements can be used to verify identity and, for example, restrict or allow access based on the identification. Examples of applications for biometrics include physical area security, computer and network security, aircraft passenger check-in and boarding, financial transactions, medical records access, government benefit distribution, voting, law enforcement, passports, visas and immigration, prisons, various military applications, and for restricting access to expensive or dangerous items, such as automobiles or guns (see, for example, O'Connor, Stanford Technology Law Review and U.S. Pat. No. 6,119,096).

[0265] Groups of SNPs, particularly the SNPs provided by the present invention, can be typed to uniquely identify an individual for biometric applications such as those described above. Such SNP typing can readily be accomplished using, for example, DNA chips/arrays. Preferably, a minimally invasive means for obtaining a DNA sample is utilized. For example, PCR amplification enables sufficient quantities of DNA for analysis to be obtained from buccal swabs or fingerprints, which contain DNA-containing skin cells and oils that are naturally transferred during contact.

[0266] Further information regarding techniques for using SNPs in forensic/human identification applications can be found in, for example, Current Protocols in Human Genetics, John Wiley & Sons, N.Y. (2002), 14.1-14.7.

[0267] Variant Proteins, Antibodies, Vectors & Host Cells, & Uses Thereof

[0268] Variant Proteins Encoded by SNP-Containing Nucleic Acid Molecules

[0269] The present invention provides SNP-containing nucleic acid molecules, many of which encode enzymes having variant amino acid sequences as compared to the art-known (i.e., wild-type) enzyme proteins. Amino acid sequences encoded by the polymorphic nucleic acid molecules of the present invention are provided as SEQ ID NOS:7499-14,996 in Table 1 and the Sequence Listing. These variants will generally be referred to herein as variant proteins/peptides/polypeptides/enzymes, or polymorphic proteins/peptides/polypeptides/enzymes of the present invention. The terms “protein”, “peptide”, and “polypeptide” are used herein interchangeably.

[0270] A variant enzyme protein of the present invention may be encoded by, for example, a nonsynonymous nucleotide substitution at any one of the cSNP positions disclosed herein. In addition, variant enzyme proteins may also include proteins whose expression, structure, and/or function is altered by a SNP disclosed herein, such as a SNP that creates or destroys a stop codon, a SNP that affects splicing, and a SNP in control/regulatory elements, e.g. promoters, enhancers, or transcription factor binding domains.

[0271] As used herein, a protein or peptide is said to be “isolated” or “purified” when it is substantially free of cellular material or chemical precursors or other chemicals. The variant proteins of the present invention can be purified to homogeneity or other lower degrees of purity. The level of purification will be based on the intended use. The key feature is that the preparation allows for the desired function of the variant protein, even if in the presence of considerable amounts of other components.

[0272] As used herein, “substantially free of cellular material” includes preparations of the variant protein having less than about 30% (by dry weight) other proteins (i.e., contaminating protein), less than about 20% other proteins, less than about 10% other proteins, or less than about 5% other proteins. When the variant protein is recombinantly produced, it can also be substantially free of culture medium, i.e., culture medium represents less than about 20% of the volume of the protein preparation.

[0273] The language “substantially free of chemical precursors or other chemicals” includes preparations of the variant protein in which it is separated from chemical precursors or other chemicals that are involved in its synthesis. In one embodiment, the language “substantially free of chemical precursors or other chemicals” includes preparations of the variant protein having less than about 30% (by dry weight) chemical precursors or other chemicals, less than about 20% chemical precursors or other chemicals, less than about 10% chemical precursors or other chemicals, or less than about 5% chemical precursors or other chemicals.

[0274] An isolated variant protein may be purified from cells that naturally express it, purified from cells that have been altered to express it (recombinant host cells), or synthesized using known protein synthesis methods. For example, a nucleic acid molecule containing SNP(s) encoding the variant protein can be cloned into an expression vector, the expression vector introduced into a host cell, and the variant protein expressed in the host cell. The variant protein can then be isolated from the cells by any appropriate purification scheme using standard protein purification techniques. Examples of these techniques are described in detail below (Sambrook and Russell, 2000, Molecular Cloning: A Laboratory Manual, Cold Spring Harbor Laboratory Press, Cold Spring Harbor, N.Y.).

[0275] The present invention provides isolated variant enzyme proteins that comprise, consist of or consist essentially of amino acid sequences that contain one or more variant amino acids encoded by one or more codons which contain a SNP of the present invention.

[0276] Accordingly, the present invention provides variant enzyme proteins that consist of amino acid sequences that contain one or more amino acid polymorphisms (or truncations or extensions due to creation or destruction of a stop codon, respectively) encoded by the SNPs provided in Table 1 and/or Table 2. A protein consists of an amino acid sequence when the amino acid sequence is the entire amino acid sequence of the protein.

[0277] The present invention further provides variant enzyme proteins that consist essentially of amino acid sequences that contain one or more amino acid polymorphisms (or truncations or extensions due to creation or destruction of a stop codon, respectively) encoded by the SNPs provided in Table 1 and/or Table 2. A protein consists essentially of an amino acid sequence when such an amino acid sequence is present with only a few additional amino acid residues in the final protein.

[0278] The present invention further provides variant enzyme proteins that comprise amino acid sequences that contain one or more amino acid polymorphisms (or truncations or extensions due to creation or destruction of a stop codon, respectively) encoded by the SNPs provided in Table 1 and/or Table 2. A protein comprises an amino acid sequence when the amino acid sequence is at least part of the final amino acid sequence of the protein. In such a fashion, the protein may contain only the variant amino acid sequence or have additional amino acid residues, such as a contiguous encoded sequence that is naturally associated with it or heterologous amino acid residues. Such a protein can have a few additional amino acid residues or can comprise many more additional amino acids. A brief description of how various types of these proteins can be made and isolated is provided below.

[0279] The variant enzyme proteins of the present invention can be attached to heterologous sequences to form chimeric or fusion proteins. Such chimeric and fusion proteins comprise a variant protein operatively linked to a heterologous protein having an amino acid sequence not substantially homologous to the variant protein. “Operatively linked” indicates that the coding sequences for the variant protein and the heterologous protein are ligated in-frame. The heterologous protein can be fused to the N-terminus or C-terminus of the variant protein. In another embodiment, the fusion protein is encoded by a fusion polynucleotide that is synthesized by conventional techniques including automated DNA synthesizers. Alternatively, PCR amplification of gene fragments can be carried out using anchor primers which give rise to complementary overhangs between two consecutive gene fragments which can subsequently be annealed and re-amplified to generate a chimeric gene sequence (see Ausubel et al., Current Protocols in Molecular Biology, 1992). Moreover, many expression vectors are commercially available that already encode a fusion moiety (e.g., a GST protein). A variant enzyme-encoding nucleic acid can be cloned into such an expression vector such that the fusion moiety is linked in-frame to the variant enzyme.

[0280] In many uses, the fusion protein does not affect the activity of the variant enzyme protein. The fusion protein can include, but is not limited to, enzymatic fusion proteins, for example, beta-galactosidase fusions, yeast two-hybrid GAL fusions, poly-His fusions, MYC-tagged, HI-tagged and Ig fusions. Such fusion proteins, particularly poly-His fusions, can facilitate their purification following recombinant expression. In certain host cells (e.g., mammalian host cells), expression and/or secretion of a protein can be increased by using a heterologous signal sequence. Fusion proteins are further described in, for example, Terpe, “Overview of tag protein fusions: from molecular and biochemical fundamentals to commercial systems”, Appl Microbiol Biotechnol. 2003 January; 60(5):523-33. Epub 2002 Nov. 7; Graddis et al., “Designing proteins that work using recombinant technologies”, Curr Pharm Biotechnol. 2002 December; 3(4):285-97; and Nilsson et al., “Affinity fusion strategies for detection, purification, and immobilization of recombinant proteins”, Protein Expr Purif. 1997 October; 11(1):1-16.

[0281] The present invention also relates to further obvious variants of the variant enzyme polypeptide of the present invention, such as naturally-occurring mature forms (e.g., alleleic variants), non-naturally occurring recombinantly-derived variants, and orthologs and paralogs of such proteins that share sequence homology. Such variants can readily be generated using art-known techniques in the fields of recombinant nucleic acid technology and protein biochemistry. It is understood, however, that variants exclude those known in the prior art before the present invention.

[0282] Further variants of the variant enzyme polypeptides disclosed in Table 1 can comprise an amino acid sequence that shares at least 70-80%, 80-85%, 85-90%, 91%, 92%, 93%, 94%, 95%, 96%, 97%, 98%, or 99% sequence identity with an amino acid sequence disclosed in Table 1 (or a fragment thereof) and that includes a novel amino acid residue (allele) disclosed in Table 1 (which is encoded by a novel SNP allele). Thus, an aspect of the present invention that is specifically contemplated are enzyme polypeptides that have a certain degree of sequence variation compared with the enzyme polypeptide sequences shown in Table 1, but that contain a novel amino acid residue (allele) encoded by a novel SNP allele disclosed herein. In other words, as long as a enzyme polypeptide contains a novel amino acid residue disclosed herein, other portions of the enzyme polypeptide that flank the novel amino acid residue can vary to some degree from the polypeptide sequences shown in Table 1.

[0283] Full-length pre-processed forms, as well as mature processed forms, of proteins that comprise one of the amino acid sequences disclosed herein can readily be identified as having complete sequence identity to one of the variant proteins of the present invention as well as being encoded by the same genetic locus as the variant proteins provided herein.

[0284] Orthologs of a variant peptide can readily be identified as having some degree of significant sequence homology/identity to at least a portion of a variant peptide as well as being encoded by a gene from another organism. Preferred orthologs will be isolated from non-human mammals, preferably primates, for the development of human therapeutic targets and agents. Such orthologs can be encoded by a nucleic acid sequence that hybridizes to a variant peptide-encoding nucleic acid molecule under moderate to stringent conditions depending on the degree of relatedness of the two organisms yielding the homologous proteins.

[0285] Variant proteins include, but are not limited to, proteins containing deletions, additions and substitutions in the amino acid sequence caused by the SNPs of the present invention. One class of substitutions is conserved amino acid substitutions in which a given amino acid in a polypeptide is substituted for another amino acid of like characteristics. Typical conservative substitutions are replacements, one for another, among the aliphatic amino acids Ala, Val, Leu, and Ile; interchange of the hydroxyl residues Ser and Thr; exchange of the acidic residues Asp and Glu; substitution between the amide residues Asn and Gln; exchange of the basic residues Lys and Arg; and replacements among the aromatic residues Phe and Tyr. Guidance concerning which amino acid changes are likely to be phenotypically silent are found in, for example, Bowie et al., Science 247:1306-1310 (1990).

[0286] Variant proteins can be fully functional or can lack function in one or more activities, e.g. ability to bind another molecule, ability to catalyze a substrate, ability to mediate signaling, etc. Fully functional variants typically contain only conservative variations or variations in non-critical residues or in non-critical regions. Functional variants can also contain substitution of similar amino acids that result in no change or an insignificant change in function. Alternatively, such substitutions may positively or negatively affect function to some degree. Non-functional variants typically contain one or more non-conservative amino acid substitutions, deletions, insertions, inversions, truncations or extensions, or a substitution, insertion, inversion, or deletion of a critical residue or in a critical region.

[0287] Amino acids that are essential for function of a protein can be identified by methods known in the art, such as site-directed mutagenesis or alanine-scanning mutagenesis (Cunningham et al., Science 244:1081-1085 (1989)), particularly using the amino acid sequence and polymorphism information provided in Table 1. The latter procedure introduces single alanine mutations at every residue in the molecule. The resulting mutant molecules are then tested for biological activity such as enzyme activity or in assays such as an in vitro proliferative activity. Sites that are critical for binding partner/substrate binding can also be determined by structural analysis such as crystallization, nuclear magnetic resonance or photoaffinity labeling (Smith et al., J. Mol. Biol. 224:899-904 (1992); de Vos et al. Science 255:306-312 (1992)).

[0288] Polypeptides can contain amino acids other than the 20 amino acids commonly referred to as the 20 naturally occurring amino acids. Further, many amino acids, including the terminal amino acids, may be modified by natural processes, such as processing and other post-translational modifications, or by chemical modification techniques well known in the art. Accordingly, the variant proteins of the present invention also encompass derivatives or analogs in which a substituted amino acid residue is not one encoded by the genetic code, in which a substituent group is included, in which the mature polypeptide is fused with another compound, such as a compound to increase the half-life of the polypeptide (e.g., polyethylene glycol), or in which additional amino acids are fused to the mature polypeptide, such as a leader or secretory sequence or a sequence for purification of the mature polypeptide or a pro-protein sequence.

[0289] Known protein modifications include, but are not limited to, acetylation, acylation, ADP-ribosylation, amidation, covalent attachment of flavin, covalent attachment of a heme moiety, covalent attachment of a nucleotide or nucleotide derivative, covalent attachment of a lipid or lipid derivative, covalent attachment of phosphotidylinositol, cross-linking, cyclization, disulfide bond formation, demethylation, formation of covalent crosslinks, formation of cystine, formation of pyroglutamate, formylation, gamma carboxylation, glycosylation, GPI anchor formation, hydroxylation, iodination, methylation, myristoylation, oxidation, proteolytic processing, phosphorylation, prenylation, racemization, selenoylation, sulfation, transfer-RNA mediated addition of amino acids to proteins such as arginylation, and ubiquitination.

[0290] Such protein modifications are well known to those of skill in the art and have been described in great detail in the scientific literature. Several particularly common modifications, glycosylation, lipid attachment, sulfation, gamma-carboxylation of glutamic acid residues, hydroxylation and ADP-ribosylation, for instance, are described in most basic texts, such as Proteins—Structure and Molecular Properties, 2nd Ed., T. E. Creighton, W. H. Freeman and Company, New York (1993); Wold, F., Posttranslational Covalent Modification of Proteins, B. C. Johnson, Ed., Academic Press, New York 1-12 (1983); Seifter et al., Meth. Enzymol. 182: 626-646 (1990); and Rattan et al., Ann. N.Y. Acad. Sci. 663:48-62 (1992).

[0291] The present invention further provides fragments of the variant enzyme proteins in which the fragments contain one or more amino acid sequence variations (e.g., substitutions, or truncations or extensions due to creation or destruction of a stop codon) encoded by one or more SNPs disclosed herein. The fragments to which the invention pertains, however, are not to be construed as encompassing fragments that have been disclosed in the prior art before the present invention.

[0292] As used herein, a fragment may comprise at least about 4, 8, 10, 12, 14, 16, 18, 20, 25, 30, 50, 100 (or any other number in-between) or more contiguous amino acid residues from a variant protein, wherein at least one amino acid residue is affected by a SNP of the present invention, e.g., a variant amino acid residue encoded by a nonsynonymous nucleotide substitution at a cSNP position provided by the present invention. The variant amino acid encoded by a cSNP may occupy any residue position along the sequence of the fragment. Such fragments can be chosen based on the ability to retain one or more of the biological activities of the variant protein or the ability to perform a function, e.g., act as an immunogen. Particularly important fragments are biologically active fragments. Such fragments will typically comprise a domain or motif of a variant protein of the present invention, e.g., active site, transmembrane domain, or ligand/substrate binding domain. Other fragments include, but are not limited to, domain or motif-containing fragments, soluble peptide fragments, and fragments containing immunogenic structures. Predicted domains and functional sites are readily identifiable by computer programs well known to those of skill in the art (e.g., PROSITE analysis) (Current Protocols in Protein Science, John Wiley & Sons, N.Y. (2002)).

[0293] Uses of Variant Proteins

[0294] The variant enzyme proteins of the present invention can be used in a variety of ways, including but not limited to, in assays to determine the biological activity of a variant enzyme protein, such as in a panel of multiple proteins for high-throughput screening; to raise antibodies or to elicit another type of immune response; as a reagent (including the labeled reagent) in assays designed to quantitatively determine levels of the variant enzyme protein (or its binding partner) in biological fluids; as a marker for cells or tissues in which it is preferentially expressed (either constitutively or at a particular stage of tissue differentiation or development or in a disease state); as a target for screening for a therapeutic agent; and as a direct therapeutic agent to be administered into a human subject. Any of the variant enzyme proteins disclosed herein may be developed into reagent grade or kit format for commercialization as research products. Methods for performing the uses listed above are well known to those skilled in the art (see, e.g., Molecular Cloning: A Laboratory Manual, Cold Spring Harbor Laboratory Press, Sambrook and Russell, 2000, and Methods in Enzymology: Guide to Molecular Cloning Techniques, Academic Press, Berger, S. L. and A. R. Kimmel eds., 1987).

[0295] In a specific embodiment of the invention, the methods of the present invention include detection of one or more variant enzyme proteins disclosed herein. Variant enzyme proteins are disclosed in Table 1 and in the Sequence Listing as SEQ ID NOS: 7499-14,996. Detection of such enzyme proteins can be accomplished using, for example, antibodies, small molecule compounds, aptamers, ligands/substrates, other proteins or protein fragments, or other protein-binding agents. Preferably, protein detection agents are specific for a variant protein of the present invention and can therefore discriminate between a variant protein of the present invention and the wild-type protein or another variant form. This can generally be accomplished by, for example, selecting or designing detection agents that bind to the region of a protein that differs between the variant and wild-type protein, such as a region of a protein that contains one or more amino acid substitutions that is/are encoded by a non-synonymous cSNP of the present invention, or a region of a protein that follows a nonsense mutation-type SNP that creates a stop codon thereby leading to a shorter polypeptide, or a region of a protein that follows a read-through mutation-type SNP that destroys a stop codon thereby leading to a longer polypeptide in which a portion of the polypeptide is present in one version of the polypeptide but not the other.

[0296] In another specific aspect of the invention, the variant proteins of the present invention are used as targets for diagnosing enzyme-mediated disorders or for determining predisposition to a enzyme-mediated disorder in a human. Accordingly, the invention provides methods for detecting the presence of, or levels of, one or more variant enzyme proteins of the present invention in a cell, tissue, or organism. Such methods typically involve contacting a test sample with an agent (e.g., an antibody, small molecule compound, or peptide) capable of interacting with the variant protein such that specific binding of the agent to the variant protein can be detected. Such an assay can be provided in a single detection format or a multi-detection format such as an array, for example, an antibody or aptamer array (arrays for protein detection may also be referred to as “protein chips”). The variant protein of interest can be isolated from a test sample and assayed for the presence of a variant amino acid sequence encoded by one or more SNPs disclosed by the present invention. The SNPs may cause changes to the protein and the corresponding protein function/activity, such as through non-synonymous substitutions in protein coding regions that can lead to amino acid substitutions, deletions, insertions, and/or rearrangements; formation or destruction of stop codons; or alteration of control elements such as promoters. SNPs may also cause inappropriate post-translational modifications.

[0297] One preferred agent for detecting a variant protein in a sample is an antibody capable of selectively binding to a variant form of the protein (antibodies are described in greater detail in the next section). Such samples include, for example, tissues, cells, and biological fluids isolated from a subject, as well as tissues, cells and fluids present within a subject.

[0298] In vitro methods for detection of the variant enzyme proteins and fragments thereof include, but are not limited to, enzyme linked immunosorbent assays (ELISAs), radioimmunoassays (RIA), Western blots, immunoprecipitations, immunofluorescence, and protein arrays/chips (e.g., arrays of antibodies or aptamers). For further information regarding immunoassays and related protein detection methods, see Current Protocols in Immunology, John Wiley & Sons, N.Y., and Hage, “Immunoassays”, Anal Chem. 1999 Jun. 15; 71(12):294R-304R.

[0299] Additional analytic methods of detecting amino acid variants include, but are not limited to, altered electrophoretic mobility, altered tryptic peptide digest, altered protein activity in cell-based or cell-free assay, alteration in ligand or antibody-binding pattern, altered isoelectric point, and direct amino acid sequencing.

[0300] Alternatively, variant proteins can be detected in vivo in a subject by introducing into the subject a labeled antibody (or other type of detection reagent) specific for a variant protein. For example, the antibody can be labeled with a radioactive marker whose presence and location in a subject can be detected by standard imaging techniques.

[0301] Other uses of the variant peptides of the present invention are based on the class or action of the protein. For example, proteins isolated from humans and their mammalian orthologs serve as targets for identifying agents (e.g., small molecule drugs or antibodies) for use in therapeutic applications, particularly for modulating a biological or pathological response in a cell or tissue that expresses the protein. Pharmaceutical agents can be developed that modulate protein activity.

[0302] As an alternative to modulating gene expression, therapeutic compounds can be developed that modulate protein function. For example, many SNPs disclosed herein affect the amino acid sequence of the encoded enzyme protein (e.g., non-synonymous cSNPs and nonsense mutation-type SNPs). Such alterations in the encoded amino acid sequence may affect protein function, particularly if such amino acid sequence variations occur in functional protein domains, such as catalytic domains, ATP-binding domains, or ligand/substrate binding domains. It is well established in the art that variant proteins having amino acid sequence variations in functional domains can cause or influence pathological conditions. In such instances, compounds (e.g., small molecule drugs or antibodies) can be developed that target the variant protein and modulate (e.g., up- or down-regulate) protein function/activity.

[0303] The therapeutic methods of the present invention further include methods that target one or more variant enzyme proteins of the present invention. Variant enzyme proteins can be targeted using, for example, small molecule compounds, antibodies, aptamers, ligands/substrates, other proteins, or other protein-binding agents. Additionally, the skilled artisan will recognize that the novel enzyme protein variants (and polymorphic nucleic acid molecules) disclosed in Table 1 may themselves be directly used as therapeutic agents by acting as competitive inhibitors of corresponding art-known proteins (or nucleic acid molecules such as mRNA molecules).

[0304] The variant enzyme proteins of the present invention are particularly useful in drug screening assays, in cell-based or cell-free systems. Cell-based systems can utilize cells that naturally express the protein, a biopsy specimen, or cell cultures. In one embodiment, cell-based assays involve recombinant host cells expressing the variant protein. Cell-free assays can be used to detect the ability of a compound to directly bind to a variant protein or to the corresponding SNP-containing nucleic acid fragment that encodes the variant protein.

[0305] A variant enzyme protein of the present invention, as well as appropriate fragments thereof, can be used in high-throughput screening assays to test candidate compounds for the ability to bind and/or modulate the activity of the variant enzyme protein. These candidate compounds can be further screened against a protein having normal function (e.g., a wild-type/non-variant enzyme protein) to further determine the effect of the compound on the protein activity. Furthermore, these compounds can be tested in animal or invertebrate systems to determine in vivo activity/effectiveness. Compounds can be identified that activate (agonists) or inactivate (antagonists) the variant protein, and different compounds can be identified that cause various degrees of activation or inactivation of the variant protein.

[0306] Further, the variant enzyme proteins can be used to screen a compound for the ability to stimulate or inhibit interaction between the variant protein and a target molecule that normally interacts with the protein. The target can be a ligand, a substrate or a binding partner that the protein normally interacts with (for example, epinephrine or norepinephrine). Such assays typically include the steps of combining the variant protein with a candidate compound under conditions that allow the variant protein, or fragment thereof, to interact with the target molecule, and to detect the formation of a complex between the protein and the target or to detect the biochemical consequence of the interaction with the variant protein and the target, such as any of the associated effects of signal transduction or enzymatic activity.

[0307] Candidate compounds include, for example, 1) peptides such as soluble peptides, including Ig-tailed fusion peptides and members of random peptide libraries (see, e.g., Lam et al., Nature 354:82-84 (1991); Houghten et al., Nature 354:84-86 (1991)) and combinatorial chemistry-derived molecular libraries made of D- and/or L- configuration amino acids; 2) phosphopeptides (e.g., members of random and partially degenerate, directed phosphopeptide libraries, see, e.g., Songyang et al., Cell 72:767-778 (1993)); 3) antibodies (e.g., polyclonal, monoclonal, humanized, anti-idiotypic, chimeric, and single chain antibodies as well as Fab, F(ab′)₂, Fab expression library fragments, and epitope-binding fragments of antibodies); and 4) small organic and inorganic molecules (e.g., molecules obtained from combinatorial and natural product libraries).

[0308] One candidate compound is a soluble fragment of the variant protein that competes for ligand binding. Other candidate compounds include mutant proteins or appropriate fragments containing mutations that affect variant protein function and thus compete for ligand. Accordingly, a fragment that competes for ligand, for example with a higher affinity, or a fragment that binds ligand but does not allow release, is encompassed by the invention.

[0309] The invention further includes other end point assays to identify compounds that modulate (stimulate or inhibit) variant protein activity. The assays typically involve an assay of events in the signal transduction pathway that indicate protein activity. Thus, the expression of genes that are up or down-regulated in response to the variant protein dependent signal cascade can be assayed. In one embodiment, the regulatory region of such genes can be operably linked to a marker that is easily detectable, such as luciferase. Alternatively, phosphorylation of the variant protein, or a variant protein target, could also be measured. Any of the biological or biochemical functions mediated by the variant protein can be used as an endpoint assay. These include all of the biochemical or biological events described herein, in the references cited herein, incorporated by reference for these endpoint assay targets, and other functions known to those of ordinary skill in the art.

[0310] Binding and/or activating compounds can also be screened by using chimeric variant proteins in which an amino terminal extracellular domain or parts thereof, an entire transmembrane domain or subregions, and/or the carboxyl terminal intracellular domain or parts thereof, can be replaced by heterologous domains or subregions. For example, a substrate-binding region can be used that interacts with a different substrate than that which is normally recognized by a variant protein. Accordingly, a different set of signal transduction components is available as an end-point assay for activation. This allows for assays to be performed in other than the specific host cell from which the variant protein is derived.

[0311] The variant proteins are also useful in competition binding assays in methods designed to discover compounds that interact with the variant protein. Thus, a compound can be exposed to a variant protein under conditions that allow the compound to bind or to otherwise interact with the variant protein. A binding partner, such as ligand, that normally interacts with the variant protein is also added to the mixture. If the test compound interacts with the variant protein or its binding partner, it decreases the amount of complex formed or activity from the variant protein. This type of assay is particularly useful in screening for compounds that interact with specific regions of the variant protein (Hodgson, Bio/technology, 1992, September 10(9), 973-80).

[0312] To perform cell-free drug screening assays, it is sometimes desirable to immobilize either the variant protein or a fragment thereof, or its target molecule, to facilitate separation of complexes from uncomplexed forms of one or both of the proteins, as well as to accommodate automation of the assay. Any method for immobilizing proteins on matrices can be used in drug screening assays. In one embodiment, a fusion protein containing an added domain allows the protein to be bound to a matrix. For example, glutathione-S-transferase/¹²⁵I fusion proteins can be adsorbed onto glutathione sepharose beads (Sigma Chemical, St. Louis, Mo.) or glutathione derivatized microtitre plates, which are then combined with the cell lysates (e.g., ³⁵S-labeled) and a candidate compound, such as a drug candidate, and the mixture incubated under conditions conducive to complex formation (e.g., at physiological conditions for salt and pH). Following incubation, the beads can be washed to remove any unbound label, and the matrix immobilized and radiolabel determined directly, or in the supernatant after the complexes are dissociated. Alternatively, the complexes can be dissociated from the matrix, separated by SDS-PAGE, and the level of bound material found in the bead fraction quantitated from the gel using standard electrophoretic techniques.

[0313] Either the variant protein or its target molecule can be immobilized utilizing conjugation of biotin and streptavidin. Alternatively, antibodies reactive with the variant protein but which do not interfere with binding of the variant protein to its target molecule can be derivatized to the wells of the plate, and the variant protein trapped in the wells by antibody conjugation. Preparations of the target molecule and a candidate compound are incubated in the variant protein-presenting wells and the amount of complex trapped in the well can be quantitated. Methods for detecting such complexes, in addition to those described above for the GST-immobilized complexes, include immunodetection of complexes using antibodies reactive with the protein target molecule, or which are reactive with variant protein and compete with the target molecule, and enzyme-linked assays that rely on detecting an enzymatic activity associated with the target molecule.

[0314] Modulators of variant protein activity identified according to these drug screening assays can be used to treat a subject with a disorder mediated by the protein pathway, such as a enzyme-mediated disorder. These methods of treatment typically include the steps of administering the modulators of protein activity in a pharmaceutical composition to a subject in need of such treatment.

[0315] The variant proteins, or fragments thereof, disclosed herein can themselves be directly used to treat a disorder characterized by an absence of, inappropriate, or unwanted expression or activity of the variant enzyme protein. Accordingly, methods for treatment include the use of a variant protein disclosed herein or fragments thereof.

[0316] In yet another aspect of the invention, variant proteins can be used as “bait proteins” in a two-hybrid assay or three-hybrid assay (see, e.g., U.S. Pat. No. 5,283,317; Zervos et al. (1993) Cell 72:223-232; Madura et al. (1993) J. Biol. Chem. 268:12046-12054; Bartel et al. (1993) Biotechniques 14:920-924; Iwabuchi et al. (1993) Oncogene 8:1693-1696; and Brent WO94/10300) to identify other proteins that bind to or interact with the variant protein and are involved in variant protein activity. Such variant protein-binding proteins are also likely to be involved in the propagation of signals by the variant proteins or variant protein targets as, for example, elements of a protein-mediated signaling pathway. Alternatively, such variant protein-binding proteins are inhibitors of the variant protein.

[0317] The two-hybrid system is based on the modular nature of most transcription factors, which typically consist of separable DNA-binding and activation domains. Briefly, the assay typically utilizes two different DNA constructs. In one construct, the gene that codes for a variant protein is fused to a gene encoding the DNA binding domain of a known transcription factor (e.g., GAL-4). In the other construct, a DNA sequence, from a library of DNA sequences, that encodes an unidentified protein (“prey” or “sample”) is fused to a gene that codes for the activation domain of the known transcription factor. If the “bait” and the “prey” proteins are able to interact, in vivo, forming a variant protein-dependent complex, the DNA-binding and activation domains of the transcription factor are brought into close proximity. This proximity allows transcription of a reporter gene (e.g., LacZ) that is operably linked to a transcriptional regulatory site responsive to the transcription factor. Expression of the reporter gene can be detected, and cell colonies containing the functional transcription factor can be isolated and used to obtain the cloned gene that encodes the protein that interacts with the variant protein.

[0318] Antibodies Directed to Variant Proteins

[0319] The present invention also provides antibodies that selectively bind to the variant enzyme proteins disclosed herein and fragments thereof. Such antibodies may be used to quantitatively or qualitatively detect the variant enzyme proteins of the present invention. As used herein, an antibody selectively binds a target variant protein when it binds the variant protein and does not significantly bind to non-variant proteins, i.e., the antibody does not significantly bind to normal, wild-type, or art-known proteins that do not contain a variant amino acid sequence due to one or more SNPs of the present invention (variant amino acid sequences may be due to, for example, nonsynonymous cSNPs, nonsense SNPs that create a stop codon, thereby causing a truncation of a polypeptide or SNPs that cause read-through mutations resulting in an extension of a polypeptide).

[0320] As used herein, an antibody is defined in terms consistent with that recognized in the art: they are multi-subunit proteins produced by an organism in response to an antigen challenge. The antibodies of the present invention include both monoclonal antibodies and polyclonal antibodies, as well as antigen-reactive proteolytic fragments of such antibodies, such as Fab, F(ab)′₂, and Fv fragments. In addition, an antibody of the present invention further includes any of a variety of engineered antigen-binding molecules such as a chimeric antibody (U.S. Pat. Nos. 4,816,567 and 4,816,397; Morrison et al., Proc. Natl. Acad. Sci. USA, 81:6851, 1984; Neuberger et al., Nature 312:604, 1984), a humanized antibody (U.S. Pat. Nos. 5,693,762; 5,585,089; and 5,565,332), a single-chain Fv (U.S. Pat. No. 4,946,778; Ward et al., Nature 334:544, 1989), a bispecific antibody with two binding specificities (Segal et al., J. Immunol. Methods 248:1, 2001; Carter, J. Immunol. Methods 248:7, 2001), a diabody, a triabody, and a tetrabody (Todorovska et al., J. Immunol. Methods, 248:47, 2001), as well as a Fab conjugate (dimer or trimer), and a minibody.

[0321] Many methods are known in the art for generating and/or identifying antibodies to a given target antigen (Harlow, Antibodies, Cold Spring Harbor Press, (1989)). In general, an isolated peptide (e.g., a variant protein of the present invention) is used as an immunogen and is administered to a mammalian organism, such as a rat, rabbit, hamster or mouse. Either a full-length protein, an antigenic peptide fragment (e.g., a peptide fragment containing a region that varies between a variant protein and a corresponding wild-type protein), or a fusion protein can be used. A protein used as an immunogen may be naturally-occurring, synthetic or recombinantly produced, and may be administered in combination with an adjuvant, including but not limited to, Freund's (complete and incomplete), mineral gels such as aluminum hydroxide, surface active substance such as lysolecithin, pluronic polyols, polyanions, peptides, oil emulsions, keyhole limpet hemocyanin, dinitrophenol, and the like.

[0322] Monoclonal antibodies can be produced by hybridoma technology (Kohler and Milstein, Nature, 256:495, 1975), which immortalizes cells secreting a specific monoclonal antibody. The immortalized cell lines can be created in vitro by fusing two different cell types, typically lymphocytes, and tumor cells. The hybridoma cells may be cultivated in vitro or in vivo. Additionally, fully human antibodies can be generated by transgenic animals (He et al., J. Immunol., 169:595, 2002). Fd phage and Fd phagemid technologies may be used to generate and select recombinant antibodies in vitro (Hoogenboom and Chames, Immunol. Today 21:371, 2000; Liu et al., J. Mol. Biol. 315:1063, 2002). The complementarity-determining regions of an antibody can be identified, and synthetic peptides corresponding to such regions may be used to mediate antigen binding (U.S. Pat. No. 5,637,677).

[0323] Antibodies are preferably prepared against regions or discrete fragments of a variant protein containing a variant amino acid sequence as compared to the corresponding wild-type protein (e.g., a region of a variant protein that includes an amino acid encoded by a nonsynonymous cSNP, a region affected by truncation caused by a nonsense SNP that creates a stop codon, or a region resulting from the destruction of a stop codon due to read-through mutation caused by a SNP). Furthermore, preferred regions will include those involved in function/activity and/or protein/binding partner interaction. Such fragments can be selected on a physical property, such as fragments corresponding to regions that are located on the surface of the protein, e.g., hydrophilic regions, or can be selected based on sequence uniqueness, or based on the position of the variant amino acid residue(s) encoded by the SNPs provided by the present invention. An antigenic fragment will typically comprise at least about 8-10 contiguous amino acid residues in which at least one of the amino acid residues is an amino acid affected by a SNP disclosed herein. The antigenic peptide can comprise, however, at least 12, 14, 16, 20, 25, 50, 100 (or any other number in-between) or more amino acid residues, provided that at least one amino acid is affected by a SNP disclosed herein.

[0324] Detection of an antibody of the present invention can be facilitated by coupling (i.e., physically linking) the antibody or an antigen-reactive fragment thereof to a detectable substance. Detectable substances include, but are not limited to, various enzymes, prosthetic groups, fluorescent materials, luminescent materials, bioluminescent materials, and radioactive materials. Examples of suitable enzymes include horseradish peroxidase, alkaline phosphatase, β-galactosidase, or acetylcholinesterase; examples of suitable prosthetic group complexes include streptavidin/biotin and avidin/biotin; examples of suitable fluorescent materials include umbelliferone, fluorescein, fluorescein isothiocyanate, rhodamine, dichlorotriazinylamine fluorescein, dansyl chloride or phycoerythrin; an example of a luminescent material includes luminol; examples of bioluminescent materials include luciferase, luciferin, and aequorin, and examples of suitable radioactive material include ¹²⁵I, ¹³¹I, ³⁵S or ³H.

[0325] Antibodies, particularly the use of antibodies as therapeutic agents, are reviewed in: Morgan, “Antibody therapy for Alzheimer's disease”, Expert Rev Vaccines. 2003 February; 2(1):53-9; Ross et al., “Anticancer antibodies”, Am J Clin Pathol. 2003 April; 119(4):472-85; Goldenberg, “Advancing role of radiolabeled antibodies in the therapy of cancer”, Cancer Immunol Immunother. 2003 May; 52(5):281-96. Epub 2003 Mar. 11; Ross et al., “Antibody-based therapeutics in oncology”, Expert Rev Anticancer Ther. 2003 February; 3(1):107-21; Cao et al., “Bispecific antibody conjugates in therapeutics”, Adv Drug Deliv Rev. 2003 Feb. 10; 55(2):171-97; von Mehren et al., “Monoclonal antibody therapy for cancer”, Annu Rev Med. 2003; 54:343-69. Epub 2001 Dec. 3; Hudson et al., “Engineered antibodies”, Nat Med. 2003 January; 9(1):129-34; Brekke et al., “Therapeutic antibodies for human diseases at the dawn of the twenty-first century”, Nat Rev Drug Discov. 2003 January; 2(1):52-62 (Erratum in: Nat Rev Drug Discov. 2003 March; 2(3):240); Houdebine, “Antibody manufacture in transgenic animals and comparisons with other systems”, Curr Opin Biotechnol. 2002 December; 13(6):625-9; Andreakos et al., “Monoclonal antibodies in immune and inflammatory diseases”, Curr Opin Biotechnol. 2002 December; 13(6):615-20; Kellermann et al., “Antibody discovery: the use of transgenic mice to generate human monoclonal antibodies for therapeutics”, Curr Opin Biotechnol. 2002 December; 13(6):593-7; Pini et al., “Phage display and colony filter screening for high-throughput selection of antibody libraries”, Comb Chem High Throughput Screen. 2002 November; 5(7):503-10; Batra et al., “Pharmacokinetics and biodistribution of genetically engineered antibodies”, Curr Opin Biotechnol. 2002 December; 13(6):603-8; and Tangri et al., “Rationally engineered proteins or antibodies with absent or reduced immunogenicity”, Curr Med. Chem. 2002 December; 9(24):2191-9.

[0326] Uses of Antibodies

[0327] Antibodies can be used to isolate the variant enzyme proteins of the present invention from a natural cell source or from recombinant host cells by standard techniques, such as affinity chromatography or immunoprecipitation. In addition, antibodies are useful for detecting the presence of a variant enzyme protein of the present invention in cells or tissues to determine the pattern of expression of the variant enzyme protein among various tissues in an organism and over the course of normal development or disease progression. Further, antibodies can be used to detect variant enzyme protein in situ, in vitro, in a bodily fluid, or in a cell lysate or supernatant in order to evaluate the amount and pattern of expression. Also, antibodies can be used to assess abnormal tissue distribution, abnormal expression during development, or expression in an abnormal condition, such as in a enzyme-mediated disorder. Additionally, antibody detection of circulating fragments of the full-length variant protein can be used to identify turnover.

[0328] Antibodies to the variant enzyme proteins of the present invention are also useful in pharmacogenomic analysis. Thus, antibodies against variant enzyme proteins encoded by alternative SNP alleles can be used to identify individuals that require modified treatment modalities.

[0329] Further, antibodies can be used to assess expression of the variant enzyme protein in disease states such as in active stages of the disease or in an individual with a predisposition to a disease related to the protein's function. Antibodies specific for a variant enzyme protein encoded by a SNP-containing nucleic acid molecule of the present invention can be used to assay for the presence of the variant enzyme protein, such as to screen for predisposition to a enzyme-mediated disorder as indicated by the presence of the variant enzyme protein.

[0330] Antibodies are also useful as diagnostic tools for evaluating the variant enzyme proteins in conjunction with analysis by electrophoretic mobility, isoelectric point, tryptic peptide digest, and other physical assays well known in the art.

[0331] Antibodies are also useful for tissue typing. Thus, where a specific variant enzyme protein has been correlated with expression in a specific tissue, antibodies that are specific for this protein can be used to identify a tissue type.

[0332] Antibodies can also be used to assess aberrant subcellular localization of a variant enzyme protein in cells in various tissues. The diagnostic uses can be applied, not only in genetic testing, but also in monitoring a treatment modality. Accordingly, where treatment is ultimately aimed at correcting the expression level or the presence of variant protein or aberrant tissue distribution or developmental expression of a variant protein, antibodies directed against the variant protein or relevant fragments can be used to monitor therapeutic efficacy.

[0333] The antibodies are also useful for inhibiting variant protein function, for example, by blocking the binding of a variant protein to a binding partner or inhibiting enzymatic activity of the variant protein. These uses can also be applied in a therapeutic context in which treatment involves inhibiting a variant protein's function. An antibody can be used, for example, to block binding, thus modulating (agonizing or antagonizing) the activity of a variant protein. Antibodies can be prepared against specific variant protein fragments containing sites required for function or against an intact variant protein that is associated with a cell or cell membrane. For in vivo administration, an antibody may be linked with an additional therapeutic payload such as a radionuclide, an enzyme, an immunogenic epitope, or a cytotoxic agent. Suitable cytotoxic agents include, but are not limited to, bacterial toxin such as diphtheria, and plant toxin such as ricin. The in vivo half-life of an antibody or a fragment thereof may be lengthened by pegylation through conjugation to polyethylene glycol (Leong et al., Cytokine 16:106, 2001).

[0334] The invention also encompasses kits for using antibodies, such as kits for detecting the presence of a variant enzyme protein in a test sample. An exemplary kit can comprise antibodies such as a labeled or labelable antibody and a compound or agent for detecting variant proteins in a biological sample; means for determining the amount, or presence/absence of variant protein in the sample; means for comparing the amount of variant protein in the sample with a standard; and instructions for use.

[0335] Vectors and Host Cells

[0336] The present invention also provides vectors containing the SNP-containing nucleic acid molecules described herein. The term “vector” refers to a vehicle, preferably a nucleic acid molecule, which can transport a SNP-containing nucleic acid molecule. When the vector is a nucleic acid molecule, the SNP-containing nucleic acid molecule can be covalently linked to the vector nucleic acid. Such vectors include, but are not limited to, a plasmid, single or double stranded phage, a single or double stranded RNA or DNA viral vector, or artificial chromosome, such as a BAC, PAC, YAC, or MAC.

[0337] A vector can be maintained in a host cell as an extrachromosomal element where it replicates and produces additional copies of the SNP-containing nucleic acid molecules. Alternatively, the vector may integrate into the host cell genome and produce additional copies of the SNP-containing nucleic acid molecules when the host cell replicates.

[0338] The invention provides vectors for the maintenance (cloning vectors) or vectors for expression (expression vectors) of the SNP-containing nucleic acid molecules. The vectors can function in prokaryotic or eukaryotic cells or in both (shuttle vectors).

[0339] Expression vectors typically contain cis-acting regulatory regions that are operably linked in the vector to the SNP-containing nucleic acid molecules such that transcription of the SNP-containing nucleic acid molecules is allowed in a host cell. The SNP-containing nucleic acid molecules can also be introduced into the host cell with a separate nucleic acid molecule capable of affecting transcription. Thus, the second nucleic acid molecule may provide a trans-acting factor interacting with the cis-regulatory control region to allow transcription of the SNP-containing nucleic acid molecules from the vector. Alternatively, a trans-acting factor may be supplied by the host cell. Finally, a trans-acting factor can be produced from the vector itself. It is understood, however, that in some embodiments, transcription and/or translation of the nucleic acid molecules can occur in a cell-free system.

[0340] The regulatory sequences to which the SNP-containing nucleic acid molecules described herein can be operably linked include promoters for directing mRNA transcription. These include, but are not limited to, the left promoter from bacteriophage λ, the lac, TRP, and TAC promoters from E. coli, the early and late promoters from SV40, the CMV immediate early promoter, the adenovirus early and late promoters, and retrovirus long-terminal repeats.

[0341] In addition to control regions that promote transcription, expression vectors may also include regions that modulate transcription, such as repressor binding sites and enhancers. Examples include the SV40 enhancer, the cytomegalovirus immediate early enhancer, polyoma enhancer, adenovirus enhancers, and retrovirus LTR enhancers.

[0342] In addition to containing sites for transcription initiation and control, expression vectors can also contain sequences necessary for transcription termination and, in the transcribed region, a ribosome-binding site for translation. Other regulatory control elements for expression include initiation and termination codons as well as polyadenylation signals. A person of ordinary skill in the art would be aware of the numerous regulatory sequences that are useful in expression vectors (see, e.g., Sambrook and Russell, 2000, Molecular Cloning: A Laboratory Manual, Cold Spring Harbor Laboratory Press, Cold Spring Harbor, N.Y.).

[0343] A variety of expression vectors can be used to express a SNP-containing nucleic acid molecule. Such vectors include chromosomal, episomal, and virus-derived vectors, for example, vectors derived from bacterial plasmids, from bacteriophage, from yeast episomes, from yeast chromosomal elements, including yeast artificial chromosomes, from viruses such as baculoviruses, papovaviruses such as SV40, Vaccinia viruses, adenoviruses, poxviruses, pseudorabies viruses, and retroviruses. Vectors can also be derived from combinations of these sources such as those derived from plasmid and bacteriophage genetic elements, e.g., cosmids and phagemids. Appropriate cloning and expression vectors for prokaryotic and eukaryotic hosts are described in Sambrook and Russell, 2000, Molecular Cloning: A Laboratory Manual, Cold Spring Harbor Laboratory Press, Cold Spring Harbor, N.Y.

[0344] The regulatory sequence in a vector may provide constitutive expression in one or more host cells (e.g., tissue specific expression) or may provide for inducible expression in one or more cell types such as by temperature, nutrient additive, or exogenous factor, e.g., a hormone or other ligand. A variety of vectors that provide constitutive or inducible expression of a nucleic acid sequence in prokaryotic and eukaryotic host cells are well known to those of ordinary skill in the art.

[0345] A SNP-containing nucleic acid molecule can be inserted into the vector by methodology well-known in the art. Generally, the SNP-containing nucleic acid molecule that will ultimately be expressed is joined to an expression vector by cleaving the SNP-containing nucleic acid molecule and the expression vector with one or more restriction enzymes and then ligating the fragments together. Procedures for restriction enzyme digestion and ligation are well known to those of ordinary skill in the art.

[0346] The vector containing the appropriate nucleic acid molecule can be introduced into an appropriate host cell for propagation or expression using well-known techniques. Bacterial host cells include, but are not limited to, E. coli, Streptomyces, and Salmonella typhimurium. Eukaryotic host cells include, but are not limited to, yeast, insect cells such as Drosophila, animal cells such as COS and CHO cells, and plant cells.

[0347] As described herein, it may be desirable to express the variant peptide as a fusion protein. Accordingly, the invention provides fusion vectors that allow for the production of the variant peptides. Fusion vectors can, for example, increase the expression of a recombinant protein, increase the solubility of the recombinant protein, and aid in the purification of the protein by acting, for example, as a ligand for affinity purification. A proteolytic cleavage site may be introduced at the junction of the fusion moiety so that the desired variant peptide can ultimately be separated from the fusion moiety. Proteolytic enzymes suitable for such use include, but are not limited to, factor Xa, thrombin, and enterokinase. Typical fusion expression vectors include pGEX (Smith et al., Gene 67:31-40 (1988)), pMAL (New England Biolabs, Beverly, Mass.) and pRIT5 (Pharmacia, Piscataway, N.J.) which fuse glutathione S-transferase (GST), maltose E binding protein, or protein A, respectively, to the target recombinant protein. Examples of suitable inducible non-fusion E. coli expression vectors include pTrc (Amann et al., Gene 69:301-315 (1988)) and pET id (Studier et al., Gene Expression Technology: Methods in Enzymology 185:60-89 (1990)).

[0348] Recombinant protein expression can be maximized in a bacterial host by providing a genetic background wherein the host cell has an impaired capacity to proteolytically cleave the recombinant protein (Gottesman, S., Gene Expression Technology: Methods in Enzymology 185, Academic Press, San Diego, Calif. (1990) 119-128). Alternatively, the sequence of the SNP-containing nucleic acid molecule of interest can be altered to provide preferential codon usage for a specific host cell, for example, E. coli (Wada et al., Nucleic Acids Res. 20:2111-2118 (1992)).

[0349] The SNP-containing nucleic acid molecules can also be expressed by expression vectors that are operative in yeast. Examples of vectors for expression in yeast (e.g., S. cerevisiae) include pYepSec1 (Baldari, et al., EMBO J. 6:229-234 (1987)), pMFa (Kurjan et al., Cell 30:933-943 (1982)), pJRY88 (Schultz et al., Gene 54:113-123 (1987)), and pYES2 (Invitrogen Corporation, San Diego, Calif.).

[0350] The SNP-containing nucleic acid molecules can also be expressed in insect cells using, for example, baculovirus expression vectors. Baculovirus vectors available for expression of proteins in cultured insect cells (e.g., Sf 9 cells) include the pAc series (Smith et al., Mol. Cell Biol. 3:2156-2165 (1983)) and the pVL series (Lucklow et al., Virology 170:31-39 (1989)).

[0351] In certain embodiments of the invention, the SNP-containing nucleic acid molecules described herein are expressed in mammalian cells using mammalian expression vectors. Examples of mammalian expression vectors include pCDM8 (Seed, B. Nature 329:840 (1987)) and pMT2PC (Kaufman et al., EMBO J. 6:187-195 (1987)).

[0352] The invention also encompasses vectors in which the SNP-containing nucleic acid molecules described herein are cloned into the vector in reverse orientation, but operably linked to a regulatory sequence that permits transcription of antisense RNA. Thus, an antisense transcript can be produced to the SNP-containing nucleic acid sequences described herein, including both coding and non-coding regions. Expression of this antisense RNA is subject to each of the parameters described above in relation to expression of the sense RNA (regulatory sequences, constitutive or inducible expression, tissue-specific expression).

[0353] The invention also relates to recombinant host cells containing the vectors described herein. Host cells therefore include, for example, prokaryotic cells, lower eukaryotic cells such as yeast, other eukaryotic cells such as insect cells, and higher eukaryotic cells such as mammalian cells.

[0354] The recombinant host cells can be prepared by introducing the vector constructs described herein into the cells by techniques readily available to persons of ordinary skill in the art. These include, but are not limited to, calcium phosphate transfection, DEAE-dextran-mediated transfection, cationic lipid-mediated transfection, electroporation, transduction, infection, lipofection, and other techniques such as those described in Sambrook and Russell, 2000, Molecular Cloning: A Laboratory Manual, Cold Spring Harbor Laboratory, Cold Spring Harbor Laboratory Press, Cold Spring Harbor, N.Y.).

[0355] Host cells can contain more than one vector. Thus, different SNP-containing nucleotide sequences can be introduced in different vectors into the same cell. Similarly, the SNP-containing nucleic acid molecules can be introduced either alone or with other nucleic acid molecules that are not related to the SNP-containing nucleic acid molecules, such as those providing trans-acting factors for expression vectors. When more than one vector is introduced into a cell, the vectors can be introduced independently, co-introduced, or joined to the nucleic acid molecule vector.

[0356] In the case of bacteriophage and viral vectors, these can be introduced into cells as packaged or encapsulated virus by standard procedures for infection and transduction. Viral vectors can be replication-competent or replication-defective. In the case in which viral replication is defective, replication can occur in host cells that provide functions that complement the defects.

[0357] Vectors generally include selectable markers that enable the selection of the subpopulation of cells that contain the recombinant vector constructs. The marker can be inserted in the same vector that contains the SNP-containing nucleic acid molecules described herein or may be in a separate vector. Markers include, for example, tetracycline or ampicillin-resistance genes for prokaryotic host cells, and dihydrofolate reductase or neomycin resistance genes for eukaryotic host cells. However, any marker that provides selection for a phenotypic trait can be effective.

[0358] While the mature variant enzyme proteins can be produced in bacteria, yeast, mammalian cells, and other cells under the control of the appropriate regulatory sequences, cell-free transcription and translation systems can also be used to produce these variant proteins using RNA derived from the DNA constructs described herein.

[0359] Where secretion of the variant protein is desired, which is difficult to achieve with multi-transmembrane domain containing proteins such as enzymes, appropriate secretion signals can be incorporated into the vector. The signal sequence can be endogenous to the peptides or heterologous to these peptides.

[0360] Where the variant protein is not secreted into the medium, the protein can be isolated from the host cell by standard disruption procedures, including freeze/thaw, sonication, mechanical disruption, use of lysing agents, and the like. The variant protein can then be recovered and purified by well-known purification methods including, for example, ammonium sulfate precipitation, acid extraction, anion or cationic exchange chromatography, phosphocellulose chromatography, hydrophobic-interaction chromatography, affinity chromatography, hydroxylapatite chromatography, lectin chromatography, or high performance liquid chromatography.

[0361] It is also understood that, depending upon the host cell in which recombinant production of the variant proteins described herein occurs, they can have various glycosylation patterns, or may be non-glycosylated, as when produced in bacteria. In addition, the variant proteins may include an initial modified methionine in some cases as a result of a host-mediated process.

[0362] For further information regarding vectors and host cells, see Current Protocols in Molecular Biology, John Wiley & Sons, N.Y.

[0363] Uses of Vectors and Host Cells, and Transgenic Animals

[0364] Recombinant host cells that express the variant enzyme proteins described herein have a variety of uses. For example, the cells are useful for producing a variant enzyme protein that can be further purified into a preparation of desired amounts of the variant enzyme protein or fragments thereof. Thus, host cells containing expression vectors are useful for variant protein production.

[0365] Host cells are also useful for conducting cell-based assays involving the variant enzyme protein or variant enzyme protein fragments, such as those described above as well as other formats known in the art. Thus, a recombinant host cell expressing a variant protein is useful for assaying compounds that stimulate or inhibit variant protein function. Such an ability of a compound to modulate variant protein function may not be apparent from assays of the compound on the native/wild-type protein, or from cell-free assays of the compound. Recombinant host cells are also useful for assaying functional alterations in the variant proteins as compared with a known function.

[0366] Genetically-engineered host cells can be further used to produce non-human transgenic animals. A transgenic animal is preferably a non-human mammal, for example, a rodent, such as a rat or mouse, in which one or more of the cells of the animal include a transgene. A transgene is exogenous DNA containing a SNP of the present invention which is integrated into the genome of a cell from which a transgenic animal develops and which remains in the genome of the mature animal in one or more of its cell types or tissues. Such animals are useful for studying the function of a variant protein in vivo, and identifying and evaluating modulators of variant protein activity. Other examples of transgenic animals include, but are not limited to, non-human primates, sheep, dogs, cows, goats, chickens, and amphibians. Transgenic non-human mammals such as cows and goats can be used to produce variant proteins which can be secreted in the animal's milk and then recovered.

[0367] A transgenic animal can be produced by introducing a SNP-containing nucleic acid molecule into the male pronuclei of a fertilized oocyte, e.g., by microinjection or retroviral infection, and allowing the oocyte to develop in a pseudopregnant female foster animal. Any nucleic acid molecules that contain one or more SNPs of the present invention can potentially be introduced as a transgene into the genome of a non-human animal.

[0368] Any of the regulatory or other sequences useful in expression vectors can form part of the transgenic sequence. This includes intronic sequences and polyadenylation signals, if not already included. A tissue-specific regulatory sequence(s) can be operably linked to the transgene to direct expression of the variant protein in particular cells or tissues. Methods for generating transgenic animals via embryo manipulation and microinjection, particularly animals such as mice, have become conventional in the art and are described in, for example, U.S. Pat. Nos. 4,736,866 and 4,870,009, both by Leder et al., U.S. Pat. No. 4,873,191 by Wagner et al., and in Hogan, B., Manipulating the Mouse Embryo, (Cold Spring Harbor Laboratory Press, Cold Spring Harbor, N.Y., 1986). Similar methods are used for production of other transgenic animals. A transgenic founder animal can be identified based upon the presence of the transgene in its genome and/or expression of transgenic mRNA in tissues or cells of the animals. A transgenic founder animal can then be used to breed additional animals carrying the transgene. Moreover, transgenic animals carrying a transgene can further be bred to other transgenic animals carrying other transgenes. A transgenic animal also includes a non-human animal in which the entire animal or tissues in the animal have been produced using the homologously recombinant host cells described herein.

[0369] In another embodiment, transgenic non-human animals can be produced which contain selected systems that allow for regulated expression of the transgene. One example of such a system is the cre/loxP recombinase system of bacteriophage P1 (Lakso et al. PNAS 89:6232-6236 (1992)). Another example of a recombinase system is the FLP recombinase system of S. cerevisiae (O'Gorman et al. Science 251:1351-1355 (1991)). If a cre/loxP recombinase system is used to regulate expression of the transgene, animals containing transgenes encoding both the Cre recombinase and a selected protein are generally needed. Such animals can be provided through the construction of “double” transgenic animals, e.g., by mating two transgenic animals, one containing a transgene encoding a selected variant protein and the other containing a transgene encoding a recombinase.

[0370] Clones of the non-human transgenic animals described herein can also be produced according to the methods described in, for example, Wilmut, I. et al. Nature 385:810-813 (1997) and PCT International Publication Nos. WO 97/07668 and WO 97/07669. In brief, a cell (e.g., a somatic cell) from the transgenic animal can be isolated and induced to exit the growth cycle and enter Go phase. The quiescent cell can then be fused, e.g., through the use of electrical pulses, to an enucleated oocyte from an animal of the same species from which the quiescent cell is isolated. The reconstructed oocyte is then cultured such that it develops to morula or blastocyst and then transferred to pseudopregnant female foster animal. The offspring born of this female foster animal will be a clone of the animal from which the cell (e.g., a somatic cell) is isolated.

[0371] Transgenic animals containing recombinant cells that express the variant enzyme proteins described herein are useful for conducting the assays described herein in an in vivo context. Accordingly, the various physiological factors that are present in vivo and that could influence substrate or ligand binding, variant protein activation, signal transduction, enzymatic activity, or other processes or interactions, may not be evident from in vitro cell-free or cell-based assays. Thus, non-human transgenic animals of the present invention may be used to assay in vivo variant protein function as well as the activities of a therapeutic agent or compound that modulates variant protein function/activity or expression. Such animals are also suitable for assessing the effects of null mutations (i.e., mutations that substantially or completely eliminate one or more variant protein functions).

[0372] For further information regarding transgenic animals, see Houdebine, “Antibody manufacture in transgenic animals and comparisons with other systems”, Curr Opin Biotechnol. 2002 December; 13(6):625-9; Petters et al., “Transgenic animals as models for human disease”, Transgenic Res. 2000; 9(4-5):347-51; discussion 345-6; Wolf et al., “Use of transgenic animals in understanding molecular mechanisms of toxicity”, J Pharm Pharmacol. 1998 June; 50(6):567-74; Echelard, “Recombinant protein production in transgenic animals”, Curr Opin Biotechnol. 1996 October; 7(5):536-40; Houdebine, “Transgenic animal bioreactors”, Transgenic Res. 2000; 9(4-5):305-20; Pirity et al., “Embryonic stem cells, creating transgenic animals”, Methods Cell Biol. 1998; 57:279-93; and Robl et al., “Artificial chromosome vectors and expression of complex proteins in transgenic animals”, Theriogenology. 2003 Jan. 1; 59(1):107-13.

[0373] Computer-Related Embodiments

[0374] The SNPs provided in the present invention may be “provided” in a variety of mediums to facilitate use thereof. As used in this section, “provided” refers to a manufacture, other than an isolated nucleic acid molecule, that contains SNP information of the present invention. Such a manufacture provides the SNP information in a form that allows a skilled artisan to examine the manufacture using means not directly applicable to examining the SNPs or a subset thereof as they exist in nature or in purified form. The SNP information that may be provided in such a form includes any of the SNP information provided by the present invention such as, for example, polymorphic nucleic acid and/or amino acid sequence information such as SEQ ID NOS:1-7498, SEQ ID NOS:7499-14,996, SEQ ID NOS:93,193-98,281, SEQ ID NOS:14,997-93,192, and SEQ ID NOS:98,282-558,824; information about observed SNP alleles, alternative codons, populations, allele frequencies, SNP types, and/or affected proteins; or any other information provided by the present invention in Tables 1-2 and/or the Sequence Listing.

[0375] In one application of this embodiment, the SNPs of the present invention can be recorded on a computer readable medium. As used herein, “computer readable medium” refers to any medium that can be read and accessed directly by a computer. Such media include, but are not limited to: magnetic storage media, such as floppy discs, hard disc storage medium, and magnetic tape; optical storage media such as CD-ROM; electrical storage media such as RAM and ROM; and hybrids of these categories such as magnetic/optical storage media. A skilled artisan can readily appreciate how any of the presently known computer readable media can be used to create a manufacture comprising computer readable medium having recorded thereon a nucleotide sequence of the present invention. One such medium is provided with the present application, namely, the present application contains computer readable medium (CD-R) that has nucleic acid sequences (and encoded protein sequences) containing SNPs provided/recorded thereon in ASCII text format in a Sequence Listing along with accompanying Tables that contain detailed SNP and sequence information (transcript sequences are provided as SEQ ID NOS:1-7498, protein sequences are provided as SEQ ID NOS:7499-14,996, genomic sequences are provided as SEQ ID NOS:93,193-98,281, transcript-based context sequences are provided as SEQ ID NOS:14,997-93,192, and genomic-based context sequences are provided as SEQ ID NOS:98,282-558,824).

[0376] As used herein, “recorded” refers to a process for storing information on computer readable medium. A skilled artisan can readily adopt any of the presently known methods for recording information on computer readable medium to generate manufactures comprising the SNP information of the present invention.

[0377] A variety of data storage structures are available to a skilled artisan for creating a computer readable medium having recorded thereon a nucleotide or amino acid sequence of the present invention. The choice of the data storage structure will generally be based on the means chosen to access the stored information. In addition, a variety of data processor programs and formats can be used to store the nucleotide/amino acid sequence information of the present invention on computer readable medium. For example, the sequence information can be represented in a word processing text file, formatted in commercially-available software such as WordPerfect and Microsoft Word, represented in the form of an ASCII file, or stored in a database application, such as OB2, Sybase, Oracle, or the like. A skilled artisan can readily adapt any number of data processor structuring formats (e.g., text file or database) in order to obtain computer readable medium having recorded thereon the SNP information of the present invention.

[0378] By providing the SNPs of the present invention in computer readable form, a skilled artisan can routinely access the SNP information for a variety of purposes. Computer software is publicly available which allows a skilled artisan to access sequence information provided in a computer readable medium. Examples of publicly available computer software include BLAST (Altschul et al, J. Mol. Biol. 215:403-410 (1990)) and BLAZE (Brutlag et al, Comp. Chem. 17:203-207 (1993)) search algorithms.

[0379] The present invention further provides systems, particularly computer-based systems, which contain the SNP information described herein. Such systems may be designed to store and/or analyze information on, for example, a large number of SNP positions, or information on SNP genotypes from a large number of individuals. The SNP information of the present invention represents a valuable information source. The SNP information of the present invention stored/analyzed in a computer-based system may be used for such computer-intensive applications as determining or analyzing SNP allele frequencies in a population, mapping disease genes, genotype-phenotype association studies, grouping SNPs into haplotypes, correlating SNP haplotypes with response to particular drugs, or for various other bioinformatic, pharmacogenomic, drug development, or human identification/forensic applications.

[0380] As used herein, “a computer-based system” refers to the hardware means, software means, and data storage means used to analyze the SNP information of the present invention. The minimum hardware means of the computer-based systems of the present invention typically comprises a central processing unit (CPU), input means, output means, and data storage means. A skilled artisan can readily appreciate that any one of the currently available computer-based systems are suitable for use in the present invention. Such a system can be changed into a system of the present invention by utilizing the SNP information provided on the CD-R, or a subset thereof, without any experimentation.

[0381] As stated above, the computer-based systems of the present invention comprise a data storage means having stored therein SNPs of the present invention and the necessary hardware means and software means for supporting and implementing a search means. As used herein, “data storage means” refers to memory which can store SNP information of the present invention, or a memory access means which can access manufactures having recorded thereon the SNP information of the present invention.

[0382] As used herein, “search means” refers to one or more programs or algorithms that are implemented on the computer-based system to identify or analyze SNPs in a target sequence based on the SNP information stored within the data storage means. Search means can be used to determine which nucleotide is present at a particular SNP position in the target sequence. As used herein, a “target sequence” can be any DNA sequence containing the SNP position(s) to be searched or queried.

[0383] As used herein, “a target structural motif,” or “target motif,” refers to any rationally selected sequence or combination of sequences containing a SNP position in which the sequence(s) is chosen based on a three-dimensional configuration that is formed upon the folding of the target motif. There are a variety of target motifs known in the art. Protein target motifs include, but are not limited to, enzymatic active sites and signal sequences. Nucleic acid target motifs include, but are not limited to, promoter sequences, hairpin structures, and inducible expression elements (protein binding sequences).

[0384] A variety of structural formats for the input and output means can be used to input and output the information in the computer-based systems of the present invention. An exemplary format for an output means is a display that depicts the presence or absence of specified nucleotides (alleles) at particular SNP positions of interest. Such presentation can provide a rapid, binary scoring system for many SNPs simultaneously.

[0385] One exemplary embodiment of a computer-based system comprising SNP information of the present invention is provided in FIG. 1. FIG. 1 provides a block diagram of a computer system 102 that can be used to implement the present invention. The computer system 102 includes a processor 106 connected to a bus 104. Also connected to the bus 104 are a main memory 108 (preferably implemented as random access memory, RAM) and a variety of secondary storage devices 110, such as a hard drive 112 and a removable medium storage device 114. The removable medium storage device 114 may represent, for example, a floppy disk drive, a CD-ROM drive, a magnetic tape drive, etc. A removable storage medium 116 (such as a floppy disk, a compact disk, a magnetic tape, etc.) containing control logic and/or data recorded therein may be inserted into the removable medium storage device 114. The computer system 102 includes appropriate software for reading the control logic and/or the data from the removable storage medium 116 once inserted in the removable medium storage device 114.

[0386] The SNP information of the present invention may be stored in a well-known manner in the main memory 108, any of the secondary storage devices 110, and/or a removable storage medium 116. Software for accessing and processing the SNP information (such as SNP scoring tools, search tools, comparing tools, etc.) preferably resides in main memory 108 during execution.

[0387] All publications and patents cited in this specification are herein incorporated by reference in their entirety. Various modifications and variations of the described compositions, methods and systems of the invention will be apparent to those skilled in the art without departing from the scope and spirit of the invention. Although the invention has been described in connection with specific preferred embodiments and certain working examples, it should be understood that the invention as claimed should not be unduly limited to such specific embodiments. Indeed, various modifications of the above-described modes for carrying out the invention that are obvious to those skilled in the field of molecular biology, genetics and related fields are intended to be within the scope of the following claims.

What is claimed is:

1. A method for identifying an individual who has an altered risk for developing a disorder, comprising detecting a single nucleotide polymorphism (SNP) in any one of the nucleotide sequences of SEQ D NOS:1-7498 and 14,997-558,824 in said individual's nucleic acid, wherein the presence of the SNP is correlated with an altered risk for developing the disorder.

2. The method of claim 1 in which the detecting is carried out by a process selected from the group consisting of: allele-specific probe hybridization, allele-specific primer extension, allele-specific amplification, sequencing, 5′ nuclease digestion, molecular beacon assay, oligonucleotide ligation assay, size analysis, and single-stranded conformation polymorphism analysis.

3. An isolated nucleic acid molecule comprising at least 8 contiguous nucleotides wherein one of the nucleotides is a single nucleotide polymorphism (SNP) selected from any one of the nucleotide sequences of SEQ ID NOS:1-7498 and 14,997-558,824, or a complement thereof.

4. The isolated nucleic acid molecule of claim 3, wherein the SNP is selected from the group consisting of the SNPs set forth in Tables 3 and 4.

5. An isolated nucleic acid molecule comprising a nucleotide sequence that encodes a polypeptide comprising an amino acid sequence selected from the group consisting of SEQ ID NOS:7499-14,996.

6. An isolated polypeptide comprising an amino acid sequence selected from the group consisting of SEQ ID NOS:7499-14,996.

7. An antibody that specifically binds to a polypeptide of claim 6, or an antigen-binding fragment thereof.

8. The antibody of claim 7 in which the antibody is a monoclonal antibody.

9. An amplified polynucleotide containing a single nucleotide polymorphism (SNP) selected from any one of the nucleotide sequences of SEQ ID NOS:1-7498 and 14,997-558,824, or a complement thereof, wherein the amplified polynucleotide is between 16 and 1,000 nucleotides in length.

10. The amplified polynucleotide of claim 9 in which the nucleotide sequence comprises any one of the nucleotide sequences of SEQ ID NOS:1-7498 and 14,997-558,824.

11. An isolated polynucleotide which specifically hybridizes to a nucleic acid molecule containing a single nucleotide polymorphism (SNP) in any one of the nucleotide sequences of SEQ ID NOS:1-7498 and 14,997-558,824.

12. The polynucleotide of claim 11 which is 8-70 nucleotides in length.

13. The polynucleotide of claim 11 which is an allele-specific probe.

14. The polynucleotide of claim 11 which is an allele-specific primer.

15. A kit for detecting a single nucleotide polymorphism (SNP) in a nucleic acid, wherein the kit comprises the polynucleotide of claim 11, a buffer, and an enzyme.

16. A method of detecting a single nucleotide polymorphism (SNP) in a nucleic acid molecule, comprising contacting a test sample with a reagent which specifically hybridizes to a SNP in any one of the nucleotide sequences of SEQ ID NOS:1-7498 and 14,997-558,824 under stringent hybridization conditions, and detecting the formation of a hybridized duplex.

17. The method of claim 16 in which the detecting is carried out by a process selected from the group consisting of: allele-specific probe hybridization, allele-specific primer extension, allele-specific amplification, sequencing, 5′ nuclease digestion, molecular beacon assay, oligonucleotide ligation assay, size analysis, and single-stranded conformation polymorphism analysis.

18. A method of detecting a variant polypeptide in a sample, the method comprising contacting a reagent with a variant polypeptide encoded by a single nucleotide polymorphism (SNP) in any one of the nucleotide sequences of SEQ ID NOS:1-7498 and 14,997-558,824, and detecting the binding of the reagent to the polypeptide.

19. A method for identifying an agent useful in therapeutically or prophylactically treating a disorder, the method comprising contacting the polypeptide of claim 6 with a candidate agent under conditions suitable to allow formation of a binding complex between the polypeptide and the candidate agent, and detecting the formation of the binding complex, wherein the presence of the complex identifies said agent.

20. An isolated nucleic acid molecule comprising a nucleotide sequence selected from the group consisting of:
(a) a nucleotide sequence that encodes a polypeptide comprising any one of the amino acid sequences of SEQ ID NOS:7499-14,996;
(b) any one of the transcript sequences of SEQ ID NOS:1-7498;
(c) any one of the genomic sequences of SEQ ID NOS:93,193-98,281; and
(d) a sequence that is completely complementary to any one of (a), (b), or (c).

The application's sequence listing, which the Patent Office published only in electronic form, follows.

SEQUENCE LISTING (558824 sequences)

SEQ ID NO: 1 - DNA, 5687 bp, Homo sapiens
agcgcgcgccgcggtcagctgactgctgggctggcacgtgacttgttctgtgttcgcttgggtagaggaagccgtgaggccggagcttaggtcgggaagggatggatcgctgagccgatagcgtccgctaggctgtctgcctcggtacctgttactgctgctacttcctcgtttgacaccttcctggaatctctcttgatttttgaggaaatacctagtaacaaacatgactgagttctggcttatatctgctcctggggagaaaacctgtcagcaaacatgggagaaattgcatgcggcaacttcaaagaacaataatcttgctgtcacttccaagttcaatattcctgacttaaaggttggcacgttggatgtcttggttggcttgtcagaygaactggctaaactggatgcatttgtagaaggagtggttaagaaagtagctcaatacatggctgatgtattggaagatagcaaagacaaagttcaagagaatctgttggctaatggagtggacttggttacttatataacaaggttccagtgggacatggccaaatatccaatcaagcagtccctgaaaaatatttctgaaataattgccaagggagtaactcagattgataatgacctgaaatctcgagcatctgcmtacaataacctgaaaggaaatcttcagaatttggaacgaaagaatgcaggaagtttgctaactagaagtctagcagaaattgtgaagaaggatgactttgttcttgattcagagtatctcgtcacattactggtagtagttcccaagttaaaccacaacgactggattaagcagtatgaaacactagccgaaatggtagttccaaggtctagcaatgttctttcagaggaccaagacagttacctgtgtaatgtcaccttgtttaggaaggcagttgatgacttcagacacaaagccagagaaaacaaattcattgttcgtgacttccagtataatgaagaggagatgaaagcagataaagaagaaatgaacaggctttctactgataaraaaaaacaatttggaccacttgtacggtggctgaaagtgaattttagtgaagcatttattgcatggattcacgtgaaagcattacgggttttcgttgagtctgttttaaggtatggcttgccagtgaacttccaagcaatgctacttcagcccaataagaaaactttgaagaaactgagagaagtattacatgaattgtataaacatctagacagcagtgcagcagctattattgatgctcctatggatattccaggtttaaacctgagtcaacaagaatactacccctatgtgtactacaagattgattgcaacttgctggaattcaagtgaaaatgggctcctcccccgacaatcctgtccttgtgtttgtgtgtgctaacagaartaagttgcagtatggtcgtacttttaactctagtatcctttgcttgcttcttacsccctttcctaggtgaattctcccacagtggtctgtatctcaacattttctttttaaaggaaaaaawatatatatatagtttctttttattgatcaggtctgtaaatgtgtactaaaaaaatcagagtttatttataaacaraatagtttatttaaagagaaggtctcttccttattgatatcatggtatgcattaattccatttgttactattgtgcayaaaagccctgttcacaggggaatggtgtaaacatttatactgttttgttcactgtatttagtagacataactgttgaatagttactgaatcatgatgtaaagaatatgtgaccatcttcaggtatgggatttctgaacgtttcaaatttcaatcaatgagcactgtcaacacccacaggagagaataaaattacctgtgcaaaggtgtattgtggtgtgtgtaacttaagattacagttctgtttgagagttaaatgatgtcatagctcacttgctatgctgcttccaggattttgttatatgctgaggtgtaaccatttgtgttgtctgactttcgtatgatttaattgagccaaatttgggtcagaacacaaatttgaagatgacttttcagtatatgatgggtatttacatttgaacactagaattttaggtctctcaaataattaagaatagagccagttttgaataaagtctagcagaactatgcagctttagtcatttgttttgtctaagtctgtattttatgtgttgtcttcttaagatctataattttggcatttatgtcatttgtgacatagtctgaaaatagagacattgttggcctttaaaatctcagaaatgaatgacttaatttagtgtcctgaaagagcttttaaaagaggattttgtggcaatgtttctcttactaygtactcacaggtttgcaaatgggaaaaaagtttacatttcagtttaggggcatatctaagctatgctattccctttagaaaattagcctccaaaatcttttgtttcaaaatattatattatttcataaataatttcaagcaaatacagacatccacaatgtagaacatgagagaccccctccctcaatttcmacctcccaagggaagtttatgtatttttctaggcccttttctatgtctttacatctctgtctcacacacacacacgtatacacacacacagtttatttttaataaaataggattatacyacacacatcctgtcacttgcttttttgcttaagagtatatctaagagaatcctttgtgtcagtgaagctggagctacctcattcttttaactggctgcgtggcgttccattgagtgtctgtcatcatgtgtttagccgagtggatggatagtctgcttgtttttagtttttgctcttaacaaacactgctgcagtcagcatccttgcacagatttctttgtatacttgtattagtatttctgtaagatctgagaagtggaatttgtagggtcataggttatgtacacttaagtttttgacactcactgccaagtcatctgtcagaattctaaactaaagacatgtttggagtgtggatttatcttcagtttttctttggacaagaggaagctgtgaaagattttgctatcagaaaattttggttctttgtcttttgcacatgttctttgagtcttagtatctgtaacgtggcgctactctctctatcatgggggggcatgttttgacattaaattgacttttaagaaaaacatgtcactaacctgaagctcagccacacagtgacttttaaggttttatttagactttactgttgttctcatgagagtaggtacagactgcataaggtttagaatcccagcatatgtctgaaacgacgggactttcactgtgatttccaccagagaaattatagcagagtggctgagcatgtgctctgaggccaggccccagctctgctgctgaygagctgtgtggtcctgggcagagtggtctccgagttccagtccctcctctgtaaaatgggcatgattagagtgcccaccgcattagggatgttggggtgagtcagtgtgaccccacgtgcacagaaagtgctgcgagtggtgcatggtgagaggttgatgcaggtacttagcccttggggaacacaggtagttccttttcactgtgtttaatttgggaaaatccagatccacatcattgtagagtctgagggttagaaggaagtcattgtgtctaacataacaacagagcagtttgtgtcactgagctccagtctgtgctggattattgatattgttggtggcggtcaccattcctggaaagggactgtcccaagccacttaccttcccgaggagtctgctggttctccttgaggatagtgcttagataacagactcattaaacatttactgagtgtctgtcagggatcattcacatccacatcatcctcccggcccctccycgtgttgttcatggagggagtactggcggtccccattttcatgtatggagacttcaggtgaaagaagttaagtgaattctttgttgagtcacaaatyttgagccagtcagaatttgaacctaagatttttgactgctggttgtcacacttcccgccccacactcaactgttgtgtgaatgagccagacacattgcttaacctgagtccgagatggacaatggtataggaaagatattcggtatggagaatcagatgttaacttgtgttgctatttttgttttgttttgttttgttttgtttttgagacaaggtcttgctctgtcacccaggctrgagtgcagtggcatgatcagggcttactgcagcctcaccctcgatttcctgggctcaagcaatcctcccacctcagcccccaagtagctgggcctacaggtgcgygctaccacgcctggccaattttttaaattttagcacagatgaggtctcactatgttgcccgggctggtctcgaactcctgagctcaagggatcctcccgcctcagcctcccaaagtgctggtgttacaggcataagccaccacrcctggcctgtgttgctattatatttggcaggaacccagagtccagaacatttcatctatgatgggttagataatgtgtctagttgtttgcatgccaatttcagtagcctcagttattcaacctaggagatttttctacctctttactaccctgctgaagttgctcttcagcagaaaatctttgtggaacacattccacactttgaaatcttcgtggaacaaaagatatttgtggaaccaatctttgtggaacatattccagctttttgaatgagtgcatatccagtagtacctttaaagtaacactttgtacataacaaatactcagcaaatgtgaaactttatttgctcttacttcaaaattagtccaaaatgttggaaataaaatataagacattgatctagatatgaggtttttctccttcattctcagctgtcgaagaaatcaaagtagcatatgcacaaggttaaaaaccacatatacaaatactatagaacagcttataatgaaaaccttgcctgcctttataaaaaatgtgattatcttcttctgttaatgtcaataaaagatggtttgtcctagaaggtctataaatggtattatgttctggaggaaacctagcaaaaactttgctagtttagtacttgtctctaaattgatgttcacccatttcaatattgcacttattaatggtctttatttttctagcatagataacaattgattctttagattcatatatggaggtaattcttgctttctaaagaaaggaatatggcacattggaaccattttattcaccagtggatttacccttagagtatttttagatctgagctgatgacttgtgagagaaaaagggaacagagtaaagccatggaagccatgaacagtaagagactgcygcctggcatggtttcttcttctgcagaagatgaaactgaggagaaacaagacaacatccttcataccaggaatggtcaagataatgcaagaagaaaaaagctttcaaacaaatcagaaggcagtcaacaaacagaaagggggmcattccttccctggcagttactcaaaactgaaattgcttattgtgtacaccggggcttgtacttggggaatttaataaaaatgctcattaccaagctccaga

SEQ ID NO: 2 - DNA, 5570 bp, Homo sapiens
tgaggccggagcttaggtcgggaagggatggatcgctgagccgatagcgtccgctaggctgtctgcctcgaatctctcttgatttttgaggaaatacctagtaacaaacatgactgagttctggcttatatctgctcctggggagaaaacctgtcagcaaacatgggagaaattgcatgcggcaacttcaaagaacaataatcttgctgtcacttccaagttcaatattcctgacttaaaggttggcacgttggatgtcttggttggcttgtcagaygaactggctaaactggatgcatttgtagaaggagtggttaagaaagtagctcaatacatggctgatgtattggaagatagcaaagacaaagttcaagagaatctgttggctaatggagtggacttggttacttatataacaaggttccagtgggacatggccaaatatccaatcaagcagtccctgaaaaatatttctgaaataattgccaagggagtaactcagattgataatgacctgaaatctcgagcatctgcmtacaataacctgaaaggaaatcttcagaatttggaacgaaagaatgcaggaagtttgctaactagaagtctagcagaaattgtgaagaaggatgactttgttcttgattcagagtatctcgtcacattactggtagtagttcccaagttaaaccacaacgactggattaagcagtatgaaacactagccgaaatggtagttccaaggtctagcaatgttctttcagaggaccaagacagttacctgtgtaatgtcaccttgtttaggaaggcagttgatgacttcagacacaaagccagagaaaacaaattcattgttcgtgacttccagtataatgaagaggagatgaaagcagataaagaagaaatgaacaggctttctactgataaraaaaaacaatttggaccacttgtacggtggctgaaagtgaattttagtgaagcatttattgcatggattcacgtgaaagcattacgggttttcgttgagtctgttttaaggtatggcttgccagtgaacttccaagcaatgctacttcagcccaataagaaaactttgaagaaactgagagaagtattacatgaattgtataaacatctagacagcagtgcagcagctattattgatgctcctatggatattccaggtttaaacctgagtcaacaagaatactacccctatgtgtactacaagattgattgcaacttgctggaattcaagtgaaaatgggctcctcccccgacaatcctgtccttgtgtttgtgtgtgctaacagaartaagttgcagtatggtcgtacttttaactctagtatcctttgcttgcttcttacsccctttcctaggtgaattctcccacagtggtctgtatctcaacattttctttttaaaggaaaaaawatatatatatagtttctttttattgatcaggtctgtaaatgtgtactaaaaaaatcagagtttatttataaacaraatagtttatttaaagagaaggtctcttccttattgatatcatggtatgcattaattccatttgttactattgtgcayaaaagccctgttcacaggggaatggtgtaaacatttatactgttttgttcactgtatttagtagacataactgttgaatagttactgaatcatgatgtaaagaatatgtgaccatcttcaggtatgggatttctgaacgtttcaaatttcaatcaatgagcactgtcaacacccacaggagagaataaaattacctgtgcaaaggtgtattgtggtgtgtgtaacttaagattacagttctgtttgagagttaaatgatgtcatagctcacttgctatgctgcttccaggattttgttatatgctgaggtgtaaccatttgtgttgtctgactttcgtatgatttaattgagccaaatttgggtcagaacacaaatttgaagatgacttttcagtatatgatgggtatttacatttgaacactagaattttaggtctctcaaataattaagaatagagccagttttgaataaagtctagcagaactatgcagctttagtcatttgttttgtctaagtctgtattttatgtgttgtcttcttaagatctataattttggcatttatgtcatttgtgacatagtctgaaaatagagacattgttggcctttaaaatctcagaaatgaatgacttaatttagtgtcctgaaagagcttttaaaagaggattttgtggcaatgtttctcttactaygtactcacaggtttgcaaatgggaaaaaagtttacatttcagtttaggggcatatctaagctatgctattccctttagaaaattagcctccaaaatcttttgtttcaaaatattatattatttcataaataatttcaagcaaatacagacatccacaatgtagaacatgagagaccccctccctcaatttcmacctcccaagggaagtttatgtatttttctaggcccttttctatgtctttacatctctgtctcacacacacacacgtatacacacacacagtttatttttaataaaataggattatacyacacacatcctgtcacttgcttttttgcttaagagtatatctaagagaatcctttgtgtcagtgaagctggagctacctcattcttttaactggctgcgtggcgttccattgagtgtctgtcatcatgtgtttagccgagtggatggatagtctgcttgtttttagtttttgctcttaacaaacactgctgcagtcagcatccttgcacagatttctttgtatacttgtattagtatttctgtaagatctgagaagtggaatttgtagggtcataggttatgtacacttaagtttttgacactcactgccaagtcatctgtcagaattctaaactaaagacatgtttggagtgtggatttatcttcagtttttctttggacaagaggaagctgtgaaagattttgctatcagaaaattttggttctttgtcttttgcacatgttctttgagtcttagtatctgtaacgtggcgctactctctctatcatgggggggcatgttttgacattaaattgacttttaagaaaaacatgtcactaacctgaagctcagccacacagtgacttttaaggttttatttagactttactgttgttctcatgagagtaggtacagactgcataaggtttagaatcccagcatatgtctgaaacgacgggactttcactgtgatttccaccagagaaattatagcagagtggctgagcatgtgctctgaggccaggccccagctctgctgctgaygagctgtgtggtcctgggcagagtggtctccgagttccagtccctcctctgtaaaatgggcatgattagagtgcccaccgcattagggatgttggggtgagtcagtgtgaccccacgtgcacagaaagtgctgcgagtggtgcatggtgagaggttgatgcaggtacttagcccttggggaacacaggtagttccttttcactgtgtttaatttgggaaaatccagatccacatcattgtagagtctgagggttagaaggaagtcattgtgtctaacataacaacagagcagtttgtgtcactgagctccagtctgtgctggattattgatattgttggtggcggtcaccattcctggaaagggactgtcccaagccacttaccttcccgaggagtctgctggttctccttgaggatagtgcttagataacagactcattaaacatttactgagtgtctgtcagggatcattcacatccacatcatcctcccggcccctccycgtgttgttcatggagggagtactggcggtccccattttcatgtatggagacttcaggtgaaagaagttaagtgaattctttgttgagtcacaaatyttgagccagtcagaatttgaacctaagatttttgactgctggttgtcacacttcccgccccacactcaactgttgtgtgaatgagccagacacattgcttaacctgagtccgagatggacaatggtataggaaagatattcggtatggagaatcagatgttaacttgtgttgctatttttgttttgttttgttttgttttgtttttgagacaaggtcttgctctgtcacccaggctrgagtgcagtggcatgatcagggcttactgcagcctcaccctcgatttcctgggctcaagcaatcctcccacctcagcccccaagtagctgggcctacaggtgcgygctaccacgcctggccaattttttaaattttagcacagatgaggtctcactatgttgcccgggctggtctcgaactcctgagctcaagggatcctcccgcctcagcctcccaaagtgctggtgttacaggcataagccaccacrcctggcctgtgttgctattatatttggcaggaacccagagtccagaacatttcatctatgatgggttagataatgtgtctagttgtttgcatgccaatttcagtagcctcagttattcaacctaggagatttttctacctctttactaccctgctgaagttgctcttcagcagaaaatctttgtggaacacattccacactttgaaatcttcgtggaacaaaagatatttgtggaaccaatctttgtggaacatattccagctttttgaatgagtgcatatccagtagtacctttaaagtaacactttgtacataacaaatactcagcaaatgtgaaactttatttgctcttacttcaaaattagtccaaaatgttggaaataaaatataagacattgatctagatatgaggtttttctccttcattctcagctgtcgaagaaatcaaagtagcatatgcacaaggttaaaaaccacatatacaaatactatagaacagcttataatgaaaaccttgcctgcctttataaaaaatgtgattatcttcttctgttaatgtcaataaaagatggtttgtcctagaaggtctataaatggtattatgttctggaggaaacctagcaaaaactttgctagtttagtacttgtctctaaattgatgttcacccatttcaatattgcacttattaatggtctttatttttctagcatagataacaattgattctttagattcatatatggaggtaattcttgctttctaaagaaaggaatatggcacattggaaccattttattcaccagtggatttacccttagagtatttttagatctgagctgatgacttgtgagagaaaaagggaacagagtaaagccatggaagccatgaacagtaagagactgcygcctggcatggtttcttcttctgcagaagatgaaactgaggagaaacaagacaacatccttcataccaggaatggtcaagataatgcaagaagaaaaaagctttcaaacaaatcagaaggcagtcaacaaacagaaagggggmcattccttccctggcagttactcaaaactgaaattgcttattgtgtacaccggggcttgtacttggggaatttaataaaaatgctcattaccaagctccaga

SEQ ID NO: 3 - DNA, 3025 bp, Homo sapiens
tgggcgcggtctcagctctcggctggggttcgtcactgggcgcgggatttggccgccgcggggctccggagccgctcgctcccgacacggctcacgatgcgcggcgagcagggcgcggcgggggcccgcgtgctccagttcactaactgccggatcctgcgcggagggaaactgctcagggaggatctgtgggtgcgcggaggccgcatcttggacccagagaagctgttctttgaggagcggcgcgtggccgacgagcggcgggactgcgggggccgcatcttggctcccggattcatcgacgtgcagatcaacggtggatttggtgttgacttctctcaagccacggaggacgtgggttcgggggttgccctcgtggcccggaggatcctgtcgcacggcgtcacctccttctgccccaccctggtcacttccccaccggaggtttatcacaaggttgttcctcagatccctgtgaagagtggtggtccccatggggcaggggtcctcgggctgcacctggagggccccttcatcagccgggagaagcggggcgcgcaccccgaggcccacctccgctccttcgaggccgatgccttccaggacttgctggccacctacgggcccctggacaatgtccgcatcgtgacgctggccccagagttgggccgtagccacgaagtgatccgggcgctgacggcccgtggcatctgcgtgtccctagggcactcagtggctgacctgcgggcggcagaggatgctgtgtggagcggagccaccttcatcacccacctsttcaacgccatgctgcctttccaccaccgcgacccaggcatcgtggggctcctgaccagcgaccggctgcccgcaggccgctgcatcttctatgggatgattgcagatggcacgcacaccaaccccgccgccctgcggatcgcccaccgtgcccatccccaggggctggtgctggtcaccgatgccatccctgccttgggcctgggcaacggccggcacacgctgggacagcaggaagtggaagtggacggtctgacggcctacgtggcaggcaccaagacgctgagtggcagcatagccccaatggacgtctgtgtccggcacttcctgcaggccacaggctgcagcatggagtcggccctggaggctgcatccctgcaccccgcccagttgctggggctggagaagagtaaggggaccctggactttggtgctgacgcagacttcgtggtgctcgacgactcccttcacgtccaggccacctacatctcgggtgagctggtgtggcaggcggacgcagctaggcagtgacaaggacctcggctgagaggacacctggccgcagcgggatgccatcagggccgggtggttggggagctggtctccagggagtgagtcgggagccctgctggattgatgcccagggcctgtgcggccgccctggaggcggtggctgggataaacgtgcacccagcaggactcgccttggctccgggttttgcttgtgctcacatgtggcaccatccttggttgccctcctggagaaggcattcacggcctggggtgggatggctgggctgtagtttagcctgggccttgggccccagtgggggacagggcctgtctgcatgaagtggaccggagacctgcagaccccaggaaagtgtcactatgggagggaggggcaggcagtcagtggctggtgccatggggtgaagccaccatgggctgggggtgaagagccggcaggaaggggaccagtcacagggagtgtggacagtcaggggtttgctttctgctcctgagttggggtgtgcagcgtggagcccacagcctggttctgggccagggcacagtgccaggggctccgctctgacctccaggagggagactgggcccgggacccctgttttctgctccctggactgcctagccctgagtgccacggatgaccagcgttctgttttctcttctcaataaccctatctcttcacacatccccaggcccagtgcttgccggctgtggtgaccctgcctggtgctggagggcagtatgggaggcaccagtgtgccctgctcaccccattagtgtcatcctgccatcttctktgtccccttggccctggcacacacccatgtggcaaacacgggccgtgaggctccctgaacagcttcgaggcgggtgggcttctggagccctcttggctctgaggacagccacagtggggtcagacgtcagggattggtgcagccccacgtcaggggtgattgtcttgactttctctccatttgagttctggggtgggtggctcccttcccccttgcttacaggtgctgtcctgggcacaggaggtacgcgcctggctctgccactgttctcttccctctgctgcaaagcccagttaaggaaatgtctccaggtccaaagagataggatggtctgggccccacctgttggaagggaacagccagggaagaaccacctgcctgggcagggcctcgcctgagggagggcctggggcagggcacaaggggttgatctcagcccacaagccccaggggcagcccaggaaagcaggcgacggatgtggatcctgacctcctgagaggtgtgaggtgcagggatacccacctctgccttgacggccgcgcaccccttaggaagtggctgtccagcgcctgcctgtgctgggcctgggagaggagctgtcttgccagggctcccaggcagggagaggcaggtgaggttctcagccgatgtgttagaggttgagcatcgcctgtgcccagcttgctggctgtcagtgcttgatgtgcccatcctcagstaaaacccagagctggcatgttggtcatccccacctcagacgggacgcccagtccagagctggtgagccctgggccagcctttgggcctggcctgccccattcaccggccagcgccccacctccctggctggagggtcggggaggggctggcagagatggttggtccacagggctagccctg

SEQ ID NO: 4 - DNA, 2979 bp, Homo sapiens
tgggcgcggtctcagctctcggctggggttcgtcactgggcgcgggatttggccgccgcggggctccggagccgctcgctcccgacacggctcacgatgcgcggcgagcagggcgcggcgggggcccgcgtgctccagttcactaactgccggatcctgcgcggagggaaactgctcagggaggatctgtgggtgcgcggaggccgcatcttggacccagagaagctgttctttgaggagcggcgcgtggccgacgagcggcgggactgcgggggccgcatcttggctcccggattcatcgacgtgcagatcaacggtggatttggtgttgacttctctcaagccacggaggacgtgggttcgggggttgccctcgtggcccggaggatcctgtcgcacggcgtcacctccttctgccccaccctggtcacttccccaccggaggtttatcacaaggttgttcctcagatccctgtgaagagtggtggtccccatggggcaggggtcctcgggctgcacctggagggccccttcatcagccgggagaagcggggcgcgcaccccgaggcccacctccgctccttcgaggccgatgccttccaggacttgctggccacctacgggcccctggacaatgtccgcatcgtgacgctggccccagagttgggccgtagccacgaagtgatccgggcgctgacggcccgtggcatctgcgtgtccctagggcactcagtggctgacctgcgggcggcagaggatgctgtgtggagcggagccaccttcatcacccacctsttcaacgccatgctgcctttccaccaccgcgacccaggcatcgtggggctcctgaccagcgaccggctgcccgcaggccgctgcatcttctatgggatgattgcagatggcacgcacaccaaccccgccgccctgcggatcgcccaccgtgcccatccccagggttctgagcctcttctcccccagggctggtgctggtcaccgatgccatccctgccttgggcctgggcaacggccggcacacgctgggacagcaggaagtggaagtggacggtctgacggcctacgtggcaggctgcagcatggagtcggccctggaggctgcatccctgcaccccgcccagttgctggggctggagaagagtaaggggaccctggactttggtgctgacgcagacttcgtggtgctcgacgactcccttcacgtccaggccacctacatctcgggtgagctggtgtggcaggcggacgcagctaggcagtgacaaggacctcggctgagaggacacctggccgcagcgggatgccatcagggccgggtggttggggagctggtctccagggagtgagtcgggagccctgctggattgatgcccagggcctgtgcggccgccctggaggcggtggctgggataaacgtgcacccagcaggactcgccttggctccgggttttgcttgtgctcacatgtggcaccatccttggttgccctcctggagaaggcattcacggcctggggtgggatggctgggctgtagtttagcctgggccttgggccccagtgggggacagggcctgtctgcatgaagtggaccggagacctgcagaccccaggaaagtgtcactatgggagggaggggcaggcagtcagtggctggtgccatggggtgaagccaccatgggctgggggtgaagagccggcaggaaggggaccagtcacagggagtgtggacagtcaggggtttgctttctgctcctgagttggggtgtgcagcgtggagcccacagcctggttctgggccagggcacagtgccaggggctccgctctgacctccaggagggagactgggcccgggacccctgttttctgctccctggactgcctagccctgagtgccacggatgaccagcgttctgttttctcttctcaataaccctatctcttcacacatccccaggcccagtgcttgccggctgtggtgaccctgcctggtgctggagggcagtatgggaggcaccagtgtgccctgctcaccccattagtgtcatcctgccatcttctktgtccccttggccctggcacacacccatgtggcaaacacgggccgtgaggctccctgaacagcttcgaggcgggtgggcttctggagccctcttggctctgaggacagccacagtggggtcagacgtcagggattggtgcagccccacgtcaggggtgattgtcttgactttctctccatttgagttctggggtgggtggctcccttcccccttgcttacaggtgctgtcctgggcacaggaggtacgcgcctggctctgccactgttctcttccctctgctgcaaagcccagttaaggaaatgtctccaggtccaaagagataggatggtctgggccccacctgttggaagggaacagccagggaagaaccacctgcctgggcagggcctcgcctgagggagggcctggggcagggcacaaggggttgatctcagcccacaagccccaggggcagcccaggaaagcaggcgacggatgtggatcctgacctcctgagaggtgtgaggtgcagggatacccacctctgccttgacggccgcgcaccccttaggaagtggctgtccagcgcctgcctgtgctgggcctgggagaggagctgtcttgccagggctcccaggcagggagaggcaggtgaggttctcagccgatgtgttagaggttgagcatcgcctgtgcccagcttgctggctgtcagtgcttgatgtgcccatcctcagstaaaacccagagctggcatgttggtcatccccacctcagacgggacgcccagtccagagctggtgagccctgggccagcctttgggcctggcctgccccattcaccggccagcgccccacctccctggctggagggtcggggaggggctggcagagatggttggtccacagggctagccctg

SEQ ID NO: 5 - DNA, 3115 bp, Homo sapiens
tgggcgcggtctcagctctcggctggggttcgtcactgggcgcgggatttggccgccgcggggctccggagccgctcgctcccgacacggctcacgatgcgcggcgagcagggcgcggcgggggcccgcgtgctccagttcactaactgccggatcctgcgcggagggaaactgctcagggaggatctgtgggtgcgcggaggccgcatcttggacccagagaagctgttctttgaggagcggcgcgtggccgacgagcggcgggactgcgggggccgcatcttggctcccggattcatcgacgtgcagatcaacggtggatttggtgttgacttctctcaagccacggaggacgtgggttcgggggttgccctcgtggcccggaggatcctgtcgcacggcgtcacctccttctgccccaccctggtcacttccccaccggaggtttatcacaaggttgttcctcagatccctgtgaagagtggtggtccccatggggcaggggtcctcgggctgcacctggagggccccttcatcagccgggagaagcggggcgcgcaccccgaggcccacctccgctccttcgaggccgatgccttccaggacttgctggccacctacgggcccctggacaatgtccgcatcgtgacgctggccccagagttgggccgtagccacgaagtgatccgggcgctgacggcccgtggcatctgcgtgtccctagggcactcagtggctgacctgcgggcggcagaggatgctgtgtggagcggagccaccttcatcacccacctsttcaacgccatgctgcctttccaccaccgcgacccaggcatcgtggggctcctgaccagcgaccggctgcccgcaggccgctgcatcttctatgggatgattgcagatggcacgcacaccaaccccgccgccctgcggatcgcccaccgtgcccatccccaggggctggtgctggtcaccgatgccatccctgccttgggcctgggcaacggccggcacacgctgggacagcaggaagtggaagtggacggtctgacggcctacgtggcaggtgagcgccctgacccactgggtcccaggtcccagcccgcatgccaggtggcccacgacccccccagagcctgccctctctgctctcaaggcaccaagacgctgagtggcagcatagccccaatggacgtctgtgtccggcacttcctgcaggccacaggctgcagcatggagtcggccctggaggctgcatccctgcaccccgcccagttgctggggctggagaagagtaaggggaccctggactttggtgctgacgcagacttcgtggtgctcgacgactcccttcacgtccaggccacctacatctcgggtgagctggtgtggcaggcggacgcagctaggcagtgacaaggacctcggctgagaggacacctggccgcagcgggatgccatcagggccgggtggttggggagctggtctccagggagtgagtcgggagccctgctggattgatgcccagggcctgtgcggccgccctggaggcggtggctgggataaacgtgcacccagcaggactcgccttggctccgggttttgcttgtgctcacatgtggcaccatccttggttgccctcctggagaaggcattcacggcctggggtgggatggctgggctgtagtttagcctgggccttgggccccagtgggggacagggcctgtctgcatgaagtggaccggagacctgcagaccccaggaaagtgtcactatgggagggaggggcaggcagtcagtggctggtgccatggggtgaagccaccatgggctgggggtgaagagccggcaggaaggggaccagtcacagggagtgtggacagtcaggggtttgctttctgctcctgagttggggtgtgcagcgtggagcccacagcctggttctgggccagggcacagtgccaggggctccgctctgacctccaggagggagactgggcccgggacccctgttttctgctccctggactgcctagccctgagtgccacggatgaccagcgttctgttttctcttctcaataaccctatctcttcacacatccccaggcccagtgcttgccggctgtggtgaccctgcctggtgctggagggcagtatgggaggcaccagtgtgccctgctcaccccattagtgtcatcctgccatcttctktgtccccttggccctggcacacacccatgtggcaaacacgggccgtgaggctccctgaacagcttcgaggcgggtgggcttctggagccctcttggctctgaggacagccacagtggggtcagacgtcagggattggtgcagccccacgtcaggggtgattgtcttgactttctctccatttgagttctggggtgggtggctcccttcccccttgcttacaggtgctgtcctgggcacaggaggtacgcgcctggctctgccactgttctcttccctctgctgcaaagcccagttaaggaaatgtctccaggtccaaagagataggatggtctgggccccacctgttggaagggaacagccagggaagaaccacctgcctgggcagggcctcgcctgagggagggcctggggcagggcacaaggggttgatctcagcccacaagccccaggggcagcccaggaaagcaggcgacggatgtggatcctgacctcctgagaggtgtgaggtgcagggatacccacctctgccttgacggccgcgcaccccttaggaagtggctgtccagcgcctgcctgtgctgggcctgggagaggagctgtcttgccagggctcccaggcagggagaggcaggtgaggttctcagccgatgtgttagaggttgagcatcgcctgtgcccagcttgctggctgtcagtgcttgatgtgcccatcctcagstaaaacccagagctggcatgttggtcatccccacctcagacgggacgcccagtccagagctggtgagccctgggccagcctttgggcctggcctgccccattcaccggccagcgccccacctccctggctggagggtcggggaggggctggcagagatggttggtccacagggctagccctg

SEQ ID NO: 6 - DNA, 4418 bp, Homo sapiens
ctgtaggtccagtgtaagagttccgctattcggtctcacacctacagtggactacccgatttttcgcttctcttcagggatgagtcatgtggtggtgaaaaatgaccctgaactggaccagcagcttgctaatctggacctgaactctgaaaaacagagtggaggagcaagtacagcgagcaaagggcgctatatacctcctcacttaaggaacagagaagcatctaaaggattccatgataaagacagttcaggttggagttgcagcaaagataaggatgcatatagcagttttgggtctcgagattctagaggaaagcctggttatttcagtgaacgtggaagtggatcaaggggaagatttgatgatcgtggacggagtgactatgatggtattggcaatcgtgaaagacctggctttggcagatttgaacggagtggacatagtcgttggtgtgacaagtcagttgaagatgattggtcaaaaccacttccaccaagtgaacgcttggagcaagaactgttttctggaggaaacacggggattaactttgagaaatatgatgatataccagtagaggcaaccggcagtaactgtcctccacatattgagaattttagcgatattgacatgggagaaattatcatggggaacattgaacttactcgctatactcgtcctactccagtgcaaaaacatgccattcctattattaagggaaaaagagacttaatggcttgtgcccaaacaggatctgggaaaactgcagcatttcttttacccatactgagtcagatatatacagatggtccaggagaagctttgaaggctgtgaaggaaaatggaaggtatgggcgccgcaaacaatatccaatatccttggttttagccccaacaagagaattggctgtacagatctatgaggaagccagaaaattttcctaccgatctagagttcgtccttgtgtagtttatggtggtgctgatattggtcagcagattcgggacttagaacgtggatgccacttgttagtagccactccaggacgtctagtggatatgatggaaagaggaaagattggattagacttctgcaagtacttagtgttggatgaagctgataggatgctggatatgggatttgaacctcagatacgtcgtatagttgaacaagatactatgccaccaaagggcgttcgtcacaccatgatgtttagtgctacttttcctaaggaaatacagatgcttgctcgtgactttttggatgaatatatctttttggctgtaggcagagtaggctctacctctgagaacatcacacagaaagtagtttgggtggaagacttagataaacggtcatttctactggacattttaggtgcaacagggagtgattcacttactttagtgtttgtggagaccaaaaagggagcagattccctggaggatttcttataccatgaaggatatgcttgtactagtattcatggagaccggtcacagagagatcgagaggaggcccttcaccagtttcgctcaggaaaaagcccaattctagtggctacagctgtggcagcacgaggactagacatttcaaatgtgagacatgttatcaattttgatttgccaagtgatattgaagaatatgtgcatcgtattggccgtacaggacgtgtaggaaacctgggccttgccacctcattctttaatgaaaaaaatatgaatattacaaaggatttgttggatcttcttgtagaagctaaacaagaagtgccttcttggttggaaaatatggcttatgaacaccactacaagggtggcagtcgtggacgatctaaaagtaatagattcagtggaggatttggtgccagagactatcgacaaagtagtggttccagcagttctggctttggtgctagtcgcggaagcagcagccgcagtggtggaggtggttacggcaacagcagaggatttggtggaggtggctatggaggcttctacaatagtgatggatatggaggaaattataactcccagggggttgactggtggggcaactgaatctgctttgcagcaaagtcacccttacaaagaagctaatatggaaaccacatgtaacttagccagactatattgtgtagcttcaagaacttgcagtacattaccagctgtgattctcctgataattcaagggagctcaaagtcacaagaagaaaaatgaaaggaaaaaacagcagccctattcagaaattggtttgaagatgtaattgctctagtttggattaaactcttcccctcctgctttagtgccaccccaaactgcatttataattttgtgactgaggatcgtttgtttgttaacgtactgtgactttaactttagacaacttactactttgatgtcctgttggctcagtaatgctcacgataccaattgttttgacaaaataaatttactaaacttggcctaaaatcaaaccttggcacagaggtatgatacaactttaacaggagtcatcaattcatccataaatataaaaagggaaaaaaacttaaggcagtagtctgcattaggactgtttgagttttgcagacttggggttgggagaacatcttaaagcattaaagcatagttttttgtatggccaaccttactaaattaagttctgacttgctcactctatcctggataggcacttgggaacttasactctttaagccattccagtcatgatgaggtggaatgtatcagtataccaattaatatttttgaaagagytcttttaggttaatttaagtacagcaatttctcatgtaatgtttagggagtttattctaacctaggcaaacggcatgctatcacaagaaaggtttaaagctttgataaaatgggggagatttaatcagtttttttaatgcctgctataaaaatttgaaatattagaatggccgaccatggcagtgaccaggcctcactacaggcctggttggattctggtctttaatgcatgctagtgttgatgttttttggtcaagaacggtttaaacaggaaggattgtgcagcaggctttaatttaatgtagattcatactgctctgttaaagctgcattgaaatgttaaaatggcttacacttgcagactttgcaaatcttaagactaacaaatccttgaaatcacacagcttgcaaatacgtactaaactgcacaaggtgtgtgttctatatgtgcagttttagcgtattttagttgcataggtttccatggtatttatagtctcttgtgctaaatttggccaaagatgattgtccaccactaaaaatgcctctcccacttggaattctgtactgattttgtggccagatgcaatgatctttaaaaacaaatcttttcaatggcataagaagttgacraaaatttcttaaagtgcaatagattttcaartgtattgtgccttgttctaaaacttttaagtaggtgcacttgacagtattgaggtcatttgttaaggtgctatttcaattagtgtaggtttagactcttgtacatttctcccataactttttacaaagtattttgttgcacattcagagaattttatatatatatgtcttgtgtgggtgtcctcgaccttccaatcttatttcgtctcttggagattgttgaatgcagccagtgaagaagtagattcctaaattttattggggaccatggaatggtagttgagaagaaaactatttgcacacaacagattttagatactttttgctgctrgttgtgtaatatttattgaacattttgacaaatatttatttttgtaagcctaaaaatgattctttgaaagtttaaagaaacttgaccaaaagacagtacaaaaaacactggcacttgaatgttgaatgtcaccgtatgtgaaataatatattttggggtagtgtgagcttttaatgttaagtctgttaaacttgagtcaaattaagcagacccggcattggcaatgtagctgtaattttctgacaaaatttaagacaaaattgtcaacttgaaactaaaacatgccaaggttttgatatacttgtcttaagatattaatgaaacacttctgaacactgataggaagtgtccacatccacaaagtttctcttgagttttgttatgtgttttgttgtgtttgattttcagtgattgtctggtatatttacagtcctcaaacatggttatttctgtcagtgacttaacattcggttttatcagccagcagtattcttcagtaaataaagaatggaattgctgaatgtaatcattgaacctcgagtcactgtaaaagttcagtaattgcttattgtattagttttagatgctggcactgcatgtgctctgtttattctgattttactaaaataaaaagttcaaaagtc

SEQ ID NO: 7 - DNA, 4715 bp, Homo sapiens
ggagttcctaggtgaaccccagcagcctaaccctgtcaagtctgtcgagcctctggctggtcacacgtgctgcggaatccactcagctttcctcaggtgcagtcaggtccatcctgcagagggaccttctgcggacctgttctttcacctccctaacctgaagattgtattcaaaccaccgtggatcgctcacgtaaaatggtcactgcgcctaacacctgggatcccgtaacccttatctatcttggcttcagagagttttttgactagttccaactttgctgaagcttgtcaaagctgtaggtccagtgtaagagttccgctattcggtctcacacctacagtggactacccgatttttcgcttctcttcagggatgagtcatgtggtggtgaaaaatgaccctgaactggaccagcagcttgctaatctggacctgaactctgaaaaacagagtggaggagcaagtacagcgagcaaagggcgctatatacctcctcacttaaggaacagagaagcatctaaaggattccatgataaagacagttcaggttggagttgcagcaaagataaggatgcatatagcagttttgggtctcgagattctagaggaaagcctggttatttcagtgaacgtggaagtggatcaaggggaagatttgatgatcgtggacggagtgactatgatggtattggcaatcgtgaaagacctggctttggcagatttgaacggagtggacatagtcgttggtgtgacaagtcagttgaagatgattggtcaaaaccacttccaccaagtgaacgcttggagcaagaactgttttctggaggaaacacggggattaactttgagaaatatgatgatataccagtagaggcaaccggcagtaactgtcctccacatattgagaattttagcgatattgacatgggagaaattatcatggggaacattgaacttactcgctatactcgtcctactccagtgcaaaaacatgccattcctattattaagggaaaaagagacttaatggcttgtgcccaaacaggatctgggaaaactgcagcatttcttttacccatactgagtcagatatatacagatggtccaggagaagctttgaaggctgtgaaggaaaatggaaggtatgggcgccgcaaacaatatccaatatccttggttttagccccaacaagagaattggctgtacagatctatgaggaagccagaaaattttcctaccgatctagagttcgtccttgtgtagtttatggtggtgctgatattggtcagcagattcgggacttagaacgtggatgccacttgttagtagccactccaggacgtctagtggatatgatggaaagaggaaagattggattagacttctgcaagtacttagtgttggatgaagctgataggatgctggatatgggatttgaacctcagatacgtcgtatagttgaacaagatactatgccaccaaagggcgttcgtcacaccatgatgtttagtgctacttttcctaaggaaatacagatgcttgctcgtgactttttggatgaatatatctttttggctgtaggcagagtaggctctacctctgagaacatcacacagaaagtagtttgggtggaagacttagataaacggtcatttctactggacattttaggtgcaacagggagtgattcacttactttagtgtttgtggagaccaaaaagggagcagattccctggaggatttcttataccatgaaggatatgcttgtactagtattcatggagaccggtcacagagagatcgagaggaggcccttcaccagtttcgctcaggaaaaagcccaattctagtggctacagctgtggcagcacgaggactagacatttcaaatgtgagacatgttatcaattttgatttgccaagtgatattgaagaatatgtgcatcgtattggccgtacaggacgtgtaggaaacctgggccttgccacctcattctttaatgaaaaaaatatgaatattacaaaggatttgttggatcttcttgtagaagctaaacaagaagtgccttcttggttggaaaatatggcttatgaacaccactacaagggtggcagtcgtggacgatctaaaagtaatagattcagtggaggatttggtgccagagactatcgacaaagtagtggttccagcagttctggctttggtgctagtcgcggaagcagcagccgcagtggtggaggtggttacggcaacagcagaggatttggtggaggtggctatggaggcttctacaatagtgatggatatggaggaaattataactcccagggggttgactggtggggcaactgaatctgctttgcagcaaagtcacccttacaaagaagctaatatggaaaccacatgtaacttagccagactatattgtgtagcttcaagaacttgcagtacattaccagctgtgattctcctgataattcaagggagctcaaagtcacaagaagaaaaatgaaaggaaaaaacagcagccctattcagaaattggtttgaagatgtaattgctctagtttggattaaactcttcccctcctgctttagtgccaccccaaactgcatttataattttgtgactgaggatcgtttgtttgttaacgtactgtgactttaactttagacaacttactactttgatgtcctgttggctcagtaatgctcacgataccaattgttttgacaaaataaatttactaaacttggcctaaaatcaaaccttggcacagaggtatgatacaactttaacaggagtcatcaattcatccataaatataaaaagggaaaaaaacttaaggcagtagtctgcattaggactgtttgagttttgcagacttggggttgggagaacatcttaaagcattaaagcatagttttttgtatggccaaccttactaaattaagttctgacttgctcactctatcctggataggcacttgggaacttasactctttaagccattccagtcatgatgaggtggaatgtatcagtataccaattaatatttttgaaagagytcttttaggttaatttaagtacagcaatttctcatgtaatgtttagggagtttattctaacctaggcaaacggcatgctatcacaagaaaggtttaaagctttgataaaatgggggagatttaatcagtttttttaatgcctgctataaaaatttgaaatattagaatggccgaccatggcagtgaccaggcctcactacaggcctggttggattctggtctttaatgcatgctagtgttgatgttttttggtcaagaacggtttaaacaggaaggattgtgcagcaggctttaatttaatgtagattcatactgctctgttaaagctgcattgaaatgttaaaatggcttacacttgcagactttgcaaatcttaagactaacaaatccttgaaatcacacagcttgcaaatacgtactaaactgcacaaggtgtgtgttctatatgtgcagttttagcgtattttagttgcataggtttccatggtatttatagtctcttgtgctaaatttggccaaagatgattgtccaccactaaaaatgcctctcccacttggaattctgtactgattttgtggccagatgcaatgatctttaaaaacaaatcttttcaatggcataagaagttgacraaaatttcttaaagtgcaatagattttcaartgtattgtgccttgttctaaaacttttaagtaggtgcacttgacagtattgaggtcatttgttaaggtgctatttcaattagtgtaggtttagactcttgtacatttctcccataactttttacaaagtattttgttgcacattcagagaattttatatatatatgtcttgtgtgggtgtcctcgaccttccaatcttatttcgtctcttggagattgttgaatgcagccagtgaagaagtagattcctaaattttattggggaccatggaatggtagttgagaagaaaactatttgcacacaacagattttagatactttttgctgctrgttgtgtaatatttattgaacattttgacaaatatttatttttgtaagcctaaaaatgattctttgaaagtttaaagaaacttgaccaaaagacagtacaaaaaacactggcacttgaatgttgaatgtcaccgtatgtgaaataatatattttggggtagtgtgagcttttaatgttaagtctgttaaacttgagtcaaattaagcagacccggcattggcaatgtagctgtaattttctgacaaaatttaagacaaaattgtcaacttgaaactaaaacatgccaaggttttgatatacttgtcttaagatattaatgaaacacttctgaacactgataggaagtgtccacatccacaaagtttctcttgagttttgttatgtgttttgttgtgtttgattttcagtgattgtctggtatatttacagtcctcaaacatggttatttctgtcagtgacttaacattcggttttatcagccagcagtattcttcagtaaataaagaatggaattgctgaatgtaatcattgaacctcgagtcactgtaaaagttcagtaattgcttattgtattagttttagatgctggcactgcatgtgctctgtttattctgattttactaaaataaaaagttcaaaagtc

SEQ ID NO: 8 - DNA, 832 bp, Homo sapiens
ctgatggcgtcttcgaccccatcttcgtccgcaacctcctcgaacgcgggascggaccccaataccactaacctgcgccccacaacgtacgatacctggtgcggcgtggcccayggatgcaccagaaaactggggctcaagatctgcggcttcttgcaaaggaccaacagcctggaagagaagagtcgccttgtgagtgccttcaaggagaggcaatcctccaagaacctgctttcctgtgaaaacagcgaccgggatgcccgcttccggcgcacagagactgacttctctaatctgtttgctagagatctgcttccggctaagaacggtgaggagcaaaccgtgcaattcctcctggaagtggtggacatactcctcaactatgtccgcaagacatttgatcgctccaccaaggtgctggactttcatcacccacaccagttgctggaaggcatggagggcttcaacttggagctctctgaccaccccgagtcyctggagcagatcctggttgactgcagagacaccttgaagtatggggttcgcacaggtcatcctcgatttttcaaccagctctccactggattggatattattggcctagctggagaatggctgacatcaacggccaataccaacatgccatcagacatgagggagtgttggttgctacggtgatggggctcagagcagaaccaaagcatgattgtgacctccagaggtgatggtaactgcacacatggtttccaagggtcttcctcctaaatttccaggggcctcccaaggaaaatggacatattctttttggaaataaaatacttctaccaacata

SEQ ID NO: 9 - DNA, 971 bp, Homo sapiens
gagagggaactagcgagaacgaggaagcagctggaggtgacgccgggcagattacrcctgtcagggccgagccgarcggatcgctgggcgctgtgcagaggaaaggcgggagtgcccggctcgctgtcgcagagccgagctgatggcgtcttcgaccccatcttcgtccgcaacctcctcgaacgcgggascggaccccaataccactaacctgcgccccacaacgtacgatacctggtgcggcgtggcccayggatgcaccagaaaactggggctcaagatctgcggcttcttgcaaaggaccaacagcctggaagagaagagtcgccttgtgagtgccttcaaggagaggcaatcctccaagaacctgctttcctgtgaaaacagcgaccgggatgcccgcttccggcgcacagagactgacttctctaatctgtttgctagagatctgcttccggctaagaacggtgaggagcaaaccgtgcaattcctcctggaagtggtggacatactcctcaactatgtccgcaagacatttgatcgctccaccaaggtgctggactttcatcacccacaccagttgctggaaggcatggagggcttcaacttggagctctctgaccaccccgagtcyctggagcagatcctggttgactgcagagacaccttgaagtatggggttcgcacaggtcatcctcgatttttcaaccagctctccactggattggatattattggcctagctggagaatggctgacatcaacggccaataccaacatgccatcagacatgagggagtgttggttgctacggtgatggggctcagagcagaaccaaagcatgattgtgacctccagaggtgatggtaactgcacacatggtttccaagggtcttcctcctaaatttccaggggcctcccaaggaaaatggacatattctttttggaaataaaatacttctaccaacata

SEQ ID NO: 10 - DNA, 1301 bp, Homo sapiens
gaattcttcgtaggaattatcttttccctcctctcacccgacagcctgcctatttccaaaggaaaaaaaaaaagcgtgttgagtacgttctggattactcataagaccttttttttttccttccgggcgcaaaaccgtgagctggatttataatcgccctataaagctccagaggcggtcaggcacctgcagaggagccccgccgctccgccgactagctgcccccgcgagcaacggcctcgtgatttccccgccgatccggtccccgcctccccactctgcccccgcctaccccggagccgtgcagccgcctctccgaatctctctcttctcctggcgctcgcgtgcgagagggaactagcgagaacgaggaagcagctggaggtgacgccgggcagattacrcctgtcagggccgagccgarcggatcgctgggcgctgtgcagaggaaaggcgggagtgcccggctcgctgtcgcagagccgagcctgtttctgcgccggaccagtcgmggactctggacagtagaggccccgggacgaccgagctgatggcgtcttcgaccccatcttcgtccgcaacctcctcgaacgcgggascggaccccaataccactaacctgcgccccacaacgtacgatacctggtgcggcgtggcccayggatgcaccagaaaactggggctcaagatctgcggcttcttgcaaaggaccaacagcctggaagagaagagtcgccttgtgagtgccttcaaggagaggcaatcctccaagaacctgctttcctgtgaaaacagcgaccgggatgcccgcttccggcgcacagagactgacttctctaatctgtttgctagagatctgcttccggctaagaacggtgaggagcaaaccgtgcaattcctcctggaagtggtggacatactcctcaactatgtccgcaagacatttgatcgctccaccaaggtgctggactttcatcacccacaccagttgctggaaggcatggagggcttcaacttggagctctctgaccaccccgagtcyctggagcagatcctggttgactgcagagacaccttgaagtatggggttcgcacaggtcatcctcgatttttcaaccagctctccactggattggatattattggcctagctggagaatggctgacatcaacggccaataccaacatgtttacatatgaaattgcaccagtgtttgtcctcatggaacaaataacacttaagaagatgagagagatagttggatggtcaagtaaagatggtgatgggatattttctcctg

SEQ ID NO: 11 - DNA, 3192 bp, Homo sapiens
gagagggaactagcgagaacgaggaagcagctggaggtgacgccgggcagattacrcctgtcagggccgagccgarcggatcgctgggcgctgtgcagaggaaaggcgggagtgcccggctcgctgtcgcagagccgagctgatggcgtcttcgaccccatcttcgtccgcaacctcctcgaacgcgggascggaccccaataccactaacctgcgccccacaacgtacgatacctggtgcggcgtggcccayggatgcaccagaaaactggggctcaagatctgcggcttcttgcaaaggaccaacagcctggaagagaagagtcgccttgtgagtgccttcaaggagaggcaatcctccaagaacctgctttcctgtgaaaacagcgaccgggatgcccgcttccggcgcacagagactgacttctctaatctgtttgctagagatctgcttccggctaagaacggtgaggagcaaaccgtgcaattcctcctggaagtggtggacatactcctcaactatgtccgcaagacatttgatcgctccaccaaggtgctggactttcatcacccacaccagttgctggaaggcatggagggcttcaacttggagctctctgaccaccccgagtcyctggagcagatcctggttgactgcagagacaccttgaagtatggggttcgcacaggtcatcctcgatttttcaaccagctctccactggattggatattattggcctagctggagaatggctgacatcaacggccaataccaacatgtttacatatgaaattgcaccagtgtttgtcctcatggaacaaataacacttaagaagatgagagagatagttggatggtcaagtaaagatggtgatgggatattttctcctgggggcgccatatccaacatgtacagcatcatggctgctcgctacaagtacttcccrgaagttaagacaaagggcatggcggctgtgcctaaactggtcctcttcacctcagaacagagtcactattccataaagaaagctggggctgcacttggctttggaactgacaatgtgattttgataaagtgcaatgaaagggggaaaataattccagctgattttgaggcaaaaattcttgaagccaaacagaagggatatgttcccttttatgtcaatgcaactgctggcacgactgtttatggagcttttgatccgatacaagagattgcagatatatgtgagaaatataacctttggttgcatgtcgatgctgcctggggaggtgggctgctcatgtccaggaagcaccgccataaactcaayggcatagaaagggccaactcagtcacctggaaccctcacaagatgatgggcgtgctgttgcagtgctctgccattctygtcaaggaaaagggtatactccaaggatgcaaccagatgtgtgcaggatayctcttccagccagacaagcagtatgatgtctcctacgacaccggggacaaggcaattcagtgtggccgycacgtggatatcttcaagttctggctgatgtggaaagcaaagggcacagkgggatttgaaaaccagatcaacaaatgcytggarctggctgaatacctctatgccaagattaaaaacagagaagaatttgagatggttttcaatggcgagcctgagcacacaaacgtctgtttttggtatattccacaaagcctcaggggtgtgccagacagccctcaacgacrggaaaagctacacaaggtggctccaaaaatcaaagccctgatgatggagtcaggtacgaccatggttggctaccagccccaaggggacaaggccaacttmttccggatggtcatctccaacccagccgctacccagtctgacattgacttcctcattgaggagatagaaagactgggccaggatctgtaatcatccttcgcagaacatgagtttatgggaatgccttttccctctggyactccagaacaaacctctrtatgttgctgaaacacacaggccatttcattgagggaaaacataatatcttgaagaatattgttaaaaccttacttaaagcttgtttgttctagttagcaggaaatagtgttctttttaaaaagttgcacattaggaacagagtatatatgtacagttatacatacctctctmtatatatacatgtatagtgagtgtggcttagtaatagatcacggcatgtttcccgctccaagagaattcactttaccttcagcagttaccgaggagctaaacatgctgccaaccarcttgtccaacaactccaggaaaactgtttttcaaaacgccatgtcctaggggccragggaaatgctgttggtgagaatcgacctcactgtcagcgtttctccacctgaagtgatgatggatgagaaaaaacaccaccaaatgacaagtcacaccctccccattagtatcctgttaggggaaaatagtagcagagtcattgttacaggtgtactatggctgtatttttagagattaatttgtgtagattgtgtaaattcctgttgtctgaccttggtggtgggagggggagactatgtgtcatgatttcaatgattgtttaattgtaggtcaatgaaatatttgcttatttatattcagagatgtaccatgttaaagaggcgtcttgtattttcttcccatttgtaatgtatcttatttatatatgaagtaagttctgaaaactgtttatggtattttcgtgcatttgtgagccaaagagaaaagattaaaattagtgagatttgtatttatattagagtgcccttaaaataatgatttaagcattttactgtctgtaagagaattctaagattgtacataaagtcatatatatggaaatcctgttacttaaatagcatctgctcttctcttacgctctctgtctggctgtaygtctggtgttctcaatgcttttctagcaactgttggataataactagatctcctgtaattttgtagtagttgatgaccaatctctgtgactcgcttagctgaaacctaaggcaacatttccgaagaccttctgaagatctcagataaagtgaccaggctcacaactgtttttgaagaagggaaattcacactgtgcgttttagagtatgcaagaagaatataaataaataaaaatattctccatggagaatttgaac

SEQ ID NO: 12 - DNA, 3600 bp, Homo sapiens
gaattcttcgtaggaattatcttttccctcctctcacccgacagcctgcctatttccaaaggaaaaaaaaaaagcgtgttgagtacgttctggattactcataagaccttttttttttccttccgggcgcaaaaccgtgagctggatttataatcgccctataaagctccagaggcggtcaggcacctgcagaggagccccgccgctccgccgactagctgcccccgcgagcaacggcctcgtgatttccccgccgatccggtccccgcctccccactctgcccccgcctaccccggagccgtgcagccgcctctccgaatctctctcttctcctggcgctcgcgtgcgagagggaactagcgagaacgaggaagcagctggaggtgacgccgggcagattacrcctgtcagggccgagccgarcggatcgctgggcgctgtgcagaggaaaggcgggagtgcccggctcgctgtcgcagagccgagcctgtttctgcgccggaccagtcgmggactctggacagtagaggccccgggacgaccgagctgatggcgtcttcgaccccatcttcgtccgcaacctcctcgaacgcgggascggaccccaataccactaacctgcgccccacaacgtacgatacctggtgcggcgtggcccayggatgcaccagaaaactggggctcaagatctgcggcttcttgcaaaggaccaacagcctggaagagaagagtcgccttgtgagtgccttcaaggagaggcaatcctccaagaacctgctttcctgtgaaaacagcgaccgggatgcccgcttccggcgcacagagactgacttctctaatctgtttgctagagatctgcttccggctaagaacggtgaggagcaaaccgtgcaattcctcctggaagtggtggacatactcctcaactatgtccgcaagacatttgatcgctccaccaaggtgctggactttcatcacccacaccagttgctggaaggcatggagggcttcaacttggagctctctgaccaccccgagtcyctggagcagatcctggttgactgcagagacaccttgaagtatggggttcgcacaggtcatcctcgatttttcaaccagctctccactggattggatattattggcctagctggagaatggctgacatcaacggccaataccaacatgtttacatatgaaattgcaccagtgtttgtcctcatggaacaaataacacttaagaagatgagagagatagttggatggtcaagtaaagatggtgatgggatattttctcctgggggcgccatatccaacatgtacagcatcatggctgctcgctacaagtacttcccrgaagttaagacaaagggcatggcggctgtgcctaaactggtcctcttcacctcagaacagagtcactattccataaagaaagctggggctgcacttggctttggaactgacaatgtgattttgataaagtgcaatgaaagggggaaaataattccagctgattttgaggcaaaaattcttgaagccaaacagaagggatatgttcccttttatgtcaatgcaactgctggcacgactgtttatggagcttttgatccgatacaagagattgcagatatatgtgagaaatataacctttggttgcatgtcgatgctgcctggggaggtgggctgctcatgtccaggaagcaccgccataaactcaayggcatagaaagggccaactcagtcacctggaaccctcacaagatgatgggcgtgctgttgcagtgctctgccattctygtcaaggaaaagggtatactccaaggatgcaaccagatgtgtgcaggatayctcttccagccagacaagcagtatgatgtctcctacgacaccggggacaaggcaattcagtgtggccgycacgtggatatcttcaagttctggctgatgtggaaagcaaagggcacagkgggatttgaaaaccagatcaacaaatgcytggarctggctgaatacctctatgccaagattaaaaacagagaagaatttgagatggttttcaatggcgagcctgagcacacaaacgtctgtttttggtatattccacaaagcctcaggggtgtgccagacagccctcaacgacrggaaaagctacacaaggtggctccaaaaatcaaagccctgatgatggagtcaggtacgaccatggttggctaccagccccaaggggacaaggccaacttmttccggatggtcatctccaacccagccgctacccagtctgacattgacttcctcattgaggagatagaaagactgggccaggatctgtaatcatccttcgcagaacatgagtttatgggaatgccttttccctctggyactccagaacaaacctctrtatgttgctgaaacacacaggccatttcattgagggaaaacataatatcttgaagaatattgttaaaaccttacttaaagcttgtttgttctagttagcaggaaatagtgttctttttaaaaagttgcacattaggaacagagtatatatgtacagttatacatacctctctmtatatatacatgtatagtgagtgtggcttagtaatagatcacggcatgtttcccgctccaagagaattcactttaccttcagcagttaccgaggagctaaacatgctgccaaccarcttgtccaacaactccaggaaaactgtttttcaaaacgccatgtcctaggggccragggaaatgctgttggtgagaatcgacctcactgtcagcgtttctccacctgaagtgatgatggatgagaaaaaacaccaccaaatgacaagtcacaccctccccattagtatcctgttaggggaaaatagtagcagagtcattgttacaggtgtactatggctgtatttttagagattaatttgtgtagattgtgtaaattcctgttgtctgaccttggtggtgggagggggagactatgtgtcatgatttcaatgattgtttaattgtaggtcaatgaaatatttgcttatttatattcagagatgtaccatgttaaagaggcgtcttgtattttcttcccatttgtaatgtatcttatttatatatgaagtaagttctgaaaactgtttatggtattttcgtgcatttgtgagccaaagagaaaagattaaaattagtgagatttgtatttatattagagtgcccttaaaataatgatttaagcattttactgtctgtaagagaattctaagattgtacataaagtcatatatatggaaatcctgttacttaaatagcatctgctcttctcttacgctctctgtctggctgtaygtctggtgttctcaatgcttttctagcaactgttggataataactagatctcctgtaattttgtagtagttgatgaccaatctctgtgactcgcttagctgaaacctaaggcaacatttccgaagaccttctgaagatctcagataaagtgaccaggctcacaactgtttttgaagaagggaaattcacactgtgcgttttagagtatgcaagaagaatataaataaataaaaatattctccatggagaatttgaac

SEQ ID NO: 13 - DNA, 1564 bp, Homo sapiens
ggctggggagcccacgctgcctggcgactcgggccaccgaatgtgagaccgagtccctttatgtcacyagcgcacacgctgatttgaaccctgcttcgacgtgtgtgtcatggcttaaaaatagctgctaatctgtcaacctgtcttgggcagaaacagcsgcggcgacaagcagcagctacctggcaactgaacccatcatcaccacagccactcctgcagctgccacggtttctgccacytctaagatgtgccctggtaactggctttgggcttctatgacttttatggcccgcttctcccggagtagctcaaggtctcctgttcgaactcgagggaccctggaggagatgccaacygttcaacatcctttcctcaatgtcttcgagttggagcggctcctctacacaggcaagacagcctgtaaccatgccgacgaggtctggccaggcctctatctcggagaccaggacatggctaacaaccgccgggagcttcgccgcctgggcatcacgcacgtcctcaatgcctcacacagccggtggcgaggcacgcccgaggcctatgaggggctgggcatccgctacctgggtgttgaggcccaygactcgccagcctttgacatgagcatccacttccagacggctgccgacttcatccaccgggcgctgagccagccaggagggaagatcctggtgcattgtgctgtgggcgtgagccgatccgccaccctggtactggcctacctcatgctgtaccaccaccttaccctcgtggaggccatcaagaaagtcaaagaccaccgaggcatcatccccaaccggggcttcctgaggcagctcctggccctggaccgcaggctgcggcagggtctggaagcatgaggggagggggagagaggtcaggccaggcccgtgggtaggtccctggctcccagctggagataggaggcccaggtggcaggtagcaggaggcccagatcacccatcctcccctggggtcaggagaggccgagccccaggccactgtcactctttgtgggaggggacggggagtgaggttgggcagtgtggtggatgggcacccaggaagggttgaccagggaaggaggcagctaggctgtagatggaagatggtcctgggattcgaacaccgctgggatctggccagggtgctccctgggattcacagtcccttcccctctttgtgcccaagtgtttccctctctccctcaccaaaacaaaagggccatctctgccctgcacttgtgcagaaagtcagggatacggcaagcatgaatgcaatggtgtagagttgtgtgaaacccctagcatagagacagacagcgaagagatggtgtgaaaagcttgcagaaccagacagagaaccccacagactttccactccaagcacaggaggaggtagctagcgtgtgagggttggcactaggcccacggctgctgcttgggccaaaaacatacagaggtgcatggctggcagtcttgaaattgtcactcgcttactggatccaagcgtctcgaggataaataaagatcatgaaaaa

SEQ ID NO: 14 - DNA, 1737 bp, Homo sapiens
tctgagaacacacgcatgcattccaggcggtgctgctggggctcggcggggccgtgtctggtctgcaaggcgcgcgggctcgtggggggttggctggggagcccacgctgcctggcgactcgggccaccgaatgtgagaccgagtccctttatgtcacyagcgcacacgctgatttgaaccctgcttcgacgtgtgtgtcatggcttaaaaatagctgctaatctgtcaacctgtcttgggcagaaacagcsgcggcgacagcagcaggagcgtcatggccgtggcgctgtctgcgccggcgatccgcctttcggactgaggcccagcgcagcgcttgcaaagagcagcagctacctggcaactgaacccatcatcaccacagccactcctgcagctgccacggtttctgccacytctaagatgtgccctggtaactggctttgggcttctatgacttttatggcccgcttctcccggagtagctcaaggtctcctgttcgaactcgagggaccctggaggagatgccaacygttcaacatcctttcctcaatgtcttcgagttggagcggctcctctacacaggcaagacagcctgtaaccatgccgacgaggtctggccaggcctctatctcggagaccaggacatggctaacaaccgccgggagcttcgccgcctgggcatcacgcacgtcctcaatgcctcacacagccggtggcgaggcacgcccgaggcctatgaggggctgggcatccgctacctgggtgttgaggcccaygactcgccagcctttgacatgagcatccacttccagacggctgccgacttcatccaccgggcgctgagccagccaggagggaagatcctggtgcattgtgctgtgggcgtgagccgatccgccaccctggtactggcctacctcatgctgtaccaccaccttaccctcgtggaggccatcaagaaagtcaaagaccaccgaggcatcatccccaaccggggcttcctgaggcagctcctggccctggaccgcaggctgcggcagggtctggaagcatgaggggagggggagagaggtcaggccaggcccgtgggtaggtccctggctcccagctggagataggaggcccaggtggcaggtagcaggaggcccagatcacccatcctcccctggggtcaggagaggccgagccccaggccactgtcactctttgtgggaggggacggggagtgaggttgggcagtgtggtggatgggcacccaggaagggttgaccagggaaggaggcagctaggctgtagatggaagatggtcctgggattcgaacaccgctgggatctggccagggtgctccctgggattcacagtcccttcccctctttgtgcccaagtgtttccctctctccctcaccaaaacaaaagggccatctctgccctgcacttgtgcagaaagtcagggatacggcaagcatgaatgcaatggtgtagagttgtgtgaaacccctagcatagagacagacagcgaagagatggtgtgaaaagcttgcagaaccagacagagaaccccacagactttccactccaagcacaggaggaggtagctagcgtgtgagggttggcactaggcccacggctgctgcttgggccaaaaacatacagaggtgcatggctggcagtcttgaaattgtcactcgcttactggatccaagcgtctcgaggataaataaagatcatgaaaaa

SEQ ID NO: 15 - DNA, 1515 bp, Homo sapiens
gcgggctttagcgccttttctggcggcggtagatttgaagcgcttcaaaggaccggacccagagaagaggaaaactctaccggtgcagrtaagtggtatgaggctcaagttgagcacagggatcagttgtccttgtttttttttggtcttttcttcatttgaagmttaagtattggagccatgggaataaaggttcaacgtcctcgatgtttttttgacattgccattaacaatcaacctgctggaagagttgtctttgaattattttctgatgtgtgccccaaaacatgcgagaactttcgttgtctttgtacaggtgaaaaggggaccgggaaatcaacwcagaaaccattacattataagagttgtctctttcacagagttgtcaaggattttatggttcaaggtggtgacttcagtgaaggaaatggacgaggaggggaatctatctatggaggattttttgaagacgagagtttcgctgttaaacacaacaaagaatttctcttgtcaatggccaacagagggaaggatacaaatggttcacagttcttcataacaacgaaaccaactcctcatttagatgggcatcatgttgtttttggacaagtaatctctggtcaagaagttgtaagagagattgaaaaccagaaaacagatgcagctagcaaaccgtttgcggaggtacggatactcagttgtggagagctgattcccaaatctaaagttaagaaagaagaaaagaaaaggcataaatcatcatcatcttcctcctcctcatctaktgactcagatagctcaagtgattctcagtcctcttctgattcctctgattccgaaagtgctactgaagaraaatcaaagaaaagaaaaaagaaacatcggaaaaattcccgaaaacacaagaaagaaaagaaaaagcgaaagaaaagcaagaagagtgcatctagtgagagtgaagctgaaaatcttgaagcacaaccccagtctactgtccgtccagaagagatccctcctatacctgaaaatagattcctaatgagaaaaagtcctcctaaagctgatgagaaggaaaggaaaaacagagagagagaaagggaaagagagtgtaatccacctaactcccagcctgcttcataccagagacgacttttagttactagatctggcaggaaaattaaaggaagaggaccaagggtaggtgattctttccccagagatcttcacaatattgcatttgtcttccttaaataattttagggtgtttcttaaatattattttaatgtgcaagtaactaaaatttaggggagatgcaggcattgaattatatattctctttcttaagcagcttctgtatgttggtacttcccaacagaaaatccatgagatatgaatagattttacatttrcatggtataaaatgggatcgaggtctttcttgtctcccgtgtttcttggcaatcactgtatctctattcttgttaaaaataaataaaaattaaccctattcttgt

SEQ ID NO: 16 - DNA, 2712 bp, Homo sapiens
cgcgcttccggtgcgacgctgtctctccatgccaggactgagttgtgggggagggaggcggttagcgggctttagcgccttttctggcggcggtagatttgaagcgcttcaaaggaccggacccagagaagaggaaaactctaccggtgcaggagcacagggatcagttgtccttgtttttttttggtcttttcttcatttgaagmttaagtattggagccatgggaataaaggttcaacgtcctcgatgtttttttgacattgccattaacaatcaacctgctggaagagttgtctttgaattattttctgatgtgtgccccaaaacatgcgagaactttcgttgtctttgtacaggtgaaaaggggaccgggaaatcaacwcagaaaccattacattataagagttgtctctttcacagagttgtcaaggattttatggttcaaggtggtgacttcagtgaaggaaatggacgaggaggggaatctatctatggaggattttttgaagacgagagtttcgctgttaaacacaacaaagaatttctcttgtcaatggccaacagagggaaggatacaaatggttcacagttcttcataacaacgaaaccaactcctcatttagatgggcatcatgttgtttttggacaagtaatctctggtcaagaagttgtaagagagattgaaaaccagaaaacagatgcagctagcaaaccgtttgcggaggtacggatactcagttgtggagagctgattcccaaatctaaagttaagaaagaagaaaagaaaaggcataaatcatcatcatcttcctcctcctcatctaktgactcagatagctcaagtgattctcagtcctcttctgattcctctgattccgaaagtgctactgaagaraaatcaaagaaaagaaaaaagaaacatcggaaaaattcccgaaaacacaagaaagaaaagaaaaagcgaaagaaaagcaagaagagtgcatctagtgagagtgaagctgaaaatcttgaagcacaaccccagtctactgtccgtccagaagagatccctcctatacctgaaaatagattcctaatgagaaaaagtcctcctaaagctgatgagaaggaaaggaaaaacagagagagagaaagggaaagagagtgtaatccacctaactcccagcctgcttcataccagagacgacttttagttactagatctggcaggaaaattaaaggaagaggaccaaggcgttatcgaactccttccagatccagatcaagggatcgtttcagacgtagtgagactcctccacattggaggcaagagatgcagagagctcaaagaatgagggtatcaagtggtgaaagatggatcaagggggataagagtgagttgaatgaaataaaagaaaatcagagaagtccagttagagtaaaagagagaaaaataacagatcacaggaatgtatctgagagtccaaacagaaaaaatgaaaaggagaagaaagttaaagaccataaatctaacagcaaagagagagacatcagaagaaattcagaaaaagawgacaagtataaaaacaaagtgaagaaaagggccaaatctaaaagtaggagtaagagcaaagagaaatcaaagagtaaagaaagagattcaaaacataatagaaatgaagaaaagaggatgaggtcaaggagtaaaggaagggatcatgaaaatgttaaagaaaaagaaaagcagtctgattctaaaggaaaagatcaggaaaggagtagaagtaaagagaagtctaaacagttagaatcaaagagtaatgagcatgatcacagtaaaagtaaggaaaaggatagacgcgcacaatccaggagtagagaatgtgatataactaaaggtaaacacagttataatagcagaacaagagaacgaagcagaagtagggacagaagcagaagagtgcgatcaagaacccatgacagagatcgcagcagaagcaaggagtaccatagatacagagaacaggaatacaggagaagaggacggtcacgaagccgagagagaagaacaccaccaggaagatcaagaagtaaagataggaggagaaggaggagagactcacggagctcagagagagaagaaagtsaaagcagaaacaaagacaaatacagaaaccaagagagtaagagctcacacagaaaagaaaattctgagagtgagaaaagaatgtactctaaaagtcgtgatcataatagctcaaataacagcagggaaaaaaaggctgatagagatcaaagtcccttctcaaaaataaaacaaagcagtcaggacratgaattaaagtcctccatgttgaaaaataaggaggatgagaagatcagatcctcagtggaaaaagaaaaccaaaaatcaaaaggtcaagaaaatgaccatgtacatgaaaaaaataaaaaatttgatcatgaatcaagccctggaacagatgaagacaaaagcggatgagtgagttatataaacttacttccattctgtttcggattttaagtttgagagacttgctaatgaatctcctttatgttgttttccttttcattgtttttggattgttttatgtttgtccttttttttcttaatgtggatttcattgagttgattttttgataatctgcaatctggataatttgtactgctaaagttttaataaactcgacatgagaaaaacactttr

SEQ ID NO: 17 - DNA, 2671 bp, Homo sapiens
gcgggctttagcgccttttctggcggcggtagatttgaagcgcttcaaaggaccggacccagagaagaggaaaactctaccggtgcagrtaagtggtatgaggctcaagttgagcacagggatcagttgtccttgtttttttttggtcttttcttcatttgaagmttaagtattggagccatgggaataaaggttcaacgtcctcgatgtttttttgacattgccattaacaatcaacctgctggaagagttgtctttgaattattttctgatgtgtgccccaaaacatgcgagaactttcgttgtctttgtacaggtgaaaaggggaccgggaaatcaacwcagaaaccattacattataagagttgtctctttcacagagttgtcaaggattttatggttcaaggtggtgacttcagtgaaggaaatggacgaggaggggaatctatctatggaggattttttgaagacgagagtttcgctgttaaacacaacaaagaatttctcttgtcaatggccaacagagggaaggatacaaatggttcacagttcttcataacaacgaaaccaactcctcatttagatgggcatcatgttgtttttggacaagtaatctctggtcaagaagttgtaagagagattgaaaaccagaaaacagatgcagctagcaaaccgtttgcggaggtacggatactcagttgtggagagctgattcccaaatctaaagttaagaaagaagaaaagaaaaggcataaatcatcatcatcttcctcctcctcatctaktgactcagatagctcaagtgattctcagtcctcttctgattcctctgattccgaaagtgctactgaagaraaatcaaagaaaagaaaaaagaaacatcggaaaaattcccgaaaacacaagaaagaaaagaaaaagcgaaagaaaagcaagaagagtgcatctagtgagagtgaagctgaaaatcttgaagcacaaccccagtctactgtccgtccagaagagatccctcctatacctgaaaatagattcctaatgagaaaaagtcctcctaaagctgatgagaaggaaaggaaaaacagagagagagaaagggaaagagagtgtaatccacctaactcccagcctgcttcataccagagacgacttttagttactagatctggcaggaaaattaaaggaagaggaccaaggcgttatcgaactccttccagatccagatcaagggatcgtttcagacgtagtgagactcctccacattggaggcaagagatgcagagagctcaaagaatgagggtatcaagtggtgaaagatggatcaagggggataagagtgagttgaatgaaataaaagaaaatcagagaagtccagttagagtaaaagagagaaaaataacagatcacaggaatgtatctgagagtccaaacagaaaaaatgaaaaggagaagaaagttaaagaccataaatctaacagcaaagagagagacatcagaagaaattcagaaaaagawgacaagtataaaaacaaagtgaagaaaagggccaaatctaaaagtaggagtaagagcaaagagaaatcaaagagtaaagaaagagattcaaaacataatagaaatgaagaaaagaggatgaggtcaaggagtaaaggaagggatcatgaaaatgttaaagaaaaagaaaagcagtctgattctaaaggaaaagatcaggaaaggagtagaagtaaagagaagtctaaacagttagaatcaaagagtaatgagcatgatcacagtaaaagtaaggaaaaggatagacgcgcacaatccaggagtagagaatgtgatataactaaaggtaaacacagttataatagcagaacaagagaacgaagcagaagtagggacagaagcagaagagtgcgatcaagaacccatgacagagatcgcagcagaagcaaggagtaccatagatacagagaacaggaatacaggagaagaggacggtcacgaagccgagagagaagaacaccaccaggaagatcaagaagtaaagataggaggagaaggaggagagactcacggagctcagagagagaagaaagtsaaagcagaaacaaagacaaatacagaaaccaagagagtaagagctcacacagaaaagaaaattctgagagtgagaaaagaatgtactctaaaagtcgtgatcataatagctcaaataacagcagggaaaaaaaggctgatagagatcaaagtcccttctcaaaaataaaacaaagcagtcaggacratgaattaaagtcctccatgttgaaaaataaggaggatgagaagatcagatcctcagtggaaaaagaaaaccaaaaatcaaaaggtcaagaaaatgaccatgtacatgaaaaaaataaaaaatttgatcatgaatcaagccctggaacagatgaagacaaaagcggatgagtgagttatataaacttacttccattctgtttcggattttaagtttgagagacttgctaatgaatctcctttatgttgttttccttttcattgtttttggattgttttatgtttgtccttttttttcttaatgtggatttcattgagttgattttttgataatctgcaatctggataatttgtactgctaaagttttaataaactcgacatgagaaaaacactttg

SEQ ID NO: 18 - DNA, 1653 bp, Homo sapiens
atgttcgcggaagcggcaaagacgacacggccttgtgggatggcggagtttaaggagaagcctgaggccccgactgagcagctggatgtcgcgtgcggccaggaaaacttgccggtgggcgcgtggcccccgggggccgcgccggcgcccttccagtacactcctgatcatgtagttggacctggagcagacattgatcccactcaaataacctttcccggatgcatttgtgtcaaaactccctgcctccctggcacttgctcctgtctccrccatggagagaactatgatgataactcatgccttagagatataggatctggaggaaagtatgcagagcctgtttttgaatgcaatgtcctgtgccgatgcagtgaccactgcagaaacagagtggtccagaaaggtctacagttccacttccaagtgttcaagacgcataaaaaaggctggggacttcgtaccttggaatttataccgaaaggaaggtttgtctgtgaatatgctggtgaggttttaggattctctgaagttcagagaagaattcacttacaaacaaaatccgactccaattacattatagccatcagggaacatgtttataatgggcaggtaatggaaacatttgttgaccctacttatataggaaatattggaagattccttaatcattcttgtgagccaaaccttttgatgattcctgtccgaattgmctcaatggtacctaagttggcactttttgcagccaaagatattgtgccagaagaagaactctcttatgattattcaggaagatatcttaatctaacagtcagtgaagacaaagaaaggctagatcatgggaaactaaggaaaccttgttactgtggtgccaaatcatgtactgctttcctgccttttgacagttctctgtactgccccgtagaaaagtcgaacatcagttgtggaaatgagaaggaacccagcatgtgtggctcagccccttctgtgttcccctcctgcaagcgattgacccttgaggtgagtctgttcagtgataagcagcttgcccctccctrtagtggaagacagtggttggctagctttacctctgsctagttacataagtttaactcrggaatgtggcagagactgcaagttgtccatcagtatcctttcccctttctgtaatagaattctccatttaacaaaagtacatgactacccagaatactcactttcctagttagatttgtcttagtgactgttctagttaataggatataagcaaaaatgacaagtccttaaatggagatatcctgcccttcacctcctctttcttcctgctggctggaatgtatacatgatgactggaactggagcagtcatcctagaccccaggatgaccctgggaaaggaagccattgcatagaaaaatcaacaaggttaaaaggagtctaggtgtctggtactgtagaacatcctgtcagtcgtgatctgacacctttgtactttcaggtgagaaatagtctctcccttgcttaagtcactgttattgtaagttttctagcactaacatcgaacctaataatgatccaagaaacccttgtggctgcatacctaaaccctgcttgccaaccaattttaacagtaataaagctgactttttgattt

SEQ ID NO: 19 - DNA, 2078 bp, Homo sapiens
atgttcgcggaagcggcaaagacgacacggccttgtgggatggcggagtttaaggagaagcctgaggccccgactgagcagctggatgtcgcgtgcggccaggaaaacttgccggtgggcgcgtggcccccgggggccgcgccggcgcccttccagtacactcctgatcatgtagttggacctggagcagacattgatcccactcaaataacctttcccggatgcatttgtgtcaaaactccctgcctccctggcacttgctcctgtctccrccatggagagaactatgatgataactcatgccttagagatataggatctggaggaaagtatgcagagcctgtttttgaatgcaatgtcctgtgccgatgcagtgaccactgcagaaacagagtggtccagaaaggtctacagttccacttccaagtgttcaagacgcataaaaaaggctggggacttcgtaccttggaatttataccgaaaggaaggtttgtctgtgaatatgctggtgaggttttaggattctctgaagttcagagaagaattcacttacaaacaaaatccgactccaattacattatagccatcagggaacatgtttataatgggcaggtaatggaaacatttgttgaccctacttatataggaaatattggaagattccttaatcattcttgtgagccaaaccttttgatgattcctgtccgaattgmctcaatggtacctaagttggcactttttgcagccaaagatattgtgccagaagaagaactctcttatgattattcaggaagatatcttaatctaacagtcagtgaagacaaagaaaggctagatcatgggaaactaaggaaaccttgttactgtggtgccaaatcatgtactgctttcctgccttttgacagttctctgtactgccccgtagaaaagtcgaacatcagttgtggaaatgagaaggaacccagcatgtgtggctcagccccttctgtgttcccctcctgcaagcgattgacccttgagactatgaaaatgatgttagacaaaaagcaaattcgagcaattttcttattcgagttcaaaatgggtcgtaaagcagcagaaacaactcgcaacatcaacaatgcatttggcccaggaactgctaacgaacgtacagtgcagtggtggttcaagaagttttgcaaaggagatgagagccttgaagatgaggagcgtagtggccggccatcagaagttgacaacgaccagttgagagcaatcatcgaagctgatccccttacaactacacgagaagttgctgaagaactcaatgtcaaccattctacggtcgttcgrcatttgaagcaaattggaaaggtgaaaaagctcgataagtgggtgcctcatgagctgactgaaaatcaaaaaaatcgtcgttttgaagtgtcatcttctcttattctacgcaaccacaacgaaccatttctcgatcggattgtgacgtgtgatgaaaagtggattttatatgacaaccggcgacgatcagctcagtggttggatcaagaagaagctccaaagcacttcccaaagccaatcttgcacccaaaaaaggtcatggtcactatttggtggtctgctgctggtctgatccactacagctttctgaatcccggtgaaaccattacatctgagaagtatgctcaggaaatcgatgagatgaaccaaaaactgcaacgcctgcagctggcattggtcaacagaaagggcccaattcttctccacgacaatgcccgaccgcatgttgcacaacccacacttcaaaagttgaatgaattgggctatgaagttttgcctcatccaccgtattcacctgacctcttgccaaccaactaccacgtctttaagcatctcaacaactttttgcagggaaaacgcttccacaaccagcaggatgcaraaaatgctttccaagagttcgtcgaatcccaaagcacggatttttacgctacaggaataaaccaacttatttctcgttggcaaaaatgtgttgattgtaatggttcctattttgattaataaaaatgcgttgagcctagtta

SEQ ID NO: 20 - DNA, 1437 bp, Homo sapiens
gcctcccagtcgcgaccttttgtcttctcttacagcgcacccgttggtgcgcgggaataggtgtgcatgccccggcctgggcctttttctgttgacccacggcatcaccttagcaagggtgttgtccttttcagtccattccctgaagcgcagaaccggaggccttgtgagaacctggctttttgtccagtcctgtcctcagaactcaaggaggcatcacggggggagtcatttacctccctggtctcaggtgtctctcacagttctctgtactgccccgtagaaaagtcgaacatcagttgtggaaatgagaaggaacccagcatgtgtggctcagccccttctgtgttcccctcctgcaagcgattgacccttgagactatgaaaatgatgttagacaaaaagcaaattcgagcaattttcttattcgagttcaaaatgggtcgtaaagcagcagaaacaactcgcaacatcaacaatgcatttggcccaggaactgctaacgaacgtacagtgcagtggtggttcaagaagttttgcaaaggagatgagagccttgaagatgaggagcgtagtggccggccatcagaagttgacaacgaccagttgagagcaatcatcgaagctgatccccttacaactacacgagaagttgctgaagaactcaatgtcaaccattctacggtcgttcgrcatttgaagcaaattggaaaggtgaaaaagctcgataagtgggtgcctcatgagctgactgaaaatcaaaaaaatcgtcgttttgaagtgtcatcttctcttattctacgcaaccacaacgaaccatttctcgatcggattgtgacgtgtgatgaaaagtggattttatatgacaaccggcgacgatcagctcagtggttggatcaagaagaagctccaaagcacttcccaaagccaatcttgcacccaaaaaaggtcatggtcactatttggtggtctgctgctggtctgatccactacagctttctgaatcccggtgaaaccattacatctgagaagtatgctcaggaaatcgatgagatgaaccaaaaactgcaacgcctgcagctggcattggtcaacagaaagggcccaattcttctccacgacaatgcccgaccgcatgttgcacaacccacacttcaaaagttgaatgaattgggctatgaagttttgcctcatccaccgtattcacctgacctcttgccaaccaactaccacgtctttaagcatctcaacaactttttgcagggaaaacgcttccacaaccagcaggatgcaraaaatgctttccaagagttcgtcgaatcccaaagcacggatttttacgctacaggaataaaccaacttatttctcgttggcaaaaatgtgttgattgtaatggttcctattttgattaataaaaatgcgttgagcctagttat

SEQ ID NO: 21 - DNA, 3947 bp, Homo sapiens
catcagcaatctatcagggaacggcggtggccggtgcggcgtgttcggtggcggctctggccgctcaggcgcctgcggctgggtgagcgcacgcgaggcggcgaggcggcagcgtgtttctaggtcgtggcgtcgggcttccggagctttgscggcagctaggggaggatggcggagtcttcggataagctctatcgagtcgagtacgccaagagcgggcgcgcctcttgcaagaaatgcagcgagagcatccccaaggactcgctccggatggccatcatggtgcagtcgcccatgtttgatggaaaagtcccacactggtaccacttstcctgcttctggaaggtgggccactccatccggcaccctgacgttgaggtggatgggttctctgagcttcggtgggatgaycagcagaaagtcaagaagacagcggaagctggaggagtgacaggcaaaggccaggatggaattggtagcaaggcagagaagactctgggtgactttgcagcagagtatgccaagtccaacagaagtacgtgcaaggggtgtatggagaagatagaaaagggccaggtgcgcctgtccaagaagatggtggacccggagaagccacagctaggcatgattgaccgctggtaccatccaggctgctttgtcaagaacagggaggagctgggtttccggcccgagtacagtgcgagtcagctcaagggcttcagcctccttrctacagaggataaagaagccctgaagaagcagctcccaggagtcaagagtgaaggaaagagaaaaggcgatgaggtggatggagtggatgaagtggcgaagaagaaatctaaaaaagaaaaagacaaggatagtaagcttgaaaaagccctaaaggctcagaacgacctgatctggaacatcaaggacgagctaaagaaagtgtgttcaactaatgacctgaaggagctactcatcttcaacaagcagcaagtgccttctggggagtcggcgatcttggaccgagtagcygatggcatggtgttcggtgccctccttccctgcgaggaatgctcgggtcagctggtcttcaagagcgatgcctattactgcactggggacgtcactgcctggaccaagtgtatggtcaagacacagacacccaaccggaaggagtgggtaaccccaaaggaattccgagaaatctcttacctcaagaaattgaaggttaaaaarcaggaccgtatattccccccagaaaccagcgcctccgtggcggccacgcctccgccctccacagcctcggctcctgctgctgtgaactcctctgcttcagcagataagccattatccaacatgaagatcctgactctcgggaagctgtcccggaacaaggatgaagtgaaggccatgattgagaaactyggggggaagttgacggggacggccaacaaggcttccctgtgcatcagcaccaaaaaggaggtggaaaagatgaataagaagatggaggaagtaaaggaagccaacatccgagttgtgtctgaggacttyctccaggacgtctccgcctccaccaagagccttcaggagttgttcttagcgcacatcttgtccccttggggggcagaggtgaaggcagagcctgttgaagttgtggccccaagagggaagtcaggggctgcgctctccaaaaaaagcaagggccaggtcaaggaggaaggtatcaacaaatctgaaaagagaatgaaattaactcttaaaggaggagcagctgtggatcctgattctggactggaacactctgcgcatgtcctggagaaaggtgggaaggtcttcagtgccacccttggcctggtggacatcgttaaaggaaccaactcctactacaagctgcagcttctggaggacgacaaggaaaacaggtattggatattcaggtcctggggccgtgtgggtacggtgatcggtagcaacaaactggaacagatgccgtccaaggaggatgccattgagcasttcatgaaattatatgaagaaaaaaccgggaacgcttggcactccaaaaatttcacgaagtatcccaaaaagttctaccccctggagattgactatggccaggatgaagaggcagtgaagaagctgacagtaaatcctggcaccaagtccaagctccccaagccagttcaggacctcatcaagatgatctttgatgtggaaagtatgaagaaagccatggtggagtatgagatcgaccttcagaagatgcccttggggaagctgagcaaaaggcagatccaggccgcatactccatcctcagtgaggtccagcaggcggtgtctcagggcagcagcgactctcagatcctggatctctcaaatcgcttttacaccctgatcccccacgactttgggatgaagaagcctccgctcctgaacaatgcagacagtgtgcaggccaaggyggaaatgcttgacaacctgctggacatcgaggtggcctacagtctgctcaggggagggtctgatgatagcagcaaggatcccatcgatgtcaactatgagaagctcaaaactgacattaaggtggttgacagagattctgaagaagccgagatcatcaggaagtatgttaagaacactcatgcaaccacacacaatgcgtatgacttggaagtcatcgatatctttaagatagagcgtgaaggcgaatgccagcgttacaagccctttaagcagcttcataaccgaagattgctgtggcacgggtccaggaccaccaactttgctgggatcctgtcccagggtcttcggatagccccgcctgaagcgcccgtgacaggctacatgtttggtaaagggatctatttcgctgacatggtctccaagagtgccaactactrccatacgtctcagggagacccaatagscttaatcctgttgggagaagttgcccttggaaacatgtatgaactgaagcacgcttcacatatcagcargttacccaagggcaagcacagtgtcaaaggtttgggcaaaactacccctgatccttcagctaacattagtctggatggtgtagacgttcctcttgggaccgggatttcatctggtgtgaatgacacctctctactatataacgagtacattgtctatgatattgctcaggtaaatctgaagtatctgctgaaactgaaattcaattttaagacctccctgtggtaattgggagaggtagccgagtcacacccggtggctstggtatgaattcacccgaagcgcttctgcaccaactcacctggccgctaagttgctgatgggtagtacctgtactaaaccacctcagaaaggattttacagaaacgtgttaaaggttttctctaacttctcaagtcccttgttttgtgttgtttttgttttttcttgccaggtagataaaactgacatagagaaaaggctggagagmgattctgttgcatagactagtcctatggaaaaaaccaagcttcgttagaatgtctgccttactggtttccccagggaaggaaaaatacacttccacccttttttctaagtgttcgtctttagttttgattttggaaagatgttaagcatttatttttagttaaaaataaaaactaatttcatactatttagattttcttttttatcttgcacttattgtcccctttttagttttttttgtttgcctcttgtggtgaggggtgtgggaagaccaaaggaaggaacgctaacaatttctcatacttagaaacaaaaagagctttccttctccaggaayactgaacatgggagctcttgaaatatgtagtattaaaagttgcatttgaaattcttgactttcttatgggcacttttgtcttccaaattaaaactctaccacaaatatacttacccaagggctaatagtaatactcgattaaaaatgcagatgcctt

SEQ ID NO: 22 - DNA, 3982 bp, Homo sapiens
catcagcaatctatcagggaacggcggtggccggtgcggcgtgttcggtggcggctctggccgctcaggcgcctgcggctgggtgagcgcacgcgaggcggcgaggcggcagcgtgtttctaggtcgtggcgtcgggcttccggagctttgscggcagctaggggaggatggcggagtcttcggataagctctatcgagtcgagtacgccaagagcgggcgcgcctcttgcaagaaatgcagcgagagcatccccaaggactcgctccggatggccatcatggtgcagtcgcccatgtttgatggaaaagtcccacactggtaccacttstcctgcttctggaaggtgggccactccatccggcaccctgacgttgaggtggatgggttctctgagcttcggtgggatgaycagcagaaagtcaagaagacagcggaagctggaggagtgacaggcaaaggccaggatggaattggtagcaaggcagagaagactctgggtgactttgcagcagagtatgccaagtccaacagaagtacgtgcaaggggtgtatggagaagatagaaaagggccaggtgcgcctgtccaagaagatggtggacccggagaagccacagctaggcatgattgaccgctggtaccatccaggctgctttgtcaagaacagggaggagctgggtttccggcccgagtacagtgcgagtcagctcaagggcttcagcctccttrctacagaggataaagaagccctgaagaagcagctcccaggagtcaagagtgaaggaaagagaaaaggcgatgaggtggatggagtggatgaagtggcgaagaagaaatctaaaaaagaaaaagacaaggatagtaagcttgaaaaagccctaaaggctcagaacgacctgatctggaacatcaaggacgagctaaagaaagtgtgttcaactaatgacctgaaggagctactcatcttcaacaagcagcaagtgccttctggggagtcggcgatcttggaccgagtagcygatggcatggtgttcggtgccctccttccctgcgaggaatgctcgggtcagctggtcttcaagagcgatgcctattactgcactggggacgtcactgcctggaccaagtgtatggtcaagacacagacacccaaccggaaggagtgggtaaccccaaaggaattccgagaaatctcttacctcaagaaattgaaggttaaaaarcaggaccgtatattccccccagaaaccagcgcctccgtggcggccacgcctccgccctccacagcctcggctcctgctgctgtgaactcctctgcttcagcagataagccattatccaacatgaagatcctgactctcgggaagctgtcccggaacaaggatgaagtgaaggccatgattgagaaactyggggggaagttgacggggacggccaacaaggcttccctgtgcatcagcaccaaaaaggaggtggaaaagatgaataagaagatggaggaagtaaaggaagccaacatccgagttgtgtctgaggacttyctccaggacgtctccgcctccaccaagagccttcaggagttgttcttagcgcacatcttgtccccttggggggcagaggtgaaggcagagcctgttgaagttgtggccccaagagggaagtcaggggctgcgctctccaaaaaaagcaagggccaggtcaaggaggaaggtatcaacaaatctgaaaagagaatgaaattaactcttaaaggaggagcagctgtggatcctgattctggactggaacactctgcgcatgtcctggagaaaggtgggaaggtcttcagtgccacccttggcctggtggacatcgttaaaggaaccaactcctactacaagctgcagcttctggaggacgacaaggaaaacaggtattggatattcaggtcctggggccgtgtgggtacggtgatcggtagcaacaaactggaacagatgccgtccaaggaggatgccattgagcasttcatgaaattatatgaagaaaaaaccgggaacgcttggcactccaaaaatttcacgaagtatcccaaaaagttctaccccctggagattgactatggccaggatgaagaggcagtgaagaagctgacagtaaatcctggcaccaagtccaagctccccaagccagttcaggacctcatcaagatgatctttgatgtggaaagtatgaagaaagccatggtggagtatgagatcgaccttcagaagatgcccttggggaagctgagcaaaaggcagatccaggccgcatactccatcctcagtgaggtccagcaggcggtgtctcagggcagcagcgactctcagatcctggatctctcaaatcgcttttacaccctgatcccccacgactttgggatgaagaagcctccgctcctgaacaatgcagacagtgtgcaggccaaggyggaaatgcttgacaacctgctggacatcgaggtggcctacagtctgctcaggggagggtctgatgatagcagcaaggatcccatcgatgtcaactatgagaagctcaaaactgacattaaggtggttgacagagattctgaagaagccgagatcatcaggaagtatgttaagaacactcatgcaaccacacacaatgcgtatgacttggaagtcatcgatatctttaagatagagcgtgaaggcgaatgccagcgttacaagccctttaagcagcttcataaccgaagattgctgtggcacgggtccaggaccaccaactttgctgggatcctgtcccagggtcttcggatagccccgcctgaagcgcccgtgacaggctacatgtttggtaaagggatctatttcgctgacatggtctccaagagtgccaactactrccatacgtctcagggagacccaatagscttaatcctgttgggagaagttgcccttggaaacatgtatgaactgaagcacgcttcacatatcagcargttacccaagggcaagcacagtgtcaaaggtttgggcaaaactacccctgatccttcagctaacattagtctggatggtgtagacgttcctcttgggaccgggatttcatctggtgtgaatgacacctctctactatataacgagtacattgtctatgatattgctcaggtaaatctgaagtatctgctgaaactgaaattcaattttaagacctccctgtggtaattgggagaggtagccgagtcacacccggtggctstggtatgaattcacccgaagcgcttctgcaccaactcacctggccgctaagttgctgatgggtagtacctgtactaaaccacctcagaaaggattttacagaaacgtgttaaaggttttctctaacttctcaagtcccttgttttgtgttgtgtctgtggggaggggttgttttggggttgtttttgttttttcttgccaggtagataaaactgacatagagaaaaggctggagagmgattctgttgcatagactagtcctatggaaaaaaccaagcttcgttagaatgtctgccttactggtttccccagggaaggaaaaatacacttccacccttttttctaagtgttcgtctttagttttgattttggaaagatgttaagcatttatttttagttaaaaataaaaactaatttcatactatttagattttcttttttatcttgcacttattgtcccctttttagttttttttgtttgcctcttgtggtgaggggtgtgggaagaccaaaggaaggaacgctaacaatttctcatacttagaaacaaaaagagctttccttctccaggaayactgaacatgggagctcttgaaatatgtagtattaaaagttgcatttgaaattcttgactttcttatgggcacttttgtcttccaaattaaaactctaccacaaatatacttacccaagggctaatagtaatactcgattaaaaatgcagatgccttctcta

SEQ ID NO: 23 - DNA, 3200 bp, Homo sapiens
catcagcaatctatcagggaacggcggtggccggtgcggcgtgttcggtggcggctctggccgctcaggcgcctgcggctgggtgagcgcacgcgaggcggcgaggcggcagcgtgtttctaggtcgtggcgtcgggcttccggagctttgscggcagctaggggaggatggcggagtcttcggataagctctatcgagtcgagtacgccaagagcgggcgcgcctcttgcaagaaatgcagcgagagcatccccaaggactcgctccggatggccatcatggtgcagtcgcccatgtttgatggaaaagtcccacactggtaccacttstcctgcttctggaaggtgggccactccatccggcaccctgacgttgaggtggatgggttctctgagcttcggtgggatgaycagcagaaagtcaagaagacagcggaagctggaggagtgacagagaagactctgggtgactttgcagcagagtatgccaagtccaacagaagtacgtgcaaggggtgtatggagaagatagaaaagggccaggtgcgcctgtccaagaagatggtggacccggagaagccacagctaggcatgattgaccgctggtaccatccaggctgctttgtcaagaacagggaggagctgggtttccggcccgagtacagtgcgagtcagctcaagggcttcagcctccttrctacagaggataaagaagccctgaagaagcagctcccaggagtcaagagtgaaggaaagagaaaaggcgatgaggtggatggagtggatgaagtggcgaagaagaaatctaaaaaagaaaaagacaaggatagtaagcttgaaaaagccctaaaggctcagaacgacctgatctggaacatcaaggacgagctaaagaaagtgtgttcaactaatgacctgaaggagctactcatcttcaacaagcagcaagtgccttctggggagtcggcgatcttggaccgagtagcygatggcatggtgttcggtgccctccttccctgcgaggaatgctcgggtcagctggtcttcaagagcgatgcctattactgcactggggacgtcactgcctggaccaagtgtatggtcaagacacagacacccaaccggaaggagtgggtaaccccaaaggtaaggggtaggggaagatcctgggatctgttgggagaaaaacctggccccactttctgcgcttgtttatacttcaggtccctgagattgcagggccatgttcctcagacttctttacagctgcgtcatcctgtttaccagaatataaaattacatgtttgcaaactacgcaaatataagccattatccaacatgaagatcctgactctcgggaagctgtcccggaacaaggatgaagtgaaggccatgattgagaaactyggggggaagttgacggggacggccaacaaggcttccctgtgcatcagcaccaaaaaggaggtggaaaagatgaataagaagatggaggaagtaaaggaagccaacatccgagttgtgtctgaggacttyctccaggacgtctccgcctccaccaagagccttcaggagttgttcttagcgcacatcttgtccccttggggggcagaggtgaaggcagagcctgttgaagttgtggccccaagagggaagtcaggggctgcgctctccaaaaaaagcaagggccaggtcaaggaggaaggtatcaacaaatctgaaaagagaatgaaattaactcttaaaggaggagcagctgtggatcctgattctggactggaacactctgcgcatgtcctggagaaaggtgggaaggtcttcagtgccacccttggcctggtggacatcgttaaaggaaccaactcctactacaagctgcagcttctggaggacgacaaggaaaacaggtattggatattcaggtcctggggccgtgtgggtacggtgatcggtagcaacaaactggaacagatgccgtccaaggaggatgccattgagcasttcatgaaattatatgaagaaaaaaccgggaacgcttggcactccaaaaatttcacgaagtatcccaaaaagttctaccccctggagattgactatggccaggatgaagaggcagtgaagaagctgacagtaaatcctggcaccaagtccaagctccccaagccagttcaggacctcatcaagatgatctttgatgtggaaagtatgaagaaagccatggtggagtatgagatcgaccttcagaagatgcccttggggaagctgagcaaaaggcagatccaggccgcatactccatcctcagtgaggtccagcaggcggtgtctcagggcagcagcgactctcagatcctggatctctcaaatcgcttttacaccctgatcccccacgactttgggatgaagaagcctccgctcctgaacaatgcagacagtgtgcaggccaaggyggaaatgcttgacaacctgctggacatcgaggtggcctacagtctgctcaggggagggtctgatgatagcagcaaggatcccatcgatgtcaactatgagaagctcaaaactgacattaaggtaacaggagattctgaagaagccgagatcatcaggaagtatgttaagaacactcatgcaaccacacacaatgcgtatgacttggaagtcatcgatatctttaagatagagcgtgaaggcgaatgccagcgttacaagccctttaagcagcttcataaccgaagattgctgtggcacgggtccaggaccaccaactttgctgggatcctgtcccagggtcttcggatagccccgcctgaagcgcccacaggctacatgtttggtaaagggatctatttcgctgacatggtctccaagagtgccaactactrccatacgtctcagggagacccaatagscttaatcctgttgggagaagttgcccttggaaacatgtatgaactgaagcacgcttcacatatcagcargttacccaagggcaagcacagtgtcaaaggtttgggcaaaactacccctgatccttcagctaacattagtctggatggtgtagacgttcctcttgggaccgggatttcatctggtgtgaatgacacctctctactatataacgagtacattgtctatgatattgctcaggtagataaaactgacatagagaaaaggctggagagmgattctgttgcatagactag

SEQ ID NO: 24 - DNA, 3706 bp, Homo sapiens
tgaagtggtagcagttcctcctaactccygccagaaacagctctcctcaacatgagagctgcacccctcctcctggccagggcagcaagccttagccttggcttcttgtttctgctttttttctggctagaccgaagtgtactagccaaggagttgaagtttgtgactttggtgtttcggcatggagaccgaagtcccattgacacctttcccactgaccccataaaggaatcctcatggccacaaggatttggccaactcacccagctgggcatggagcagcattatgaacttggagagtatataagaaagagatatagaaaattcttgaatgagtcctataaacatgaacaggtttatattcgaagcacagacgttgaccggactttgatgagtgctatgacaaacctggcagccctgtttcccccagaaggtgtcagcatctggaatcctatcctactctggcagcccatcccggtgcacacagttcctctttctgaagatcagttgctatacctgcctttcaggaactgccctcgttttcaagaacttgagagtgagactttgaaatcagaggaattccagaagaggctgcacccttataaggattttatagctaccttgggaaaactttcaggattacatggccaggacctttttggaatttggagtaaagtctacgaccctttatattgtgagagtgttcacaatttcactttaccctcctgggccactgaggacaccatgactaagttgagagaattgtcagaattgtccctcctgtccctctatggaattcacaagcagaaagagaaatctaggctccaagggggtgtcctggtcaatgaaatcctcaatcacatgaaragagcaactcagataccaagctacaaaaaactyatcatgtattctgcgcatgacactactgtgagtggcctacagatggcgctagatgtttacaacggactccttcctccctatgcttcttgccacttgacggaattgtactttgagaagggggagtactttgtggagatgtactaycggaatgagacgcagcacgagccgtatcccctcatgctacctggctgcagccccagctgtcctctggagaggtttgctgagctggttggccctgtgatccctcaagactggtccacggagtgtatgaccacaaacagccatcaaggtactgargacagtacagattagtgtgcacagagatctctgtasaargagtagctgcccyttctcagggcagatgatgctttgagaacatactttggccattacccccagctttgaggaaaatgggctttggatgattattttatgttttagggacccccaacctcaggcaattcctacctcttcacctgaccctgcccccacttgccataaaacttagctaagttttgttttgtttttcagcrttaatgtaaaggggcagcagtgccaaaatataatcagagataaagcttaggtcaaagttcatagagttcccatgaactatatgactggccacacaggatcttttgtatttaaggattctgagattttgcttgagcaggattagataagkctgttctttaaatktctgaaatggaacagatttcaaaaaaaaaycccacaatctaggrtgggaacaaggaaggaaagatgtgaataggctgatgggcaaaaaamcaatttacccatcagttccagccttctctcaaggagaggcaaagaaaggagatacagtggagacatctggaargttttctccactggaaaactgctactatctgtttttatatttctgttaaaatatatgaggctacagaactaaaaattaaaacctctttgtgtcccttggtcctggaacatttatgttccttttaaagaaacaaaaatcaaactttacagaaagatttgatgtatgtaatacatatagcagctcttgaagtatatatatcatagcaaataagtcatctgatgagaacaagctatttgggcacaacacatcaggaaagagagcaccacgtgatggagtttctcyagaagctccagtgataagagatgttgactctaaakttgatttaaggccaggcatggtggtttacgcctataatcccagcattttgggagtccgaggtgggcagatcacttgagctcaggaggtcaagatcagcctgggcaacatggtgaaacctkgtctctacataaaatacaaaaacttagatgggcatggtgstgtgtgcctatagtcccactacttgtggggctaaggcaggaggatcacttgagccccggaggtcgaggctacagtgagccaagagtgcactactgtactccagccagggcaagagagcgagaccctgtcycaataaataaataaataaataaataaataaataaataaataaataaaaacaaagttgattaagaaaggaagtataggcyaggcacagtggctcacacctgtaatccttgcattttggaaggctgaggcaggaggatcactttaggcctggtgtgttcaagaccagcctggtcaacrtagtgagacactgtctctaccaaaaaaaggaaggaagggacacatatcaaactgaaacaaaattagaaatgtaattrtgttctaagtgcctccaagttcaaaacttattggaatgttgagagtgtggttacgaaatacgttaggaggacaaaaggaatgtgtaagtctttaatgccgatatcttcagaaaacctaagcaaacttacaggtcctgctgaaactgcccactcygcaagaagrratcatgatatagctttgccatgtggcakatctacatgtctrgagaacactgtgctctattaccattatggataaagatgagrtggttyctagagatggtttctactggcygccagaatctagagcraasccatccccgctcctggttggtcacagaaygactgacaaagacrtcgattgatatgcttctttgwgttatttccctcccaagtaaatgtttgtccttgggtccattttctatgcttgtaactgtcttctagcagtgagccaaatgtaaratagtgaataaagtcattattaggaagttcaaaagcattgcttttataatgaacttaraaaaacgtatgtgtgtgtgtttaattagaataaaattcctctaggcagatttcaggagctccctttgttggactctgctggcagagagaatcctatgggaacatctgaacagacagctggataagccaggccaacctcctgtgacacagcatctctcagtggtgccgcatctaaaggacaggcttttgccatgtgggcattgccatcctcacaccctgccttttgaatctgcccagagcagggtctgaactcacagtgacccacagrctgctgctggatgaacactcaggctacctaggtcttctcataatggagtggtagtgcaggctgcttgttcagctagaaagaggctgttatgcataggatggttgtattctctgccacagttgtccggagagaaataagaagccaaactccaatcagccttttacctgcaaagagtgaagggtgagaaggtggacaaagacatagattagaaaaatactggatattgggggaagttagactagaagtattattatacagggtgattcttacgaaagaagacccaatcataaattataaataaactttttatttagctattaa

SEQ ID NO: 25 - DNA, 3265 bp, Homo sapiens
tgaagtggtagcagttcctcctaactccygccagaaacagctctcctcaacatgagagctgcacccctcctcctggccagggcagcaagccttagccttggcttcttgtttctgctttttttctggctagaccgaagtgtactagccaaggagttgaagtttgtgactttggtgtttcggcatggagaccgaagtcccattgacacctttcccactgaccccataaaggaatcctcatggccacaaggatttggccaactcacccagctgggcatggagcagcattatgaacttggagagtatataagaaagagatatagaaaattcttgaatgagtcctataaacatgaacaggtttatattcgaagcacagacgttgaccggactttgatgagtgctatgacaaacctggcagccctgtttcccccagaaggtgtcagcatctggaatcctatcctactctggcagcccatcccggtgcacacagttcctctttctgaagatcagttgctatacctgcctttcaggaactgccctcgttttcaagaacttgagagtgagactttgaaatcagaggaattccagaagaggctgcacccttataaggattttatagctaccttgggaaaactttcaggattacatggccaggacctttttggaatttggagtaaagtctacgaccctttatattgtgagagtgttcacaatttcactttaccctcctgggccactgaggacaccatgactaagttgagagaattgtcagaattgtccctcctgtccctctatggaattcacaagcagaaagagaaatctaggctccaagggggtgtcctggtcaatgaaatcctcaatcacatgaaragagcaactcagataccaagctacaaaaaactyatcatgtattctgcgcatgacactactgtgagtggcctacagatggcgctagatgtttacaacggactccttcctccctatgcttcttgccacttgacggaattgtactttgagaagggggagtactttgtggagatgtactaycggaatgagacgcagcacgagccgtatcccctcatgctacctggctgcagccccagctgtcctctggagaggtttgctgagctggttggccctgtgatccctcaagactggtccacggagtgtatgaccacaaacagccatcaaggtactgargacagtacagattagtgtgcacagagatctctgtasaargagtagctgcccyttctcagggcagatgatgctttgagaacatactttggccattacccccagctttgaggaaaatgggctttggatgattattttatgttttagggacccccaacctcaggcaattcctacctcttcacctgaccctgcccccacttgccataaaacttagctaagttttgttttgtttttcagcrttaatgtaaaggggcagcagtgccaaaatataatcagagataaagcttaggtcaaagttcatagagttcccatgaactatatgactggccacacaggatcttttgtatttaaggattctgagattttgcttgagcaggattagataagkctgttctttaaatktctgaaatggaacagatttcaaaaaaaaaycccacaatctaggrtgggaacaaggaaggaaagatgtgaataggctgatgggcaaaaaamcaatttacccatcagttccagccttctctcaaggagaggcaaagaaaggagatacagtggagacatctggaargttttctccactggaaaactgctactatctgtttttatatttctgttaaaatatatgaggctacagaactaaaaattaaaacctctttgtgtcccttggtcctggaacatttatgttccttttaaagaaacaaaaatcaaactttacagaaagatttgatgtatgtaatacatatagcagctcttgaagtatatatatcatagcaaataagtcatctgatgagaacaagctatttgggcacaacacatcaggaaagagagcaccacgtgatggagtttctcyagaagctccagtgataagagatgttgactctaaakttgatttaaggccaggcatggtggtttacgcctataatcccagcattttgggagtccgaggtgggcagatcacttgagctcaggaggtcaagatcagcctgggcaacatggtgaaacctkgtctctacataaaatacaaaaacttagatgggcatggtgstgtgtgcctatagtcccactacttgtggggctaaggcaggaggatcacttgagccccggaggtcgaggctacagtgagccaagagtgcactactgtactccagccagggcaagagagcgagaccctgtcycaataaataaataaataaataaataaataaataaataaataaataaaaacaaagttgattaagaaaggaagtataggcyaggcacagtggctcacacctgtaatccttgcattttggaaggctgaggcaggaggatcactttaggcctggtgtgttcaagaccagcctggtcaacrtagtgagacactgtctctaccaaaaaaaggaaggaagggacacatatcaaactgaaacaaaattagaaatgtaattrtgttctaagtgcctccaagttcaaaacttattggaatgttgagagtgtggttacgaaatacgttaggaggacaaaaggaatgtgtaagtctttaatgccgatatcttcagaaaacctaagcaaacttacaggtcctgctgaaactgcccactcygcaagaagrratcatgatatagctttgccatgtggcakatctacatgtctrgagaacactgtgctctattaccattatggataaagatgagrtggttyctagagatggtttctactggcygccagaatctagagcraasccatccccgctcctggttggtcacagaaygactgacaaagacrtcgattgatatgcttctttgwgttatttccctcccaagtaaatgtttgtccttgggtccattttctatgcttgtaactgtcttctagcagtgagccaaatgtaaratagtgaataaagtcattattaggaagttcaaaagcattgcttttataatgaacttaraaaaacgtatgtgtgtgtgtttaattagaataaaattcctctaggcagatttcaggagctccctttgtgtttggggtttttgttttagtataacaagatggaaaatattaatataaagtaaaatgatttgactggcttaaatgaaca

SEQ ID NO: 26 - DNA, 1788 bp, Homo sapiens
tgaagtggtagcagttcctcctaactccygccagaaacagctctcctcaacatgagagctgcacccctcctcctggccagggcagcaagccttagccttggcttcttgtttctgctttttttctggctagaccgaagtgtactagccaaggagttgaagtttgtgactttggtgtttcggcatggagaccgaagtcccattgacacctttcccactgaccccataaaggaatcctcatggccacaaggatttggccaactcacccagctgggcatggagcagcattatgaacttggagagtatataagaaagagatatagaaaattcttgaatgagtcctataaacatgaacaggcaagttggggagccaagaacgttgaccggactttgatgagtgctatgacaaacctggcagccctgtttcccccagaaggtgtcagcatctggaatcctatcctactctggcagcccatcccggtgcacacagttcctctttctgaagatcagttgctatacctgcctttcaggaactgccctcgttttcaagaacttgagagtgagactttgaaatcagaggaattccagaagaggctgcacccttataaggattttatagctaccttgggaaaactttcaggattacatggccaggacctttttggaatttggagtaaagtctacgaccctttatattgtgagagtgttcacaatttcactttaccctcctgggccactgaggacaccatgactaagttgagagaattgtcagaattgtccctcctgtccctctatggaattcacaagcagaaagagaaatctaggctccaagggggtgtcctggtcaatgaaatcctcaatcacatgaaragagcaactcagataccaagctacaaaaaactyatcatgtattctgcgcatgacactactgtgagtggcctacagatggcgctagatgtttacaacggactccttcctccctatgcttcttgccacttgacggaattgtactttgagaagggggagtactttgtggagatgtactaycggaatgagacgcagcacgagccgtatcccctcatgctacctggctgcagccccagctgtcctctggagaggtttgctgagctggttggccctgtgatccctcaagactggtccacggagtgtatgaccacaaacagccatcaagttctaaaggtcatctttgctgttgccttttgcctgatatctgctgtcctaatggtactactgtttatccacattcgccgtggactctgctggcagagagaatcctatgggaacatctgaacagacagctggataagccaggccaacctcctgtgacacagcatctctcagtggtgccgcatctaaaggacaggcttttgccatgtgggcattgccatcctcacaccctgccttttgaatctgcccagagcagggtctgaactcacagtgacccacagrctgctgctggatgaacactcaggctacctaggtcttctcataatggagtggtagtgcaggctgcttgttcagctagaaagaggctgttatgcataggatggttgtattctctgccacagttgtccggagagaaataagaagccaaactccaatcagccttttacctgcaaagagtgaagggtgagaaggtggacaaagacatagattagaaaaatactggatattgggggaagttagactagaagtattattatacagggtgattcttacgaaagaagacccaatcataaattataaataaactttttatttagctattaa

SEQ ID NO: 27 - DNA, 3706 bp, Homo sapiens
tgaagtggtagcagttcctcctaactccygccagaaacagctctcctcaacatgagagctgcacccctcctcctggccagggcagcaagccttagccttggcttcttgtttctgctttttttctggctagaccgaagtgtactagccaaggagttgaagtttgtgactttggtgtttcggcatggagaccgaagtcccattgacacctttcccactgaccccataaaggaatcctcatggccacaaggatttggccaactcacccagctgggcatggagcagcattatgaacttggagagtatataagaaagagatatagaaaattcttgaatgagtcctataaacatgaacaggcaagttggggagccaagaacgttgaccggactttgatgagtgctatgacaaacctggcagccctgtttcccccagaaggtgtcagcatctggaatcctatcctactctggcagcccatcccggtgcacacagttcctctttctgaagatcagttgctatacctgcctttcaggaactgccctcgttttcaagaacttgagagtgagactttgaaatcagaggaattccagaagaggctgcacccttataaggattttatagctaccttgggaaaactttcaggattacatggccaggacctttttggaatttggagtaaagtctacgaccctttatattgtgagagtgttcacaatttcactttaccctcctgggccactgaggacaccatgactaagttgagagaattgtcagaattgtccctcctgtccctctatggaattcacaagcagaaagagaaatctaggctccaagggggtgtcctggtcaatgaaatcctcaatcacatgaaragagcaactcagataccaagctacaaaaaactyatcatgtattctgcgcatgacactactgtgagtggcctacagatggcgctagatgtttacaacggactccttcctccctatgcttcttgccacttgacggaattgtactttgagaagggggagtactttgtggagatgtactaycggaatgagacgcagcacgagccgtatcccctcatgctacctggctgcagccccagctgtcctctggagaggtttgctgagctggttggccctgtgatccctcaagactggtccacggagtgtatgaccacaaacagccatcaaggtactgargacagtacagattagtgtgcacagagatctctgtasaargagtagctgcccyttctcagggcagatgatgctttgagaacatactttggccattacccccagctttgaggaaaatgggctttggatgattattttatgttttagggacccccaacctcaggcaattcctacctcttcacctgaccctgcccccacttgccataaaacttagctaagttttgttttgtttttcagcrttaatgtaaaggggcagcagtgccaaaatataatcagagataaagcttaggtcaaagttcatagagttcccatgaactatatgactggccacacaggatcttttgtatttaaggattctgagattttgcttgagcaggattagataagkctgttctttaaatktctgaaatggaacagatttcaaaaaaaaaycccacaatctaggrtgggaacaaggaaggaaagatgtgaataggctgatgggcaaaaaamcaatttacccatcagttccagccttctctcaaggagaggcaaagaaaggagatacagtggagacatctggaargttttctccactggaaaactgctactatctgtttttatatttctgttaaaatatatgaggctacagaactaaaaattaaaacctctttgtgtcccttggtcctggaacatttatgttccttttaaagaaacaaaaatcaaactttacagaaagatttgatgtatgtaatacatatagcagctcttgaagtatatatatcatagcaaataagtcatctgatgagaacaagctatttgggcacaacacatcaggaaagagagcaccacgtgatggagtttctcyagaagctccagtgataagagatgttgactctaaakttgatttaaggccaggcatggtggtttacgcctataatcccagcattttgggagtccgaggtgggcagatcacttgagctcaggaggtcaagatcagcctgggcaacatggtgaaacctkgtctctacataaaatacaaaaacttagatgggcatggtgstgtgtgcctatagtcccactacttgtggggctaaggcaggaggatcacttgagccccggaggtcgaggctacagtgagccaagagtgcactactgtactccagccagggcaagagagcgagaccctgtcycaataaataaataaataaataaataaataaataaataaataaataaaaacaaagttgattaagaaaggaagtataggcyaggcacagtggctcacacctgtaatccttgcattttggaaggctgaggcaggaggatcactttaggcctggtgtgttcaagaccagcctggtcaacrtagtgagacactgtctctaccaaaaaaaggaaggaagggacacatatcaaactgaaacaaaattagaaatgtaattrtgttctaagtgcctccaagttcaaaacttattggaatgttgagagtgtggttacgaaatacgttaggaggacaaaaggaatgtgtaagtctttaatgccgatatcttcagaaaacctaagcaaacttacaggtcctgctgaaactgcccactcygcaagaagrratcatgatatagctttgccatgtggcakatctacatgtctrgagaacactgtgctctattaccattatggataaagatgagrtggttyctagagatggtttctactggcygccagaatctagagcraasccatccccgctcctggttggtcacagaaygactgacaaagacrtcgattgatatgcttctttgwgttatttccctcccaagtaaatgtttgtccttgggtccattttctatgcttgtaactgtcttctagcagtgagccaaatgtaaratagtgaataaagtcattattaggaagttcaaaagcattgcttttataatgaacttaraaaaacgtatgtgtgtgtgtttaattagaataaaattcctctaggcagatttcaggagctccctttgttggactctgctggcagagagaatcctatgggaacatctgaacagacagctggataagccaggccaacctcctgtgacacagcatctctcagtggtgccgcatctaaaggacaggcttttgccatgtgggcattgccatcctcacaccctgccttttgaatctgcccagagcagggtctgaactcacagtgacccacagrctgctgctggatgaacactcaggctacctaggtcttctcataatggagtggtagtgcaggctgcttgttcagctagaaagaggctgttatgcataggatggttgtattctctgccacagttgtccggagagaaataagaagccaaactccaatcagccttttacctgcaaagagtgaagggtgagaaggtggacaaagacatagattagaaaaatactggatattgggggaagttagactagaagtattattatacagggtgattcttacgaaagaagacccaatcataaattataaataaactttttatttagctattaa

SEQ ID NO: 28 - DNA, 1821 bp, Homo sapiens
atttgcttgcaacactggcacctctgccctgcaccccgggartgagcagtgagtgaggctcgggtctgggcgctggctccgaatcttcgggctgggagagactccaccatctgggggcggcctgggggagcagccttagtgtcttcctgctgatgcaatccgctaggtcgcgagtctccgccgcgagagggccggtctgcaatccagcccgccacgtgtactcgccgccgcctcgggcactgccccaggtcttgctgcagccgggaccgcgctctgcagccgcagacccggtccacacggccaggggctacgacccttgggatctgccctccgctcagctcgagcttccctcgtggccgacggaacaatgaaggattgcagtaacggatgctccgcagagtgtaccggagaaggaggatcaaaagaggtggtggggacttttaaggctaaagacctaatagtcacaccagctaccattttaaaggaaaaaccagaccccaataatctggtttttggaactgtgttcacggatcatatgctgacggtggagtggtcctcagagtttggatgggagaaacctcatatcaagcctcttcagaacctgtcattgcaccctggctcatcagctttgcactatgcagtggaattatttgaaggattgaaggcatttcgaggagtagataataaaattcgactgtttcagccaaacctcaacatggatagaatgtatcgctctgctgtgagggcaactctgccggtatttgacaaagaagagctcttagagtgtattcaacagcttgtgaaattggatcaagaatgggtcccatattcaacatctgctagtctgtatattcgtcctacattcattggaactgagccttctcttggagtcaagaagcctaccaaagccctgctctttgtactcttgagcccagtgggaccttatttttcaagtggaacctttaatccagtgtccctgtgggccaatcccaagtatgtaagagcctggaaaggtggaactggggactgcaagatgggagggaattacggctcatctctttttgcccaatgtgaagcagtagataatgggtgtcagcaggtcctgtggctctatggagaggaccatcagatcactgaagtgggaactatgaatctttttctttactggataaatgaagatggagaagaagaactggcaactcctccactagatggcatcattcttccaggagtgacaaggcggtgcattctggacctggcacatcagtggggtgaatttaaggtgtcagagagatacctcaccatggatgacttgacaacagccctgraggggaacagagtgagagagatgtttrgctctggtacagcctgtgttgtttgcccagtttctgatatactgtacaaaggcgagscaatacacattccaactatggagaatggtcctaagctggcaagccgcatcttgagcaaattaactgatatccagtatggaagagaagagagcgactggacaattgtgctatcctgaatggaaaatagaggatacaatggaaaatagaggataccaacttktctacatttcagaccgagyttgtcagcttttttgaaaacacatcagtagaaaccaagattttaaaatgaagtgtcaagacraaggcaaaacctgagcagttcctaaaaagatttgctgttagaaattttctttgtggcagtcatytattaaggattcaactcgtgatacaccaaaagaagagttgacttcagagatgtgttccatgctctctagcacaggaatgaataaatttataacacctgctttag

SEQ ID NO: 29 - DNA, 3238 bp, Homo sapiens
cgtgccactgccgctctctgcagccccgcgtccccgcagcctccccatggccagcccgcttcgctccgctgcggcccttgcccgccaggattgcagtaacggatgctccgcagagtgtaccggagaaggaggatcaaaagaggtggtggggacttttaaggctaaagacctaatagtcacaccagctaccattttaaaggaaaaaccagaccccaataatctggtttttggaactgtgttcacggatcatatgctgacggtggagtggtcctcagagtttggatgggagaaacctcatatcaagcctcttcagaacctgtcattgcaccctggctcatcagctttgcactatgcagtggaattatttgaaggattgaaggcatttcgaggagtagataataaaattcgactgtttcagccaaacctcaacatggatagaatgtatcgctctgctgtgagggcaactctgccggtatttgacaaagaagagctcttagagtgtattcaacagcttgtgaaattggatcaagaatgggtcccatattcaacatctgctagtctgtatattcgtcctacattcattggaactgagccttctcttggagtcaagaagcctaccaaagccctgctctttgtactcttgagcccagtgggaccttatttttcaagtggaacctttaatccagtgtccctgtgggccaatcccaagtatgtaagagcctggaaaggtggaactggggactgcaagatgggagggaattacggctcatctctttttgcccaatgtgaagcagtagataatgggtgtcagcaggtcctgtggctctatggagaggaccatcagatcactgaagtgggaactatgaatctttttctttactggataaatgaagatggagaagaagaactggcaactcctccactagatggcatcattcttccaggagtgacaaggcggtgcattctggacctggcacatcagtggggtgaatttaaggtgtcagagagatacctcaccatggatgacttgacaacagccctgraggggaacagagtgagagagatgtttrgctctggtacagcctgtgttgtttgcccagtttctgatatactgtacaaaggcgagscaatacacattccaactatggagaatggtcctaagctggcaagccgcatcttgagcaaattaactgatatccaggtaaagtatggaagagaagagagcgactggacaattgtgctatcctgaatggaaaatagaggatacaatggaaaatagaggataccaactgtatgctactgggacagactgttgcatttgaattgtgatagatttctttggctacctgtgcataatgtagtttgtagtatcaatgtgttacaagagtgattgtttcttcatgccagagaaaatgaattgcaatcatcaaatggtgtttcataacttggtagtagtaacttaccttaccttacctagaaaaayattaatgtaagccatataacatgggattttcctcaatgattttagtgcctccttttgtacttcactcagatactaaatagtagtttattctttaatataagttacattctgctcctcaamcaaatgcaattttttgtgtgtgtttgaaagctaatttgagaaaatttcataggttacatttcctgcagcctatctttatccacagaaagtgttttcttttttttaaatcaagacttttaaaactggatttcctcccatcactgttttttgaaggtcctccaagtccgtgttaaggtaaatatctgttttcttcctgatgtcacagcctgagcatactctgtgcattaggaagacctgagtgcatttcccaccattgtcctttccacattatgttgtagctggctggctgtcaggcgactacaagactgagggtcttgtgccttatagatctttgtatcccccatggctgacacatagtaggtactcagtaaatggttttataatgaatcagtgaacattttgcttctatagaagtgtaccttctttgtttctatattatgaaacctctttattagaatttgtgattgattctgacagtgtatagatttaccttatattgtctttattttccatgagctactaagtcattagagatactctgaagcatagttagtttaggaaatcacttcatattgattgtattagaattatcttggaattgaagatatatccctagagcaggggaccccaacccccaggccatgggccacacagcaggaagaggtgagtggtgggccattgaggagcttcatctgtatttatggctacttcccatcactcgaattaccacctgaactccacctcttgtcagctcagtggcagcattagattctcatagaagcacaaatcctattgtgaactctgcatgcaagggatctaggctatgcgctccttatgagaatctaatgcctgatgacctgaggtggaacagtttcatcctgaaaccacccttcaccctgcagtctgtggaaaaattgtcttccacaaaactggtccctggtgccaaaaatgttggggaccgctgctctagagagaggtcatgatatcataccaaccaaatggaaatgacaaatgttttatgtcaagtgttaattgcagaaataaatctttttttttttttttttggtagaaaacaaagaggcatactctgatttttatactctgtttttgcaggtgctcttttctttgaatggagatttgatgagcaagtggttaggatgcagggagagctactatgggtgatattttccttgtttaggagctgtgagttaaaattgtatcctttstggtttatctaaggaaagtcaaatcttgacagaaaacatttttccttggaaggtcaactctcagacattgtattttggtttccctcagtcctcataacktccttcttgctgaacatattttattctcttttcagagaaggaaaataaaaaggattctaaaagtttgatgcattggaaaaatttccttgaggcatttagcaacacatagaaaatgggctttgattcttttccaaaacttttagccatagggtcttttatagacagggatagtaaaatgaaaattgagaaatataagatgaaaaggaatgrtaaaaatatcttttagggggcttttaattggtgatctgaaatcttgggagaagctgttcttttcaggcctgaggtgctcttgactgtcgcctgcgcactg

SEQ ID NO: 30 - DNA, 3144 bp, Homo sapiens
gattgcagtaacggatgctccgcagagtgtaccggagaaggaggatcaaaagaggtggtggggacttttaaggctaaagacctaatagtcacaccagctaccattttaaaggaaaaaccagaccccaataatctggtttttggaactgtgttcacggatcatatgctgacggtggagtggtcctcagagtttggatgggagaaacctcatatcaagcctcttcagaacctgtcattgcaccctggctcatcagctttgcactatgcagtggaattatttgaaggattgaaggcatttcgaggagtagataataaaattcgactgtttcagccaaacctcaacatggatagaatgtatcgctctgctgtgagggcaactctgccggtatttgacaaagaagagctcttagagtgtattcaacagcttgtgaaattggatcaagaatgggtcccatattcaacatctgctagtctgtatattcgtcctacattcattggaactgagccttctcttggagtcaagaagcctaccaaagccctgctctttgtactcttgagcccagtgggaccttatttttcaagtggaacctttaatccagtgtccctgtgggccaatcccaagtatgtaagagcctggaaaggtggaactggggactgcaagatgggagggaattacggctcatctctttttgcccaatgtgaagcagtagataatgggtgtcagcaggtcctgtggctctatggagaggaccatcagatcactgaagtgggaactatgaatctttttctttactggataaatgaagatggagaagaagaactggcaactcctccactagatggcatcattcttccaggagtgacaaggcggtgcattctggacctggcacatcagtggggtgaatttaaggtgtcagagagatacctcaccatggatgacttgacaacagccctgraggggaacagagtgagagagatgtttrgctctggtacagcctgtgttgtttgcccagtttctgatatactgtacaaaggcgagscaatacacattccaactatggagaatggtcctaagctggcaagccgcatcttgagcaaattaactgatatccagtatggaagagaagagagcgactggacaattgtgctatcctgaatggaaaatagaggatacaatggaaaatagaggataccaactgtatgctactgggacagactgttgcatttgaattgtgatagatttctttggctacctgtgcataatgtagtttgtagtatcaatgtgttacaagagtgattgtttcttcatgccagagaaaatgaattgcaatcatcaaatggtgtttcataacttggtagtagtaacttaccttaccttacctagaaaaayattaatgtaagccatataacatgggattttcctcaatgattttagtgcctccttttgtacttcactcagatactaaatagtagtttattctttaatataagttacattctgctcctcaamcaaatgcaattttttgtgtgtgtttgaaagctaatttgagaaaatttcataggttacatttcctgcagcctatctttatccacagaaagtgttttcttttttttaaatcaagacttttaaaactggatttcctcccatcactgttttttgaaggtcctccaagtccgtgttaaggtaaatatctgttttcttcctgatgtcacagcctgagcatactctgtgcattaggaagacctgagtgcatttcccaccattgtcctttccacattatgttgtagctggctggctgtcaggcgactacaagactgagggtcttgtgccttatagatctttgtatcccccatggctgacacatagtaggtactcagtaaatggttttataatgaatcagtgaacattttgcttctatagaagtgtaccttctttgtttctatattatgaaacctctttattagaatttgtgattgattctgacagtgtatagatttaccttatattgtctttattttccatgagctactaagtcattagagatactctgaagcatagttagtttaggaaatcacttcatattgattgtattagaattatcttggaattgaagatatatccctagagcaggggaccccaacccccaggccatgggccacacagcaggaagaggtgagtggtgggccattgaggagcttcatctgtatttatggctacttcccatcactcgaattaccacctgaactccacctcttgtcagctcagtggcagcattagattctcatagaagcacaaatcctattgtgaactctgcatgcaagggatctaggctatgcgctccttatgagaatctaatgcctgatgacctgaggtggaacagtttcatcctgaaaccacccttcaccctgcagtctgtggaaaaattgtcttccacaaaactggtccctggtgccaaaaatgttggggaccgctgctctagagagaggtcatgatatcataccaaccaaatggaaatgacaaatgttttatgtcaagtgttaattgcagaaataaatctttttttttttttttttggtagaaaacaaagaggcatactctgatttttatactctgtttttgcaggtgctcttttctttgaatggagatttgatgagcaagtggttaggatgcagggagagctactatgggtgatattttccttgtttaggagctgtgagttaaaattgtatcctttstggtttatctaaggaaagtcaaatcttgacagaaaacatttttccttggaaggtcaactctcagacattgtattttggtttccctcagtcctcataacktccttcttgctgaacatattttattctcttttcagagaaggaaaataaaaaggattctaaaagtttgatgcattggaaaaatttccttgaggcatttagcaacacatagaaaatgggctttgattcttttccaaaacttttagccatagggtcttttatagacagggatagtaaaatgaaaattgagaaatataagatgaaaaggaatgrtaaaaatatcttttagggggcttttaattggtgatctgaaatcttgggagaagctgttcttttcaggcctgaggtgctcttgactgtcgcctgcgcactg

SEQ ID NO: 31 - DNA, 3517 bp, Homo sapiens
atttgcttgcaacactggcacctctgccctgcaccccgggartgagcagtgagtgaggctcgggtctgggcgctggctccgaatcttcgggctgggagagactccaccatctgggggcggcctgggggagcagccttagtgtcttcctgctgatgcaatccgctaggtcgcgagtctccgccgcgagagggccggtctgcaatccagcccgccacgtgtactcgccgccgcctcgggcactgccccaggtcttgctgcagccgggaccgcgctctgcagccgcagacccggtccacacggccaggggctacgacccttgggatctgccctccgctcagctcgagcttccctcgtggccgacggaacaatgaaggattgcagtaacggatgctccgcagagtgtaccggagaaggaggatcaaaagaggtggtggggacttttaaggctaaagacctaatagtcacaccagctaccattttaaaggaaaaaccagaccccaataatctggtttttggaactgtgttcacggatcatatgctgacggtggagtggtcctcagagtttggatgggagaaacctcatatcaagcctcttcagaacctgtcattgcaccctggctcatcagctttgcactatgcagtggaattatttgaaggattgaaggcatttcgaggagtagataataaaattcgactgtttcagccaaacctcaacatggatagaatgtatcgctctgctgtgagggcaactctgccggtatttgacaaagaagagctcttagagtgtattcaacagcttgtgaaattggatcaagaatgggtcccatattcaacatctgctagtctgtatattcgtcctacattcattggaactgagccttctcttggagtcaagaagcctaccaaagccctgctctttgtactcttgagcccagtgggaccttatttttcaagtggaacctttaatccagtgtccctgtgggccaatcccaagtatgtaagagcctggaaaggtggaactggggactgcaagatgggagggaattacggctcatctctttttgcccaatgtgaagcagtagataatgggtgtcagcaggtcctgtggctctatggagaggaccatcagatcactgaagtgggaactatgaatctttttctttactggataaatgaagatggagaagaagaactggcaactcctccactagatggcatcattcttccaggagtgacaaggcggtgcattctggacctggcacatcagtggggtgaatttaaggtgtcagagagatacctcaccatggatgacttgacaacagccctgraggggaacagagtgagagagatgtttrgctctggtacagcctgtgttgtttgcccagtttctgatatactgtacaaaggcgagscaatacacattccaactatggagaatggtcctaagctggcaagccgcatcttgagcaaattaactgatatccagtatggaagagaagagagcgactggacaattgtgctatcctgaatggaaaatagaggatacaatggaaaatagaggataccaactgtatgctactgggacagactgttgcatttgaattgtgatagatttctttggctacctgtgcataatgtagtttgtagtatcaatgtgttacaagagtgattgtttcttcatgccagagaaaatgaattgcaatcatcaaatggtgtttcataacttggtagtagtaacttaccttaccttacctagaaaaayattaatgtaagccatataacatgggattttcctcaatgattttagtgcctccttttgtacttcactcagatactaaatagtagtttattctttaatataagttacattctgctcctcaamcaaatgcaattttttgtgtgtgtttgaaagctaatttgagaaaatttcataggttacatttcctgcagcctatctttatccacagaaagtgttttcttttttttaaatcaagacttttaaaactggatttcctcccatcactgttttttgaaggtcctccaagtccgtgttaaggtaaatatctgttttcttcctgatgtcacagcctgagcatactctgtgcattaggaagacctgagtgcatttcccaccattgtcctttccacattatgttgtagctggctggctgtcaggcgactacaagactgagggtcttgtgccttatagatctttgtatcccccatggctgacacatagtaggtactcagtaaatggttttataatgaatcagtgaacattttgcttctatagaagtgtaccttctttgtttctatattatgaaacctctttattagaatttgtgattgattctgacagtgtatagatttaccttatattgtctttattttccatgagctactaagtcattagagatactctgaagcatagttagtttaggaaatcacttcatattgattgtattagaattatcttggaattgaagatatatccctagagcaggggaccccaacccccaggccatgggccacacagcaggaagaggtgagtggtgggccattgaggagcttcatctgtatttatggctacttcccatcactcgaattaccacctgaactccacctcttgtcagctcagtggcagcattagattctcatagaagcacaaatcctattgtgaactctgcatgcaagggatctaggctatgcgctccttatgagaatctaatgcctgatgacctgaggtggaacagtttcatcctgaaaccacccttcaccctgcagtctgtggaaaaattgtcttccacaaaactggtccctggtgccaaaaatgttggggaccgctgctctagagagaggtcatgatatcataccaaccaaatggaaatgacaaatgttttatgtcaagtgttaattgcagaaataaatctttttttttttttttttggtagaaaacaaagaggcatactctgatttttatactctgtttttgcaggtgctcttttctttgaatggagatttgatgagcaagtggttaggatgcagggagagctactatgggtgatattttccttgtttaggagctgtgagttaaaattgtatcctttstggtttatctaaggaaagtcaaatcttgacagaaaacatttttccttggaaggtcaactctcagacattgtattttggtttccctcagtcctcataacktccttcttgctgaacatattttattctcttttcagagaaggaaaataaaaaggattctaaaagtttgatgcattggaaaaatttccttgaggcatttagcaacacatagaaaatgggctttgattcttttccaaaacttttagccatagggtcttttatagacagggatagtaaaatgaaaattgagaaatataagatgaaaaggaatgrtaaaaatatcttttagggggcttttaattggtgatctgaaatcttgggagaagctgttcttttcaggcctgaggtgctcttgactgtcgcctgcgcactg

SEQ ID NO: 32 - DNA, 2966 bp, Homo sapiens
gtgttcatacttggctgtctggtttcaccaggaactctacccaaaagaggaaacagcaaggagaacatttgctttgtttgtaggagggaagtkgtcgagctacaaacaaatctttaggcatctgaggaattgctaagtttctaatttcatatggttgctgacaaggaggtgcagacaaggaccctcttgctttcctcactatggatagtctgttgcctccatctagattctcttatttcaaaaaatatcctctccatgcaattaggagatatttatcgacgctgagaaaccaaagagccgaagaacaggttgcacgttttcaaaaaatacctaatggtgaaaatgagacaatgattcctgtattgacatcaaaaaaagcaagtgaattaccagtcagtgaagttgcaagcattctccaagctgatcttcagaatggtctaaacaaatgtgaagttagtcataggygagcctttcatggctggaatgagtttgatattagtgaagatgagccactgtggaagaagtatatttctcagtttaaaaatccccttattatgctgcttctggcttctgcagtcatcagtgttttaatgcatcagtttgatgatgccgtcagtatcactgtggcaatacttatcgttgttacagttgcctttgttcaggaatatcgttcagaaaaatctcttgaagaattgagtaaacttgtgccaccagaatgccattgtgtgcgtgaaggaaaattggagcatacacttgcccgagacttggttccaggtgatacagtttgcctttctgttggggatagagttcctgctgacttacgcttgtttgaggctgtggatctttccattgatgagtccagcttgacaggtgagacaacgccttgytctaaggtgacagctcytcagccagctgcaactaatggagatcttgcatcragaagtaacattgcctttatgggaacactggtcagatgtggcaaagcaaagggtgttgtcattggaacaggagaaaattctgaatttggggaggtttttaaaatgatgyaagcagaagaggcaccaaaaacccctctgcagaagagcatggacctcttaggaaaacaactttccttttactcctttggtataataggaatcatcatgttggttggctggttactgggaaaagatatcctggaaatgtttactattagwgtaagtttggctgtagcagcaattcctgaaggtctccccattgtggtcacagtgacgcyagctcttggtgttatgagaatggtgaagaaaagggccattgtgaaaaagctgcctattgttgaaactcygggctgctrtaatgtgatttgttcagataaaactggaacactgacgaagaatgaaatgactgttactcacatatttacttcagatggtctgcatgctgaggttactggagttggctataatcaatttggggaagtgattgttgatggtgatgttgttcatggattctataacccagctgttagcagaattgttgaggcgggctgtgtgygcaatgatgctgtaattagaaacaatactctaatggggaagccaacagaaggggccttaattgctcttgcaatgaagatgggtcttgatggacttyaacaagactacatcagaaaarctgaatacccttttagctctgagcaaaagtggatggctgttaagtgtgtacaccgaacacagcaggacagaccagagatttgttttatgaaaggtgcttacgaacaagtaattaagtactktactacataccagagcaaagggcagaccttgacacttactcagcagcagagagatgtgtaccaacaagagaaggcacgcatgggctcagcgggactcagagttcttgctttggcttctggtcctgaactgggacagctgacatttcttggcttsgtgggaatcattgatccacctagaactggtgtgaaagaagctgttacaacactcattgcctsaggagtatcaataaaaatgattactggagattcacaggagactgcagttgcartcgccagtcgtcygggattgtattccaaaacttcccagtcagtctcaggagaagaaatagatgcaatggatgttcagcagctttcacaaatagtaccaaaggttgcagtattttacagagctagcccaaggcacaagatgaaaattattaagtcgctacagaagaacggttcagttgtagccatgacaggagatrgagtaaatgatgcagttgctctgaaggctgcagacattggagttgcgatgggccagactggtacagatgtttgcaaagaggcagcagacatgatcctagtggatgatgattttcaaaccataatgtctgcaatcgaagagggtaaagggatttataataacattaaaaatttcgttagattccagctgagcaygagtatagcagcattaactttaatctcattggctacattaatgaactttcctaatcctctcaatgccatgcagattttgtggatcaatattattatgkatggacscccarctcagagccktggagtagaaccagtggataaagatgtcattcgtaaacctcctcgcaactggaaagacagcattttgactaaaaacttgatacttaaaatacttgtttcatcaataatcattgtttgtgggactttgtttgtcttctggcgtgagctaygagacaatgtgattacacctcgagacacaacaatgaccttcacatgcyttgtgttttttgacatgttcaatgcactaagttccagatcccagaccaagtctgtgtttgagattggactctgcagtaatagaatgttttgctatgcagttcttggatccatcatgggacaattactagttatttactttcctccgcttcagaargtttttcagactgagagcctaagcatactgggtctggctctgggagaggagtggacagcagctggt

SEQ ID NO: 33 - DNA, 3550 bp, Homo sapiens
gtgttcatacttggctgtctggtttcaccaggaactctacccaaaagaggaaacagcaaggagaacatttgctttgtttgtaggagggaagtkgtcgagctacaaacaaatctttaggcatctgaggaattgctaagtttctaatttcatatggttgctgacaaggaggtgcagacaaggaccctcttgctttcctcactatggatagtctgttgcctccatctagattctcttatttcaaaaaatatcctctccatgcaattaggagatatttatcgacgctgagaaaccaaagagccgaagaacaggttgcacgttttcaaaaaatacctaatggtgaaaatgagacaatgattcctgtattgacatcaaaaaaagcaagtgaattaccagtcagtgaagttgcaagcattctccaagctgatcttcagaatggtctaaacaaatgtgaagttagtcataggygagcctttcatggctggaatgagtttgatattagtgaagatgagccactgtggaagaagtatatttctcagtttaaaaatccccttattatgctgcttctggcttctgcagtcatcagtgttttaatgcatcagtttgatgatgccgtcagtatcactgtggcaatacttatcgttgttacagttgcctttgttcaggaatatcgttcagaaaaatctcttgaagaattgagtaaacttgtgccaccagaatgccattgtgtgcgtgaaggaaaattggagcatacacttgcccgagacttggttccaggtgatacagtttgcctttctgttggggatagagttcctgctgacttacgcttgtttgaggctgtggatctttccattgatgagtccagcttgacaggtgagacaacgccttgytctaaggtgacagctcytcagccagctgcaactaatggagatcttgcatcragaagtaacattgcctttatgggaacactggtcagatgtggcaaagcaaagggtgttgtcattggaacaggagaaaattctgaatttggggaggtttttaaaatgatgyaagcagaagaggcaccaaaaacccctctgcagaagagcatggacctcttaggaaaacaactttccttttactcctttggtataataggaatcatcatgttggttggctggttactgggaaaagatatcctggaaatgtttactattagwgtaagtttggctgtagcagcaattcctgaaggtctccccattgtggtcacagtgacgcyagctcttggtgttatgagaatggtgaagaaaagggccattgtgaaaaagctgcctattgttgaaactcygggctgctrtaatgtgatttgttcagataaaactggaacactgacgaagaatgaaatgactgttactcacatatttacttcagatggtctgcatgctgaggttactggagttggctataatcaatttggggaagtgattgttgatggtgatgttgttcatggattctataacccagctgttagcagaattgttgaggcgggctgtgtgygcaatgatgctgtaattagaaacaatactctaatggggaagccaacagaaggggccttaattgctcttgcaatgaagatgggtcttgatggacttyaacaagactacatcagaaaarctgaatacccttttagctctgagcaaaagtggatggctgttaagtgtgtacaccgaacacagcaggacagaccagagatttgttttatgaaaggtgcttacgaacaagtaattaagtactktactacataccagagcaaagggcagaccttgacacttactcagcagcagagagatgtgtaccaacaagagaaggcacgcatgggctcagcgggactcagagttcttgctttggcttctggtcctgaactgggacagctgacatttcttggcttsgtgggaatcattgatccacctagaactggtgtgaaagaagctgttacaacactcattgcctsaggagtatcaataaaaatgattactggagattcacaggagactgcagttgcartcgccagtcgtcygggattgtattccaaaacttcccagtcagtctcaggagaagaaatagatgcaatggatgttcagcagctttcacaaatagtaccaaaggttgcagtattttacagagctagcccaaggcacaagatgaaaattattaagtcgctacagaagaacggttcagttgtagccatgacaggagatrgagtaaatgatgcagttgctctgaaggctgcagacattggagttgcgatgggccagactggtacagatgtttgcaaagaggcagcagacatgatcctagtggatgatgattttcaaaccataatgtctgcaatcgaagagggtaaagggatttataataacattaaaaatttcgttagattccagctgagcaygagtatagcagcattaactttaatctcattggctacattaatgaactttcctaatcctctcaatgccatgcagattttgtggatcaatattattatgkatggacscccarctcagagccktggagtagaaccagtggataaagatgtcattcgtaaacctcctcgcaactggaaagacagcattttgactaaaaacttgatacttaaaatacttgtttcatcaataatcattgtttgtgggactttgtttgtcttctggcgtgagctaygagacaatgtgattacacctcgagacacaacaatgaccttcacatgcyttgtgttttttgacatgttcaatgcactaagttccagatcccagaccaagtctgtgtttgagattggactctgcagtaatagaatgttttgctatgcagttcttggatccatcatgggacaattactagttatttactttcctccgcttcagaargtttttcagactgagagcctaagcatactggatctgttgtttcttttgggtctcacctcatcagtgtgcatagtggcagaaattataaagaaggttgaaaggagcagggaaaagatccagaagcatgtctggctctgggagaggagtggacagcagctggttgagatacatccccatctggagacaggactgccactgacagaagatgtgagctgtgtctaagtccagtcttgtgcccagccgtgtctgcgccttcactctttggaactckgcatacaacatcttagcaccatcttcctgcagctcttccttacctaaataaagaaacagcccaagggcagtatttctaaaagcactgtaacagcttttcattttctccacatatactacaaattctataaagaaagaaattaatttaaaaaaactaagatgtttttctcttctggcttcataaatgccttgctgtataaattgaaatattgatactgaactgtctttttaatgatgacctaactttattcaacccatcggaatttactttttccctgaaataagatcttttccactggtctactacctgaccataaacatgtctgcatttgaattctctaaaccctaaatctgtgtctatgaaaaatacaaatgactat

SEQ ID NO: 34 - DNA, 4117 bp, Homo sapiens
gggaactccttcctcagcctctcgtcagcgccgcttctcctggtttctcttgcagatgctgctgctaggggtggtgggagcagccgtgggacgcgtggccgggagcgggggtgacagcctgggattccgggggcttctcttccttgtcctcctcctctcctctctattcccagwgtggccgtggctgacactaaagactttgtagccatcaacccgagtgcagtttcgatggaaaatgaaggttgcacgttttcaaaaaatacctaatggtgaaaatgagacaatgattcctgtattgacatcaaaaaaagcaagtgaattaccagtcagtgaagttgcaagcattctccaagctgatcttcagaatggtctaaacaaatgtgaagttagtcataggygagcctttcatggctggaatgagtttgatattagtgaagatgagccactgtggaagaagtatatttctcagtttaaaaatccccttattatgctgcttctggcttctgcagtcatcagtgttttaatgcatcagtttgatgatgccgtcagtatcactgtggcaatacttatcgttgttacagttgcctttgttcaggaatatcgttcagaaaaatctcttgaagaattgagtaaacttgtgccaccagaatgccattgtgtgcgtgaaggaaaattggagcatacacttgcccgagacttggttccaggtgatacagtttgcctttctgttggggatagagttcctgctgacttacgcttgtttgaggctgtggatctttccattgatgagtccagcttgacaggtgagacaacgccttgytctaaggtgacagctcytcagccagctgcaactaatggagatcttgcatcragaagtaacattgcctttatgggaacactggtcagatgtggcaaagcaaagggtgttgtcattggaacaggagaaaattctgaatttggggaggtttttaaaatgatgyaagcagaagaggcaccaaaaacccctctgcagaagagcatggacctcttaggaaaacaactttccttttactcctttggtataataggaatcatcatgttggttggctggttactgggaaaagatatcctggaaatgtttactattagwgtaagtttggctgtagcagcaattcctgaaggtctccccattgtggtcacagtgacgcyagctcttggtgttatgagaatggtgaagaaaagggccattgtgaaaaagctgcctattgttgaaactcygggctgctrtaatgtgatttgttcagataaaactggaacactgacgaagaatgaaatgactgttactcacatatttacttcagatggtctgcatgctgaggttactggagttggctataatcaatttggggaagtgattgttgatggtgatgttgttcatggattctataacccagctgttagcagaattgttgaggcgggctgtgtgygcaatgatgctgtaattagaaacaatactctaatggggaagccaacagaaggggccttaattgctcttgcaatgaagatgggtcttgatggacttyaacaagactacatcagaaaarctgaatacccttttagctctgagcaaaagtggatggctgttaagtgtgtacaccgaacacagcaggacagaccagagatttgttttatgaaaggtgcttacgaacaagtaattaagtactktactacataccagagcaaagggcagaccttgacacttactcagcagcagagagatgtgtaccaacaagagaaggcacgcatgggctcagcgggactcagagttcttgctttggcttctggtcctgaactgggacagctgacatttcttggcttsgtgggaatcattgatccacctagaactggtgtgaaagaagctgttacaacactcattgcctsaggagtatcaataaaaatgattactggagattcacaggagactgcagttgcartcgccagtcgtcygggattgtattccaaaacttcccagtcagtctcaggagaagaaatagatgcaatggatgttcagcagctttcacaaatagtaccaaaggttgcagtattttacagagctagcccaaggcacaagatgaaaattattaagtcgctacagaagaacggttcagttgtagccatgacaggagatrgagtaaatgatgcagttgctctgaaggctgcagacattggagttgcgatgggccagactggtacagatgtttgcaaagaggcagcagacatgatcctagtggatgatgattttcaaaccataatgtctgcaatcgaagagggtaaagggatttataataacattaaaaatttcgttagattccagctgagcaygagtatagcagcattaactttaatctcattggctacattaatgaactttcctaatcctctcaatgccatgcagattttgtggatcaatattattatgkatggacscccarctcagagccktggagtagaaccagtggataaagatgtcattcgtaaacctcctcgcaactggaaagacagcattttgactaaaaacttgatacttaaaatacttgtttcatcaataatcattgtttgtgggactttgtttgtcttctggcgtgagctaygagacaatgtgattacacctcgagacacaacaatgaccttcacatgcyttgtgttttttgacatgttcaatgcactaagttccagatcccagaccaagtctgtgtttgagattggactctgcagtaatagaatgttttgctatgcagttcttggatccatcatgggacaattactagttatttactttcctccgcttcagaargtttttcagactgagagcctaagcatactggatctgttgtttcttttgggtctcacctcatcagtgtgcatagtggcagaaattataaagaaggttgaaaggagcagggaaaagatccagaagcatgttagttcgacatcatcatcttttcttgaagtatgatgcatattgcattattttatttgcaaactaggaattgcagtctgaggatcatttagaagggcaagttcaagaggatatgaagatttgagaactttttaactattcattgactaaaaatgaacattaatgttaaagacttaagactttaacctgctggcagtcccaaatgaaattatgcaactttgatatcatattccttgatttaaattggcttttgtgattgagtgaaactttataaagcatatggtcagttatttaattaaaaaggcaaaacctgaaccaccttctgcacttaaagaagtctaacagtacaaatacactatctatcttagatagatatatttttttttatttttaaatattgtactatttatggtggtggggctttcttactaatacacaaataaatttaatcatttcaaaggcattctatttggtttagaagttgattcccaggagtgccatatttcagctactgtatttcctttttcttgtaatgtaagcagctcagataccatgtgctatcatttttgtatcaagttttttgcacaggatgtgaccactgtcagatcactgttcttttctttctttttgtgattgaaaagcctatactacaatttgaagtaaatttttgtttttcttagtaagtgtaaatggttgctttatttttattttaaaaaggtatgtctttggtttggcagaattcatgcagggctatcaagtggtgttctagggtaacagtgtccataattaacgcttagtcatagagtcaaaaacatttaagactgattgggttgaagtttataataaattatattaacatgtcttcctttttgaggtaaagatatatactttgtcaaatatcattttgtcatcctctaaatataaatccaaatacctcagctaagtaattctattttattatttttactgttatgtatgtttttaatcatatttcttaggaagtataggctactggacttagaataaaaagtccccaaacccaaacaaatggtttatgaaccagagtatatgtggaagattctttgctggtcttgctctgtgtgcatctgaagcttctttggcctagattttagcacaaacctgagtatatctcttcta

SEQ ID NO: 35 - DNA, 4184 bp, Homo sapiens
gtgttcatacttggctgtctggtttcaccaggaactctacccaaaagaggaaacagcaaggagaacatttgctttgtttgtaggagggaagtkgtcgagctacaaacaaatctttaggcatctgaggaattgctaagtttctaatttcatatggttgctgacaaggaggtgcagacaaggaccctcttgctttcctcactatggatagtctgttgcctccatctagattctcttatttcaaaaaatatcctctccatgcaattaggagatatttatcgacgctgagaaaccaaagagccgaagaacaggttgcacgttttcaaaaaatacctaatggtgaaaatgagacaatgattcctgtattgacatcaaaaaaagcaagtgaattaccagtcagtgaagttgcaagcattctccaagctgatcttcagaatggtctaaacaaatgtgaagttagtcataggygagcctttcatggctggaatgagtttgatattagtgaagatgagccactgtggaagaagtatatttctcagtttaaaaatccccttattatgctgcttctggcttctgcagtcatcagtgttttaatgcatcagtttgatgatgccgtcagtatcactgtggcaatacttatcgttgttacagttgcctttgttcaggaatatcgttcagaaaaatctcttgaagaattgagtaaacttgtgccaccagaatgccattgtgtgcgtgaaggaaaattggagcatacacttgcccgagacttggttccaggtgatacagtttgcctttctgttggggatagagttcctgctgacttacgcttgtttgaggctgtggatctttccattgatgagtccagcttgacaggtgagacaacgccttgytctaaggtgacagctcytcagccagctgcaactaatggagatcttgcatcragaagtaacattgcctttatgggaacactggtcagatgtggcaaagcaaagggtgttgtcattggaacaggagaaaattctgaatttggggaggtttttaaaatgatgyaagcagaagaggcaccaaaaacccctctgcagaagagcatggacctcttaggaaaacaactttccttttactcctttggtataataggaatcatcatgttggttggctggttactgggaaaagatatcctggaaatgtttactattagwgtaagtttggctgtagcagcaattcctgaaggtctccccattgtggtcacagtgacgcyagctcttggtgttatgagaatggtgaagaaaagggccattgtgaaaaagctgcctattgttgaaactcygggctgctrtaatgtgatttgttcagataaaactggaacactgacgaagaatgaaatgactgttactcacatatttacttcagatggtctgcatgctgaggttactggagttggctataatcaatttggggaagtgattgttgatggtgatgttgttcatggattctataacccagctgttagcagaattgttgaggcgggctgtgtgygcaatgatgctgtaattagaaacaatactctaatggggaagccaacagaaggggccttaattgctcttgcaatgaagatgggtcttgatggacttyaacaagactacatcagaaaarctgaatacccttttagctctgagcaaaagtggatggctgttaagtgtgtacaccgaacacagcaggacagaccagagatttgttttatgaaaggtgcttacgaacaagtaattaagtactktactacataccagagcaaagggcagaccttgacacttactcagcagcagagagatgtgtaccaacaagagaaggcacgcatgggctcagcgggactcagagttcttgctttggcttctggtcctgaactgggacagctgacatttcttggcttsgtgggaatcattgatccacctagaactggtgtgaaagaagctgttacaacactcattgcctsaggagtatcaataaaaatgattactggagattcacaggagactgcagttgcartcgccagtcgtcygggattgtattccaaaacttcccagtcagtctcaggagaagaaatagatgcaatggatgttcagcagctttcacaaatagtaccaaaggttgcagtattttacagagctagcccaaggcacaagatgaaaattattaagtcgctacagaagaacggttcagttgtagccatgacaggagatrgagtaaatgatgcagttgctctgaaggctgcagacattggagttgcgatgggccagactggtacagatgtttgcaaagaggcagcagacatgatcctagtggatgatgattttcaaaccataatgtctgcaatcgaagagggtaaagggatttataataacattaaaaatttcgttagattccagctgagcaygagtatagcagcattaactttaatctcattggctacattaatgaactttcctaatcctctcaatgccatgcagattttgtggatcaatattattatgkatggacscccarctcagagccktggagtagaaccagtggataaagatgtcattcgtaaacctcctcgcaactggaaagacagcattttgactaaaaacttgatacttaaaatacttgtttcatcaataatcattgtttgtgggactttgtttgtcttctggcgtgagctaygagacaatgtgattacacctcgagacacaacaatgaccttcacatgcyttgtgttttttgacatgttcaatgcactaagttccagatcccagaccaagtctgtgtttgagattggactctgcagtaatagaatgttttgctatgcagttcttggatccatcatgggacaattactagttatttactttcctccgcttcagaargtttttcagactgagagcctaagcatactggatctgttgtttcttttgggtctcacctcatcagtgtgcatagtggcagaaattataaagaaggttgaaaggagcagggaaaagatccagaagcatgttagttcgacatcatcatcttttcttgaagtatgatgcatattgcattattttatttgcaaactaggaattgcagtctgaggatcatttagaagggcaagttcaagaggatatgaagatttgagaactttttaactattcattgactaaaaatgaacattaatgttaaagacttaagactttaacctgctggcagtcccaaatgaaattatgcaactttgatatcatattccttgatttaaattggcttttgtgattgagtgaaactttataaagcatatggtcagttatttaattaaaaaggcaaaacctgaaccaccttctgcacttaaagaagtctaacagtacaaatacactatctatcttagatagatatatttttttttatttttaaatattgtactatttatggtggtggggctttcttactaatacacaaataaatttaatcatttcaaaggcattctatttggtttagaagttgattcccaggagtgccatatttcagctactgtatttcctttttcttgtaatgtaagcagctcagataccatgtgctatcatttttgtatcaagttttttgcacaggatgtgaccactgtcagatcactgttcttttctttctttttgtgattgaaaagcctatactacaatttgaagtaaatttttgtttttcttagtaagtgtaaatggttgctttatttttattttaaaaaggtatgtctttggtttggcagaattcatgcagggctatcaagtggtgttctagggtaacagtgtccataattaacgcttagtcatagagtcaaaaacatttaagactgattgggttgaagtttataataaattatattaacatgtcttcctttttgaggtaaagatatatactttgtcaaatatcattttgtcatcctctaaatataaatccaaatacctcagctaagtaattctattttattatttttactgttatgtatgtttttaatcatatttcttaggaagtataggctactggacttagaataaaaagtccccaaacccaaacaaatggtttatgaaccagagtatatgtggaagattctttgctggtcttgctctgtgtgcatctgaagcttctttggcctagattttagcacaaacctgagtatatctcttcta

SEQ ID NO: 36 - DNA, 2318 bp, Homo sapiens
gactctggagtgggagtgggagcgagcgcttctgcgactccagttgtgagagccgcaagggcatgggaattgacgccactcaccgacccccagtctcaatctcaacgctgtgaggaaacctcgactttgccaggtccccaagggcagcggggctcggcgagcgaggcacccttctccgtccccatcccaatccaagcgytcctggcactgacgacgccaagagactcgagtgggagttaaagcttccagtgagggcagcaggtgtccaggccgggcctgcgggttcctgttgacgtcttgccctaggcaaaggtcccagttccttctcggagccggctgtcccgcgccactggaaaccgcacctccccgcagcaygggcaccagcctcagcccgaacgacccttggcygctaaacccgctgtccatcyagcagaccacgctcctgctactcctgtcggtgctggccactgtgcatgtgggccagcggctgctgaggcaacggaggcggcagctcsggtccgcgcccccgggcccgtttgcgtrsccactgatcgraaacgcggcggcggtgggccaggcggctcacctctcgttcgctcgccyggcgcggcgcwacggcgacgttttccagatccgcctgggcagctgccccatagtggtgctgaatggcgagcgcgccatccaccaggccctggtgcagcagggctcggccttcgccgaccggccgkccttcgcctccttccgtgtggtgtccggcggccgcagcatggctttcggccactactcggagcactggaaggtgcagcggcgcgcagcccacagcatgatgcgcaacttcttcacgcgccagccgcgcagccgccaagtcctcgagggccacgtgctgagcgaggcgcgcgagctggtggcgctgctggtgcgcggcagcgcggacggmgccttcctcgwccygaggccgctgaccrtcgtggccgtggccaacgtcatgagtgccgtgtgtttcggctgccgctacakccacgacgwccccgagttccgtgagctgctcagccacaacraagagttcgggcgcacggtgggcgcgggcagcctggtggacgtsatgccctggctgcagtacttccccaacccggtgcgcaccgttttccgcgaattcgagcagctcaaccgcaacttcagcaacttcatcctggacaagttcttgaggcactgmkaaagccttcggcccggggccgccccccgcgacatgatggacgcctttatcctctctgcggaaaagaaggcggccggggactcgcacggtggtggcgcgcggctggatttggagaacktaccggccactatcactgacatcttcggcgccagccaggacaccctgtccaccgcgctgcagtggctgctcctcytcttcaccaggtatcctgatgtgcagactygagtgcaggcagaattggatcaggtcrtgkggagggaccrtctgccttgtrtgggtraccagcccaacctgcyctatgtcctggccttcctttatraagccatgmrcttctccagctttgtgcctgtcactattcctcatgccaccactgccaacacctctgtcttgggctaccacattcccaaggacactgtggtttttgtcaaccagtggtctgtgaatcatgacccastgaagtggcctaaccyggagaactttgatcsagstcrattcttggacaaggahggcctcatcarcaaggacctgaccagcagagtgatgattttttcwgtgggcaaaaggyggtgcattggcgaagaactttctaagatgcagctttttctcttcatctccatcctggctcaccagtgcgatttcagggccaacccaaatgrgcctgcgaaaatgaatttcagttatggtctaaccattaaacccaagtcatttaaagtcaatgtcactctcagagagtccatggagctccttgatagtgctgtccaaaatttacaagccaaggaaacttgccaataagaagcaagaggcaagctgaaattttagaaatattcacatcttcggagatgaggagtaaaattcagtttttttccagttcctcttttgtgctgcttctcaattagcgtttaagatgattttttgaaagttaacattaatgcctgctttttggaaagtcagaatcagaagatagtcttggaagctgtttggaaaagacagtggagatgagggcctaggtcatgactctccaggccttcactgtgccacactcacagatgacagggcttgcggtaccaaaggctctttatcttccagactacagctcctattaatg

SEQ ID NO: 37 - DNA, 5130 bp, Homo sapiens
  misc_feature (1)...(5130): n = A,T,C or G
gactctggagtgggagtgggagcgagcgcttctgcgactccagttgtgagagccgcaagggcatgggaattgacgccactcaccgacccccagtctcaatctcaacgctgtgaggaaacctcgactttgccaggtccccaagggcagcggggctcggcgagcgaggcacccttctccgtccccatcccaatccaagcgytcctggcactgacgacgccaagagactcgagtgggagttaaagcttccagtgagggcagcaggtgtccaggccgggcctgcgggttcctgttgacgtcttgccctaggcaaaggtcccagttccttctcggagccggctgtcccgcgccactggaaaccgcacctccccgcagcaygggcaccagcctcagcccgaacgacccttggcygctaaacccgctgtccatcyagcagaccacgctcctgctactcctgtcggtgctggccactgtgcatgtgggccagcggctgctgaggcaacggaggcggcagctcsggtccgcgcccccgggcccgtttgcgtrsccactgatcgraaacgcggcggcggtgggccaggcggctcacctctcgttcgctcgccyggcgcggcgcwacggcgacgttttccagatccgcctgggcagctgccccatagtggtgctgaatggcgagcgcgccatccaccaggccctggtgcagcagggctcggccttcgccgaccggccgkccttcgcctccttccgtgtggtgtccggcggccgcagcatggctttcggccactactcggagcactggaaggtgcagcggcgcgcagcccacagcatgatgcgcaacttcttcacgcgccagccgcgcagccgccaagtcctcgagggccacgtgctgagcgaggcgcgcgagctggtggcgctgctggtgcgcggcagcgcggacggmgccttcctcgwccygaggccgctgaccrtcgtggccgtggccaacgtcatgagtgccgtgtgtttcggctgccgctacakccacgacgwccccgagttccgtgagctgctcagccacaacraagagttcgggcgcacggtgggcgcgggcagcctggtggacgtsatgccctggctgcagtacttccccaacccggtgcgcaccgttttccgcgaattcgagcagctcaaccgcaacttcagcaacttcatcctggacaagttcttgaggcactgmkaaagccttcggcccggggccgccccccgcgacatgatggacgcctttatcctctctgcggaaaagaaggcggccggggactcgcacggtggtggcgcgcggctggatttggagaacktaccggccactatcactgacatcttcggcgccagccaggacaccctgtccaccgcgctgcagtggctgctcctcytcttcaccaggtatcctgatgtgcagactygagtgcaggcagaattggatcaggtcrtgkggagggaccrtctgccttgtrtgggtraccagcccaacctgcyctatgtcctggccttcctttatraagccatgmrcttctccagctttgtgcctgtcactattcctcatgccaccactgccaacacctctgtcttgggctaccacattcccaaggacactgtggtttttgtcaaccagtggtctgtgaatcatgacccastgaagtggcctaaccyggagaactttgatcsagstcrattcttggacaaggahggcctcatcarcaaggacctgaccagcagagtgatgattttttcwgtgggcaaaaggyggtgcattggcgaagaactttctaagatgcagctttttctcttcatctccatcctggctcaccagtgcgatttcagggccaacccaaatgrgcctgcgaaaatgaatttcagttatggtctaaccattaaacccaagtcatttaaagtcaatgtcactctcagagagtccatggagctccttgatagtgctgtccaaaatttacaagccaaggaaacttgccaataagaagcaagaggcaagctgaaattttagaaatattcacatcttcggagatgaggagtaaaattcagtttttttccagttcctcttttgtgctgcttctcaattagcgtttaaggtgagsataaatcaactgtccatcaggtgaggtgtgctccatacccagcggttcttcatgagtagtgggctatgcaggagcttctgggagatttttttgagtcaaagacttaaagggcccaatgaattattatatacatactgcatcttggttatttctgaaggtagcattctttggagttaaaatgcacatatagacacatacacccaaacacttacaccaaacwactgaatgaagmagtattttggtaaccaggccatttttggtgggaatccaagattggtctcccatatgcagaaatagacaaaaagtatattaaacaaagtttcagagtatattgttgaagagacagagacaagtaatttcagtgtaaagtgtgtgattgaaggtgataagggaaaagataaagaccagaaattcccttttcaccttttcaggaaaataacttagactctagtatttatgggtggatttatccttttgccttctggtatacttccttacttttaaggataaatcataaagtcagttgctcaaaaagaaatcaatagttgaattagtgagtatagtggggttccatgakttatcatgaattttaaagtatgcattattaaattgtaaaactccaaggtgatgttgtacctcttttgcttgccaaagtacagaatttgaattatcagcaaaraaaaaaaaaaaagccagccaagctttaaattatgtgaccataatgtactgatttcagtaagtctcataggttaaaaaaaaaagtcaccaaatagtgtgaaatatattacttaactgtccgtaagcagtatattagtattatcttgttcaggaaaaggttgaataatatatgccttgtntaatattgaaaattgaaaagtacaactaacgcaaccaagtgtgctaaaaatgagcttgattaaatcaaccacctatttttgacatggaaatgaagcagggtttcttttcttcactcaaattttggcgaatctcaaaattagatcctaagatgtgttcttatttttataacatctttattgaaattctatttataatacagaatcttgttttgaaaataacctaattaatatattaaaattccaaattcatggcatgcttaaattttaactaaattttaaagccattctgattattgagttccagttgaagttagtggaaatctgaacattctcctgtggaaggcagagaaatctaagctgtgtctgcccaatgaataatggaaaatgccatgaattacctggatgttctttttacgaggtgacaagagttggggacagaactcccattacaactgaccaagtttctcttctagatgattttttgaaagttaacattaatgcctgctttttggaaagtcagaatcagaagatagtcttggaagctgtttggaaaagacagtggagatgaggtcagttgtgttttttaagatggcaattactttggtagctgggaaagcataaagctcaaatgaaatgtatgcattcacatttagaaaagtgaattgaagtttcaagttttaaagttcattgcaattaaacttccaaagaaagttctacagtgtcctaagtgctaagtgcttattacattttattaagctttttggaatctttgtaccaaaattttaaaaaagggagtttttgatagttgtgtgtatgtgtgtgtggggtggggggatggtaagagaaaagagagaaacactgaaaagaaggaaagatggttaaacattttcccactcattctgaattaattaatttggagcacaaaattcaaagcatggacatttagaagaaagatgtttggcgtagcagagttaaatctcaaataggctattaaaaaagtctacaacatagcagatctgttttgtggtttggaatattaaaaaacttcatgtaattttattttaaaatttcatagctgtacttcttgaatataaaaaatcatgccagtatttttaaaggcattagagtcaactacacaaagcaggcttgcccagtacatttaaattttttggcacttgccattccaaaatattatgccccaccaaggctgagacagtgaatttgggctgctgtagcctatttttttagattgagaaatgtgtagctgcaaaaataatcatgaaccaatctggatgcctcattatgtcaaccaggtccagatgtgctataatctgtttttacgtatgtaggcccagtcgtcatcagatgcttgcggcaaaaggaaagctgtgtttatatggaagaaagtaaggtgcttggagtttacctggcttwtttaatatgcttataacctagttaaagaaaggaaaagaaaacaaaaaacgaatgaaaataactgaatttggaggctggagtaatcagattactgctttaatcagaaaccctcattgtgtttctaccggagagagaatgtatttgctgacaaccattaaagtcagaagttttactccaggttattgcaataaagtataatgtttattaaatgcttcatttgtatgtcaaagctttgactctataagcaaattgcttttttccaaaacaaaaagatgtctcaggtttgttttgtgaattttctaaaagctttcatgtcccagaacttagcctttacctgtgaagtgttactacagccttaatattttcctagtagatctatattagatcaaatagttgcatagcagtatatgttaatttgtgtgtttttagctgtgacacaactgtgtgattaaaaggtatactttagtagacatttataactcaaggataccttcttatttaatcttttcttatttttgtactttatcatgaatgcttttagtgtgtgcataatagctacagtgcatagttgtagacaaagtacattctggggaaacaacatttatatgtagcctttactgtttgatataccaaattaaaaaaaaattgtatctcattacttatactgggacmccattaccaaaataataaaaatcactttcataatcttgttatga

SEQ ID NO: 38 - DNA, 920 bp, Homo sapiens
agtaacagttgattgttacattcagtaacactgaatgtcagtgcagtccaatttacaggctggagcagcagctgcatcctgcatttccccgaagtattacatgattttcactccttgcaaactttrccatctttgttgcagagaatcgggaatccaaatgagactcagaacaatagcacaagctggcctgtcttcaaaagcactgwacaaaaatawctaaccttgaatacagagtcaacaagaataatgacgaaactaygtgctcaacwatgtcgattctggacatcattttttccaaaagtcttggaaatgacaggaaatattgatgaarcagaatgggagtggaaagcaggattccatcgctggaacaattacatgatggactggaaaaatcaatttaacgattacactagcaagaaagaaagttgtgtgggtctctaattaatagatttaccctttatagaacatattttcctttagatcaaggcaaaaatatcaggagcttttttacacacctactaaaaaagttattatgtagctgaaacaaaaatgccagaaggataatattgattcctcacatctttaacttagtattttacctagcatttcaaaacccaaatggctagaacrtgtttaattaaatttcmcaatataaagttctacagttaattatgtgcatattaaaacaatggcctggttcaatttctttctttccttaataaatttaagttttttccccccaaaattatcagtgctctgcttttagtcacgtgtattttcattaccactcgtaaaaaggtatcttttttaaatgaattaaatattgaaacactgtacaccatagtttacaatattatgtttcctaattaaaataagaattgaatgtcaatatgagatattaaaataagcacagaaaatca

SEQ ID NO: 39 - DNA, 2445 bp, Homo sapiens
agtaacagttgattgttacattcagtaacactgaatgtcagtgcagtccaatttacaggctggagcagcagctgcatcctgcatttccccgaagtattacatgattttcactccttgcaaactttrccatctttgttgcagagaatcggaaatcaatatgcatagcaaagtcacaatcatatgcatcagatttctcttttggtttcttttgctctgcatgcttattgggaagtcacatactgaagatgacatcataattgcaacaaagaatggaaaagtcagagggatgaacttgacagtttttggtggcacggtaacagcctttcttggaattccctrtgcacagccayctcttggtagacttcgattcaaaaagccacagtctctgaccaagtggtctgatatttggaatgccacaaaatatgcaaattcttgctgtcagaacatasrtcaaagttttccaggcttccatggatcagagatgtggaacccaaacactgacctcagtgaagactgtttatatctaaatgtatggattycagcacctaaaccaaaaaatgccactgtattgatatggatttatggtggtggttttyaaactggaacatcatctttwcatgtttrtgatggcaagtttctggctcgggttgaaagagttattgtartgtcaatgaactatagggtgggtgccctaggattcttagctttgccaggaaatcctgaggctccagggaacatgggtttatttgakcaacagttggctcttcagtgggttcaaaaaaatatagcagcctttggtggaaatcctaaaagtgtaactctctttggagaargtgyaggarcagctycagttagcctgcatttgctttctcctggaagccattcattgttcaccagagccattctgcaaagtggatcctttaatgctccttgggcggtaacatctctttatgaagctaggaacagaaygttgaacttagctaaattgactggttgctctagagasaatgagactgaaataatcaagtgtcttagaaataaagatccccaakaaattcttctgaatgaagcatttgttgtcccctatgggactcctttgtcagtaaactttggtccgaccgtggatggtgattttctcactgacatgccagacatattacttgaacttggacaatttaaaaaaacccagattttggtgggtgttaataaagatgaagggacagcttttwtagtctatggtgctcctggcttcagcaaagataacaatagtatcataactagaaaagaatttcaggaaggtttaaaaatattttttccaggagtgagtgagtttvgaaaggaatccatcctttttcattacacagactgggtagatgatcagagacctgaaaactaccgtgaggccttggktgatgttgttggggattataatttcatatgccctgccttggagttcaccaagaagttctcagaatggggaaataatgcctttttctactattttgaacaccgatcctccaaacttccgtggccagaatggatgggagtgatgcatggctatgaaattgaatttgtctttggtttacctctggaaagaagagataattacacaaaagccgaggaaattttgagtagatccatagtgaaacggtgggcaaattttgcaaaatatgggaatccaaatgagactcagaacaatagcacaagctggcctgtcttcaaaagcactgwacaaaaatawctaaccttgaatacagagtcaacaagaataatgacgaaactaygtgctcaacwatgtcgattctggacatcattttttccaaaagtcttggaaatgacaggaaatattgatgaarcagaatgggagtggaaagcaggattccatcgctggaacaattacatgatggactggaaaaatcaatttaacgattacactagcaagaaagaaagttgtgtgggtctctaattaatagatttaccctttatagaacatattttcctttagatcaaggcaaaaatatcaggagcttttttacacacctactaaaaaagttattatgtagctgaaacaaaaatgccagaaggataatattgattcctcacatctttaacttagtattttacctagcatttcaaaacccaaatggctagaacrtgtttaattaaatttcmcaatataaagttctacagttaattatgtgcatattaaaacaatggcctggttcaatttctttctttccttaataaatttaagttttttccccccaaaattatcagtgctctgcttttagtcacgtgtattttcattaccactcgtaaaaaggtatcttttttaaatgaattaaatattgaaacactgtacaccatagtttacaatattatgtttcctaattaaaataagaattgaatgtcaatatgagatattaaaataagcacagaaaatca

SEQ ID NO: 40 - DNA, 2368 bp, Homo sapiens
agtaacagttgattgttacattcagtaacactgaatgtcagtgcagtccaatttacaggctggagcagcagctgcatcctgcatttccccgaagtattacatgattttcactccttgcaaactttrccatctttgttgcagagaatcggaaatcaatatgcatagcaaagtcacaatcatatgcatcagatttctcttttggtttcttttgctctgcatgcttattgggaagtcacatactgaagatgacatcataattgcaacaaagaatggaaaagtcagagggatgaacttgacagtttttggtggcacggtaacagcctttcttggaattccctrtgcacagccayctcttggtagacttcgattcaaaaagccacagtctctgaccaagtggtctgatatttggaatgccacaaaatatgcaaattcttgctgtcagaacatasrtcaaagttttccaggcttccatggatcagagatgtggaacccaaacactgacctcagtgaagactgtttatatctaaatgtatggattycagcacctaaaccaaaaaatgccactgtattgatatggatttatggtggtggttttyaaactggaacatcatctttwcatgtttrtgatggcaagtttctggctcgggttgaaagagttattgtartgtcaatgaactatagggtgggtgccctaggattcttagctttgccaggaaatcctgaggctccagggaacatgggtttatttgakcaacagttggctcttcagtgggttcaaaaaaatatagcagcctttggtggaaatcctaaaagtgtaactctctttggagaargtgyaggarcagctycagttagcctgcatttgctttctcctggaagccattcattgttcaccagagccattctgcaaagtggatcctttaatgctccttgggcggtaacatctctttatgaagctaggaacagaaygttgaacttagctaaattgactggttgctctagagasaatgagactgaaataatcaagtgtcttagaaataaagatccccaakaaattcttctgaatgaagcatttgttgtcccctatgggactcctttgtcagtaaactttggtccgaccgtggatggtgattttctcactgacatgccagacatattacttgaacttggacaatttaaaaaaacccagattttggtgggtgttaataaagatgaagggacagcttttwtagtctatggtgctcctggcttcagcaaagataacaatagtatcataactagaaaagaatttcaggaaggtttaaaaatattttttccaggagtgagtgagtttvgaaaggaatccatcctttttcattacacagactgggtagatgatcagagacctgaaaactaccgtgaggccttggktgatgttgttggggattataatttcatatgccctgccttggagttcaccaagaagttctcagaatggggaaataatgcctttttctactattttgaacaccgatcctccaaacttccgtggccagaatggatgggagtgatgcatggctatgaaattgaatttgtctttggtttacctctggaaagaagagataattacacaaaagccgaggaaattttgagtagatccatagtgaaacggtgggcaaattttgcaaaatatgggaatccaaatgagactcagaacaatagcacaagctggcctgtcttcaaaagcactgwacaaaaatawctaaccttgaatacagagtcaacaagaataatgacgaaactaygtgctcaacwatgtcgattctggacatcattttttccaaaagtcttggaaatgacaggaaatattgatgaarcagaatgggagtggaaagcaggattccatcgctggaacaattacatgatggactggaaaaatcaatttaacgattacactagcaagaaagaaagttgtgtgggtctctaattaatagatttaccctttatagaacatattttcctttagatcaaggcaaaaatatcaggagcttttttacacacctactaaaaaagttattatgtagctgaaacaaaaatgccagaaggataatattgattcctcacatctttaacttagtattttacctagcatttcaaaacccaaatggctagaacrtgtttaattaaatttcmcaatataaagttctacagttaattatgtgcatattaaaacaatggcctggttcaatttctttctttccttaataaatttaagttttttccccccaaaattatttttttaaatgaattaaatattgaaacactgtacaccatagtttacaatattatgtttcctaattaaaataagaattgaatgtcaatatgagat

SEQ ID NO: 41 - DNA, 736 bp, Homo sapiens
agtaacagttgattgttacattcagtaacactgaatgtcagtgcagtccaatttacaggctggagcagcagctgcatcctgcatttccccgaagtattacatgattttcactccttgcaaactttrccatctttgttgcagagaatcgggaatccaaatgagactcagaacaatagcacaagctggcctgtcttcaaaagcactgwacaaaaatawctaaccttgaatacagagtcaacaagaataatgacgaaactaygtgctcaacwatgtcgattctggacatcattttttccaaaagtcttggaaatgacagagcctatatgctgctactgtgagccaggaactgcactagcagctagagctgcacagatgaaaatgacagggtctgcttactcacagtgaagtggagtcagggcccaggaccatggaaagcttttaagaagagaagatacctgcactgaatctcaatgtgaaggcaaagtggagagaagccagataagcaggaaccagagatgaagtgtcttgtgcatcatgctaaagaatttaaattatattctgagtaaagccatttagtaattttaaatgagaaactgatatgttctggttattgattcataaatgtataatcttttactatattcacgagttattcttttttacctttgtcttcttagagtctagattgtaagaatattatatggcatcaacataataatttcatttctgaggtagg

SEQ ID NO: 42 - DNA, 7207 bp, Homo sapiens
ggcgcagcgtccggcggcgtcgcgggcggcgggcggcggggccgcgggaggggcgcgggggcagacaaagccgcggtaatgaatggagcgtccgcccgcgccgccgtcgtccgcagccggccgggagccgccccagaggccgggccgaggtaatgcacaagggtcacgtgtatgctctcaagatgatcaggcagatcctgtcctcaggaccagaagcaygtctctgctgcacacattgttgtctacaccatgagtgtttagtagcaggactcttggaaagcagtgatctatgctgtaagaccatgagtcacagattctttttttcagtactatttatgattagccatatttctagaaacatcctgaaagatggaattatgacgaaaaagtgaagataatctacattcgggggcacaaatgagcacttggatcagtgttttatgaacctaagatacagccggagtagttatggtcagtcatggagaataacttgaaaacttgtcccaaagaggacggtgatttcgtttctgataaaataaagtttaaaatagaagaggaagatgatgatggaattcctcctgatagtttggaaagaatggactttaaaagcgagcaggaggacatgaagcagacagacagcggtggggagcgagcgggcctcggtgggacgggttgcagctgcaagccccckgggaagtacttgtctgcagagagtgaggatgactatggcgcgctgttctcccagtacagcagcaccctatacgacgtggccatggaggccgtgacccagagcctcctttccagccggaacatgagctccaggaagaagtctccagcctggaagcatttttttatctctccccgagacagcactaaagcaatatgcatgtactgtgtgaaggagttcagcagaggcaaaaacgagaaagacttgagtaccagttgtctcatgaggcacgtgaggcgcgcacacccgaccgtgctcattcaggaaaatggcagygtgtctgccgtgtcctcgttcccctctccctcactcctgcttccaccrcagcctgcggacgcgggtgacctcagcaccatcctctcacccatcaaacttgtccagaaagtggcgtctaagatcccgtcccccgatcgaataacagaggagtctgtgtctgtagtttcttctgaagaaatctcctctgacatgtccgtttcggagaagtgcggcagagaagaagccctggtggggtcgtctccccacctccctgctctccattacgatgaacctgcagagaacttagcggagaagagccttccacttccaaagagcacctctgggtccaggagaaggtccgctgtctggaagcacttctacctgtcgccactggacaactccaaagctgtctgcattcactgcatgaacgagttcagccgggggaagaatgggaaggacctgggcacgagctgcctcatcaggcacatgtggagggcacaccgcgccatcgtgttgcaggagaacgggggcacgggcatcccgccactgtactccacccctcccactctgctgccttccttgctgccgccggagggggagctcagctctgtgtcctcgtctccrgtaaagccggtcagagagtccccttcggcctcctcctcccctgacaggctgactgaggacttgcagtctcacttgaaccctggagatgggctgatggaagacgtggcggccttctcatcttccgatgacrtaggggaggcctcggcgtcytctcctgagaagcagcaggctgatgggctgagtcctagattgtttgaatctggygccatcttccagcagaataaaaaggtcatgaaaagactgaagtcggaggtctggcatcacttctccctggcccccatggacagcctcaaggccgagtgtcggtactgcggctgtgccatcagccgggggaagaagggtgatgtgggcaccagctgcctgatgagacatctctaccggcgccatccagaagttgtcgggagccagaagggcttcctgggtgcaagtctggcaaactcyccgtatgccactttggcctctgcagaaagttcctcttccaaattgactgacttgccaacagtggtcacaaaaaacaatcaagttatgtttcctgttaatagcaaaaagacctcgaagctgtggaatcatttttctatttgctccgcagactccacaaaagtcgtgtgcttgcactgtggccggaccatcagccgggggaagaagccgactaacttgggtaccagctgtcttctgagacatttacagcggttccatagcaacgtgctgaaaactgaggtctcggagacggctcggccctcctctccggacacccgggtgccgcggggcacagaattatcaggcgcttcctcttttgatgacaccaatgagaagttttacgattctcacccagttgccaaaaaaatcacaagtctcatagctgaaatgattgcacttgacctccagccatattcttttgtagacaacgttggctttaacaggctgcttgaatacttgaaacctcagtactccctccccgccccttcctacttctccaggacagctatcccaggtatgtatgataatgtgaagcagataattatgtcccaccttaaggaagctgagagtggtgtgatccacttcacgtctggaatatggatgagtaaccagacccgtgagtacctgaccctcacggcccactgggtttccttcgagtcgccagcccggccgcgctgtgacgaccaccactgctcggcgctgttggacgtgtcgcaggtggactgcgactacagtggcaacagcattcagaagcagctggagtgctggtgggaagcgtgggtgacctccaccggccttcaggtgggcatcaccgtcaccgacaacgccagcatygggaagacgctgaacgagggggagcactcgagygtgcagtgcttcagccatacggtgaacctgatcgtcagcgaggccattaagagccagcggatggtgcagaacctgctgagcctcgcccggaagatctgcgagcgggtgcaccggtcgcccaaggcgaaggagaaactggccgagctgcagagggagtacgcgctgcctcagcatcacctcatccaggacgtcccgtccaagtggagcacttccttccacatgctcgagcggctcattgagcagaaaagggccattaacgagatgtccgtcgagtgtaacttccgagagctgatcagctgcgaccagtgggaggtcatgcagtccgtgtgccgtgcgctaaagcccttcgaggcygcgagccgggagatgagcacgcagatgtccaccctcagccaggtcatccccatggtacacatcctcaacaggaaggtggagatgctcttcgaggagacgatgggcatcgacaccatgctgcgctctctgaaggaggccatggtgagccgcctgtctgccaccctccacgacccgcggtacgtcttcgccacgctgctggatcctcgctacaaggcctccctgtttacggaggaggaggcggagcagtacaaacaggatttaatcagggaactcgaactcatgaattctacctcagaggacgtggctgcctcccacaggtgtgatgctggctccccgtcgaaagactctgccgcagaggagaacctgtggtcacttgtggccaaggtgaagaagaaagacccaagagaaaagctgcctgaagccatggtgcttgcgtatctggaggaggaggtgcttgaacacagctgtgacccgctcacctactggaacctgaagaaggcgtcctggccggggctgtccgcgctggccgtcagatttttgggctgccccccaagcatcgtcccttcagaaaagctgttcaacacacccactgagaacggtagccttggccaatccaggctcatgatggaacattttgaaaaacttatctttttgaaagtgaatcttcccttaatatactttcagtattgaaactcacgacggcaccactaggccagaggcgtggctgccccagcgttagcagcctgtaccaggtctatgacccgctctgcccacggctgtgtacgacatcagaccaggcactctcagggccgctctccagctcaccacagtgtctccacgtgccttaccccttctccttcaggccaagtttcgcggggtgttttattaagacgtccactagaaatagcttgtcctgtcaactatgaaatatggtgactagattttaattcataaccgtaaagttttttaaagttttgggttagtaatttgttttactagaatgacaaagaagatgtaaaccattttattctgtaggctttttactcaattatgtacaaaccacaaatcaggtactgtattttagtgaagcattgctttaattgcaacagaatagcttttgtggctatcaaatgaaatctgtaaataggaggtggagggcaagccatcctgactgagcagtttttaaccgcaggttctaaagtgtcccgcggagtacagataatattctggaaggtaactgtttactacgacagagacgtggcatttggaaacgaaacttagatgtttcatggagcttattttgagaactttcccatttcaggtttctgcattcaggctttacatggtcagttaactcagagataccccagctgtttatcatcagctcctctgaaatgtgatccctttgtaactgtgctcatcacttcgccagtgcgttcaatgacacgctgatggcaggtggtccctgctgaaacccccacgcctccgcttcagcatctccacgctctgaagctgtctttcaaaatgtgtgcactgacccccttgtttgatcaaatttgtgtaaaatttttttagaagagatggcttattaacagggaagaagcttgttatattccagttgtaagaatagccttagtgtttagatttttttatgatagggaagatgcggccatcactgggatattttcaaatcccaargacatcagagtgaagtgtcagttgtcagatgattttaaaagttaygtcttcagagaaaaaaagattcattttctcattttaarccaattaaatattctgagtgagactaatcactcatttgcctacgaccttttagaaaagttrttttgttgaaatactgtacgtacgcttaatctaaatttgcattgactatgttttagtgtatttataaatggtgaactcagtttctgaaattaaacttcttatttgcaattttctagtgctggcagacactggctttttatttttaggataagaaaacaggcatattctttgtggtccattatctagagcccatacttgggcagcatttgaaatttcaccttaaccmcagacagggctccagggaagtggagatgtaattcttacaacaacagttctgatcatggccatggtgatgactttccaggtctcgtgttcaagtggtgccagaatgcaggagccggtgggcagccctgaggggttgccttggccgcagcctctgtgcacgctcttcctggtgtcctcttacccggtagctgtgcgcttgttcccgtgagaacagcctgcttccagagtgcccaggagtgctggtcagggacagtgcccgtgaggctgcagaggaggtggggtccatggcccacccatctctccctcgccagcagccctggccagtgtcatcctggtgtagaaagggttgcgcacaggataggagggagccacagttcttgcttagctgtgctcacgaccrgcttgcagtcctgtgtttcttaagattgtatttggaatggtaatatccttagaattttgggatattgagcttcatggattttctctccaaaacaagccagcacaactaactgtagcagaattgtatccactcattcattcaactgagatgaagtgccctcccttttccagggcctgggctagttcctggaatgcaacagagatttccgtggacacagtctctagtctcacagagcatatagtctagtccacgattggcaagctgcaaccacagacccagtccggcactctgcccatttttctaagtgaaattttcttggaatacagtcacagctgtttttttaacatggtgtcttggctactttcaggctgcgacgggagaaytgaatagttgtgacagagaccacaggcccactgaaagggacaaacagggctgaaaatactcactgtttggccctttccagaatagcaagtttgctggcccttgagctagcctgcctttatggggttttttttgtttgtttttttaagctttcagcttcatgctgctgtatttttagttgaagtgttctgagtaacagtcagtgtataaaaggggattgcagaaaaaaatgagggcttgctttactcaacagaaaatatggcccttcctgaatgacactaggagagtcattttatctcatacattcccttcatttcgttggtggacatttgttgaaaccggcactcaatggtcaaaccgtctgtgccctccagttgctgacagtcctgcaggaagatggacaagaggcccagtgctgacagtcacacgactctcactacttgaatgaggggactgtgggtgcaactagaaaatatgttgattcttagccattcccaccttgcctctccgttcagaaccccagctgcgagctgtttgtttccctgcctggaaatgatgttttaggcaggttccttaatttctcaggtctgtctcagataataaaaagctctttgtatgagcctcagaactgtctcttcagtgaatgaaattaccagtcattatacgaagggactttaaaaaatttgtggaaatactgaagtaaaagatgataaaaaaataaaaactttatttcttggctgggcacagtggcttatgtttgtaatcccagtactttgggaggctgaggtgggaggactgcttgaggccaggagttcaagaaattagccaggtttggtagtgcatgcctgtagtcccagctacttgggaggcagagggaggaggattacttgagcccaggagtttgaggttgcagtgagctgtgatcacaccactgcactctagcctggacaacagagcaagatcctctctcttaaaaccaccaacaatgacaacaacaaaacaacatttttatttctcaatgtaagctccatcaagrtcaagatacttttgtaagc

SEQ ID NO: 43 - DNA, 2994 bp, Homo sapiens
ccctcgtctgggccgagcccgcccagctggctgagacgcgtggagcctggcggcgagtgggggcgtgcgacggttactctggttactgggsscgcgccgcgctggcgagagccgccgcccgcgagggatgctggtgaggaagccgtcgggagccgccgccgccatctgagggaggtaccctggaaaccaccttttatcggtggggaagtgcagtcgcggtgggcggctctgggggccagcgaaacgggaggcctctaaatctttaggttggggctgcattgccctggagccgcactcttgagtccgaggccatcttttgttggagaaggcgtcggcgttggcgttttcccsaggttgggctgtacagtgtctccgtccgcggaaaaagaagcctctgaacccgcgccggcccgcagcccccgtgccttccggccgctgctcgccgtcgccagaggctaggccacgtttcccccagtgccgaggtgtttctgtgaccctccctccactcccattcccttctgaaagggcacctgctcttggtgagaaaagaaattatagcacgaagagccagtatcagaagagtatccatcacccgcagcaaccgctcagggaacaccatcaaaaaagaaaaaaagggaatatctggatttcctgggcgaggaggagcgagtctgctcgggagctgttccagcaggcgatttttaaatactgctttctacgccctatacaacttggcttcacatacttttacactaactttatatgatttttaaaaactggtctgatcggacttctcgtcctgggacactgtttactggagtctggccggctctccgtgctcctcttggtacctcattttggggagaaccttaaacccactcgagcagataatctccgccttgaccggtgccaccaaagaagcsttggaaccatgtggacttttctgggcattgccactttcacctatttttataagaagttcggggacttcatcactttggccaacagggaggtcctgttgtgcgtgctggtgttcctctcgctgggcctggtgctctcctaccgctgtcgccaccgaaacgggggtctcctcgggcgccagcagagcggctcccagttcgccctcttctcggatattctctcaggcctgcctttcattggcttcttctgggccaaatccccccctgaatcagaaaataaggagcagctcgaggccaggaggcgcagaaaaggaaccaatatttcagaaacaagcttaataggaacagctgcctgtacatcaacatcttctcagaatgacccagaagttatcatcgtgggagctggcgtgcttggctctgctttggyagctgtgctttccagagatggaagaaaggtgacagtcattgagagagacttaaaagagcctgacagaatagttggagaattcctgcagccgggtggttatcatgttctcaaagaccttggtcttggagatacagtggaaggtcttgatgcccaggttgtaaatggttacatgattcatgatcaggaaagcaaatcagaggttcagattccttaccctctgtcagaaaacaatcaagtgcagagtggaagagctttccatcacggaagattcatcatgagtctccggaaagcagctatggcagagcccaatgcaaagtttattgaaggtgttgtgttacagttattagaggaagatgatgttgtgatgggagttcagtacaaggataaagagactggagatatcaaggaactccatgctccactgactgttgttgcagatgggcttttctccaagttcaggaaaagcctggtctccaataaagtttctgtatcatctcattttgttggctttcttatgaagaatgcaccacagtttaaagcaaatcatgctgaacttattttagctaacccgagtccagttctcatctaccagatttcatccagtgaaactcgagtacttgttgacattagaggagaaatgccaaggaatttaagagaatacatggttgaaaaaatttacccacaaatacctgatcacctgaaagaaccattcttagaagccactgacaattctcatctgaggtccatgccagcaagcttccttcctccttcatcagtgaagaaacgaggtgttcttcttttgggagacgcatataatatgaggcatccacttactggtggaggaatgactgttgcttttaaagatataaaactatggagaaaactgctaaagggtatccctgacctttatgatgatgcagctattttcgaggccaaaaaatcattttactgggcaagaaaaacatctcattcctttgtcgtgaatatccttgctcaggctctttatgaattattttctgccacagatgattccctgcatcaactaagaaaagcctgttttctttatttcaaacttggtggcgaatgtgttgcgggtcctgttgggctgctttctgtattgtctcctaaccctctagttttaattggacacttctttgctgttgcaatctatgcygtgtatttttgctttaagtcagaaccttggattacaaaacctcgagcccttctcagtagtggtgctgtattgtacaaagcgtgttctgtaatatttcctctaatttactcagaaatgaagtatatggttcattaagcttaaaggggaaccatttgtgaatgaatatttggaacttaccaagtcctaagagacttttggaagaggatatatatagcatagtaccataccacttataaagtggaaactcttggaccaagatttggattaatttgtttttgaagttttttgtatataaatatgtaaatacatgctttaatttgcartttaaaatgaaggggttaaataagttagacatttraaagaaatgattgttaccataaattagtgctaatgctgaggagaactacastttttcttttgaatttagtatttgagatgagttgttgggacatgcaaataaaatgaagaatgaa

SEQ ID NO: 44 - DNA, 737 bp, Homo sapiens
gtaccagcgccggaagttggtctcgacacctggactagccgggttgtatttggaaacgcggagtgagtttttccgtgctgtgtaggggctaacaatggacacccagaaggacgttcaacctccaaagcagcaaccaatgatatatatctgtggagagtgtcacacagaaaatgaaataaaatctagggatccaatcagatgcagagaatgtggatacagaataatgtacaagaaaaggactaaaagattggtcgtttttgatgctcgatgaatgctgggaattcagaggaatgtcttcacttatacttggatttgctctcttcccrtttctgattgttgtatagctttcgattttgcttacagtagttcccccttatcttckggagatacattccaaggcccccagtgaactcctgaaacctcaaacagtaccaaacctttatacactgttttttccatatatatatacctatgataaagtataatgtataaattaagcatagcaagagattaataataatgtaatagaacaatgataacatactataataaaagttatgtgaatgtggttggtctctcttgctttcaaaatatcttcttgtacagtactcrcctattttagaatgtggttgactacaggaatacaactatatacatatgattttatttttaagaccatattatatttgggtatctactaatattttgtataaagcaattttttgttccattacgtg

SEQ ID NO: 45 - DNA, 956 bp, Homo sapiens
gtaccagcgccggaagttggtctcgacacctggactagccgggttgtatttggaaacgcggagtgagtttttccgtgctgtgtaggggctaacaatggacacccagaaggacgttcaacctccaaagcagcaaccaatgatatatatctgtggagagtgtcacacagaaaatgaaataaaatctagggatccaatcagatgcagagaatgtggatacagaataatgtacaagaaaaggactaaaagattggtcgtttttgatgctcgatgaatgctgggaattcagaggaatgtcttcacttatacttggatttgctctcttcccrtttctgattgttgtatagctttcgattttgcttacagtagttcccccttatcttckggagatacattccaaggcccccagtgaactcctgaaacctcaaacagtaccaaacctttatacactgttttttccatatatatatacctatgataaagtataatgtataaattaagcatagcaagagattaataataatgtaatagaacaatgataacatactataataaaagttatgtgaatgtggttggtctctcttgctttcaaaatatcttcttgtacagtactcrcctattttagaatgtggttgactacaggtaaccaaaaccacagaaagggaaactttggatgaggggggcactactgtacttaggaatacaactatatacatatgattttatttttaagaccatattatatttgggtatctactaatattttgtataaagcaattttttgttccattacgtgactttttgttttattgtatatgtaatttaacacmcaataaagggtaaagttgcttccccaaaccacasttttaatcaaaacctagaatcatctgcagtccttgttaaaaatgcaggtttctagaaccctctgaagttctgattaaataaatttattgcaaacc

SEQ ID NO: 46 - DNA, 765 bp, Homo sapiens
tgcactccagtccgggctggcggacagagggctggaaacaagacgctccagaatcaggagcttcccctcaggaaatagcatcctgtgtccccgcactgcagttgtctggtctctccagcagtttggtacttccgggctgctgcaatgcgtgtggtggtgattggagcaggagtcatcgggctgtccaccgccctctgcatccatgagcgctaccactcagtcctgcagccactggacataaaggtctacgcggaccgcttcaccccactcaccaccaccgacgtggctgccggcctctggcagccctacctttctgaccccaacaacccacaggaggcggactggagccaacagacctttgactatctcctgagccatgtccattctcccaacgctgaaaacctgggcctgttcctaatctcrggctacaacctcttccatgargccattccggacccttcctggaaggacacagttctgggatttcggaagctgacccccagagagctggatatgttcccagattacgggcaaaggggactggggcctgacragttagcagacctgtccagaaggcagcagagggtagaggcaccagatttcctgtcctacccaggccctggtaccctggtctcctggtccttggtccagctccttcagagaggctacccactcaaacctggccttgggctgggaagctatggctggttccacacaagcctaattctggagggaaagaacyatctacagtggctgactgaaagg

SEQ ID NO: 47 - DNA, 1686 bp, Homo sapiens
gtccgggctggcggacagagggctggaaacaagacgctccagaatcaggagcttcccctcaggaaatagcatcctgtgtccccgcactgcagttgtctggtctctccagcagtttggtacttccggctgctgcaatgcgtgtggtggtgattggagcaggagtcatcgggctgtccaccgccctctgcatccatgagcgctaccactcagtcctgcagccactggacataaaggtctacgcggaccgcttcaccccactcaccaccaccgacgtggctgccggcctctggcagccctacctttctgaccccaacaacccacaggaggcggactggagccaacagacctttgactatctcctgagccatgtccattctcccaacgctgaaaacctgggcctgttcctaatctcrggctacaacctcttccatgargccattccggacccttcctggaaggacacagttctgggatttcggaagctgacccccagagagctggatatgttcccagattacggctatggctggttccacacaagcctaattctggagggaaagaacyatctacagtggctgactgaaaggttaactgagaggggagtgaagttcttccagcggaaagtggagtcttttgaggaggtggcaagagaaggcgcagacgtgattgtcaactgcactggggtatgggctggggcgctacaacgagaccccctgctgcagccaggccgggggcagatcatgaaggtggacgccccttggatgaagcacttcattctcacccatgacccagagagaggcatctacaattccccgtacatcatcccagggacccagacagttactcttggaggcatcttccagttgggaaactggagtgaactaaacaatatccaggaccacaacaccatttgggaaggctgctgcagactggagcccacactgaagaatgcaagaattattggtgaacgaactggcttccggccagtacgcccccagattcggctagaaagagaacagcttcgcactggaccttcaaacacagaggtcatccacaactatggccatggaggctacgggctcaccatccactggggatgtgccctggaggcagccaagctctttgkkagaatcctggaagaaaagaaattgtccagaatgccaccatcccacctctgaagactccagtgactgctgcctcccccsacaagaactcccttctcccctcagccaatgaatcaatgtgctccttcataagccattgcttctccctcacttctttcctcaaagaagcatgaggtgagagaaagccacaaagtcagtgcctggagaagggttcagcccaacatggggcccctctcatcactgaaatccctctaccttctctgggtctggcattataaagaacagctgaggctgtcattccatgagtcttcagaagaaaggacagctcagaaartcaaagaggccaactgcccagagccacagaaaatggaggataattgaggctaagtaacctgattacaagttgtactaacatattaaaggttctgaaaagtcctgcagcaaagacaactatctgatgttgtttaacccagtgcttgctaaacctatctggctatggaactcttttgcccagagcacccatgaatgccatgacacaaatctgagaaaatgctggaacaga

SEQ ID NO: 48 - DNA, 1696 bp, Homo sapiens
tgcactccagtccgggctggcggacagagggctggaaacaagacgctccagaatcaggagcttcccctcaggaaatagcatcctgtgtccccgcactgcagttgtctggtctctccagcagtttggtacttccgggctgctgcaatgcgtgtggtggtgattggagcaggagtcatcgggctgtccaccgccctctgcatccatgagcgctaccactcagtcctgcagccactggacataaaggtctacgcggaccgcttcaccccactcaccaccaccgacgtggctgccggcctctggcagccctacctttctgaccccaacaacccacaggaggcggactggagccaacagacctttgactatctcctgagccatgtccattctcccaacgctgaaaacctgggcctgttcctaatctcrggctacaacctcttccatgargccattccggacccttcctggaaggacacagttctgggatttcggaagctgacccccagagagctggatatgttcccagattacggctatggctggttccacacaagcctaattctggagggaaagaacyatctacagtggctgactgaaaggttaactgagaggggagtgaagttcttccagcggaaagtggagtcttttgaggaggtggcaagagaaggcgcagacgtgattgtcaactgcactggggtatgggctggggcgctacaacgagaccccctgctgcagccaggccgggggcagatcatgaaggtggacgccccttggatgaagcacttcattctcacccatgacccagagagaggcatctacaattccccgtacatcatcccagggacccagacagttactcttggaggcatcttccagttgggaaactggagtgaactaaacaatatccaggaccacaacaccatttgggaaggctgctgcagactggagcccacactgaagaatgcaagaattattggtgaacgaactggcttccggccagtacgcccccagattcggctagaaagagaacagcttcgcactggaccttcaaacacagaggtcatccacaactatggccatggaggctacgggctcaccatccactggggatgtgccctggaggcagccaagctctttgkkagaatcctggaagaaaagaaattgtccagaatgccaccatcccacctctgaagactccagtgactgctgcctcccccsacaagaactcccttctcccctcagccaatgaatcaatgtgctccttcataagccattgcttctccctcacttctttcctcaaagaagcatgaggtgagagaaagccacaaagtcagtgcctggagaagggttcagcccaacatggggcccctctcatcactgaaatccctctaccttctctgggtctggcattataaagaacagctgaggctgtcattccatgagtcttcagaagaaaggacagctcagaaartcaaagaggccaactgcccagagccacagaaaatggaggataattgaggctaagtaacctgattacaagttgtactaacatattaaaggttctgaaaagtcctgcagcaaagacaactatctgatgttgtttaacccagtgcttgctaaacctatctggctatggaactcttttgcccagagcacccatgaatgccatgacacaaatctgagaaaatgctggaacaga

SEQ ID NO: 49 - DNA, 1849 bp, Homo sapiens
ggaccacctgggtgctgtcgtagttggaggtggcctgaggagctcagttccctcagcgcccgtagcttcggcggagtctgcgcgatgggcgacccggaaaggccggaagcggccgggctggatcaggatgagagatcatcttcagacaccaacgaaagtgaaataaagtcaaatgaagagccactcctaagaaagagttctcgccggtttgtcatctttccaatccagtaccctgatatttggaaaatgtataaacaggcacaggcttccttctggacagcagaagaggtcgacttatcaaaggatctccctcactggaacaagcttaaagcagatgagaagtacttcatctctcacatcttagccttttttgcagccagtgatggaattgtaaatgaaaatttggtggagcgctttagtcaggaggtgcaggttccagaggctcgctgtttctatggctttcaaattctcatcgagaatgttcactcagagatgtacagtttgctgatagacacttacatcwgagatcccaagaaaagggaatttttatttaatgcaattgaaaccatgccctatgttaagaaaaaagcagattgggccttgcgatggatagcagatagaaaatctacttttggggaaagagtggtggcctttgctgctgtagaaggagttttcttctcaggatcttttgctgctatattctggctaaagaagagaggtcttatgccaggactcactttttccaatgaactcatcagcagagatgaaggacttcactgtgactttgcttgcctgatgttccaatacttagtaaataagccttcagaagaaagggtcagggagatcattgttgatgctgtcaaaattgagcaggagtttttaacagaagccttgccagttggcctcattggaatgaattgcattttgatgaaacagtacattgagtttgtagctgacagattacttgtggaacttggattctcaaaggtttttcaggcagaaaatccttttgattttatggaaaacatttctttagaaggaaaaacaaatttctttgagaaacgagtttcagagtatcagcgttttgcagttatggcagaaaccacagataacgtcttcaccttggatgcagatttttaaaaaacctctygttttaaaactctataaacttgtcattggtaaatagtagtctattttcctctgcttaaaaaaaattttaagtatatcctttaaaggactgggggtttgctcaaaaggaaatccaaaacctattctaaacaatttgcatttatataattttcctgtttaacaacaagagtgtgacctaaatgcttttgtcttgtcactgaaataaaagatggcattatgtggttaagagcatggggcgaggggtcagacatgagtctaaggttctgcccttactccagtgtgtgacccttggcaagtcagttaatcttggtaaacctcggtgtacttatctttaaaatgggagtaatagtaggtcctaaattcatagagtggatattaggattaggatgcaaaaataaatgcttaaccaacactactactgttagcaccactactaattatcattcattgataatattaattgcaatgatgttgtaataaaatactctcatttccttaaaataattgtgattctaggtcctaggatctagaattagatctttgtatttttaatgcttaggggaagaatataagtatctccttaaaaagaacataattctcattcacgcaagaataagttctttgaattccttagtatgtagtgaagaaaatttagttgttagttgctttgggaagcctacttatggagtggaaaccagga

SEQ ID NO: 50 - DNA, 1554 bp, Homo sapiens
ctccagtctatccccagtgtgagctagagagcggaccatgaaggaagtgggcagaccccgggaagttagaggacgcccggggaaaagcagaattcagaaggagctggcggacatcactttagaccctccacctaattgcagtgctggtcccaaaggcgataacatctatgaatggagatcaaccattctagggcctccaggatccgtgtatgagggtggtgtattctttctcgatatcacttttacaccagaatatcccttcaagcctccaaaggttacatttcggacaagaatctatcattgtaatattaacagtcaaggtgttatttgcttggacatattgaaagataattggagtccagcactaaccatttctaaagtcctcctttctatctgctcacttcttacagactgtaatcctgccgaccccttggtgggaagtattgccactcagtatatgaccaacagagcagaacatgacagaatggccagacagtggaccaagagatacgctacataaattggggtttcacaattcttacattatttgtctgtcacagaagagagctgcttatgattttgaaggggtcagggagggtgggagttggtaaagagtagggtatttctataacagatattattcagtcttatttcctaagattttgttgtaacttaaggtatcttgctacagtagacagaattggtaatagcaacttttaaaattgtcattagttctgcaatattagctgaaatgtagtacagaaaagaatgtacatttagacatttgggttcagttgcttgtagtctgtaaatttaaaacagcttaatttggtacaggttacacatatggccatttatgtaaagtccctctaagactacatactttttgtttaaaacaaaattggaatttgttttcccttcttggaagggaacattgatatttaacagagtttttagagattgtcatctcatatatataaaatggacacgtggctataaaacmccatataagagatgagtagtgcgttttattttatatgccaatctactttgtttwaaaaaggtctgaatcaggacttgtgaaaacctgtagtgaaataccttaagctgttaactaactgtaaggcgtggaataggagttgctcagtggattggttctatgttgtggactacttaagtctgcatttgttactgtgctaataaacaatattaaaaaccacctaataaacactgctgtgttcatttacttttcttttgccttttggttgccattcgcagattcttctgaaatcgataggtatctgcttctaaaacaagctaaaaataatgcatatttagtaggtattagttagttacctatattaggatctgtactttacacagctgtagatgaggtatcctagaaaaggttaaataatctaccccatttaggcttcaaagacgaaccctactgcatctttttaaaagcattttctgacttgcagatgctgtagtagcaagtacatgagaaatgggttccgtsatggataaattggtmccctgccttagggggca

SEQ ID NO: 51 - DNA, 1303 bp, Homo sapiens
gcggaggagtggtgtgtgtgcgagcgtgtgtggctgggggaagccattgcctgtttaatagttgctgttgctgcacttccgcttctctcccagcgagagagagacacgagtggccaggcccagccgcagccgcagcagcagccgccgcggcggcacggaggagccagacacaaagagaggggctgtttgcggggtggggtggggggttcgctatgtcggatgacgattcgagggccagcaccagctcctcctcatcttcgtcttccaaccagcaaaccgagaaagamacaaacacccccaagaagaaggagagtaaagtcagcatgagcaaaaactccaaactcctctccaccagcgccaagagaattcagaaggagctggcggacatcactttagaccctccacctaattgcagtgctggtcccaaaggcgataacatctatgaatggagatcaaccattctagggcctccaggatccgtgtatgagggtggtgtattctttctcgatatcacttttacaccagaatatcccttcaagcctccaaaggttacatttcggacaagaatctatcattgtaatattaacagtcaaggtgttatttgcttggacatattgaaagataattggagtccagcactaaccatttctaaagtcctcctttctatctgctcacttcttacagactgtaatcctgccgaccccttggtgggaagtattgccactcagtatatgaccaacagagcagaacatgacagaatggccagacagtggaccaagagatacgctacataaattggggtttcacaattcttacattatttgtctgtcacagaagagagctgcttatgattttgaaacagatattattcagtcttatttcctaagattttgttgtaacttaaggtatcttgctacagtagacagaattggtaatagcaacttttaaaattgtcattagttctgcaatattagctgaaatgtagtacagaaaagaatgtacatttagacatttgggttcagttgcttgtagtctgtaaatttaaaacagcttaatttggtacaggttacacatatggccatttatgtaaagtccctctaagactacatactttttgtttaaaacaaaattggaatttgttttcccttcttggaagggaacattgatatttaacagagtttttagagattgtcatctcatatatataaaatggacacgtggctataaaacmccatataagagatgagtagtgcgttttattttatatgccaatctactttgtttwaaaaaggtctgaatcagg

SEQ ID NO: 52 - DNA, 1589 bp, Homo sapiens
aggtcactcgggcccgaggggcctcgtggggagcggccatgttggcttcgtcactgaggactccgggcgggtcgggtgttgagcgaggcctcggaccttcggcctgtcgggggcgccctgccgggaattcagaaggagctggcggacatcactttagaccctccacctaattgcagtgctggtcccaaaggcgataacatctatgaatggagatcaaccattctagggcctccaggatccgtgtatgagggtggtgtattctttctcgatatcacttttacaccagaatatcccttcaagcctccaaaggttacatttcggacaagaatctatcattgtaatattaacagtcaaggtgttatttgcttggacatattgaaagataattggagtccagcactaaccatttctaaagtcctcctttctatctgctcacttcttacagactgtaatcctgccgaccccttggtgggaagtattgccactcagtatatgaccaacagagcagaacatgacagaatggccagacagtggaccaagagatacgctacataaattggggtttcacaattcttacattatttgtctgtcacagaagagagctgcttatgattttgaaggggtcagggagggtgggagttggtaaagagtagggtatttctataacagatattattcagtcttatttcctaagattttgttgtaacttaaggtatcttgctacagtagacagaattggtaatagcaacttttaaaattgtcattagttctgcaatattagctgaaatgtagtacagaaaagaatgtacatttagacatttgggttcagttgcttgtagtctgtaaatttaaaacagcttaatttggtacaggttacacatatggccatttatgtaaagtccctctaagactacatactttttgtttaaaacaaaattggaatttgttttcccttcttggaagggaacattgatatttaacagagtttttagagattgtcatctcatatatataaaatggacacgtggctataaaacmccatataagagatgagtagtgcgttttattttatatgccaatctactttgtttwaaaaaggtctgaatcaggacttgtgaaaacctgtagtgaaataccttaagctgttaactaactgtaaggcgtggaataggagttgctcagtggattggttctatgttgtggactacttaagtctgcatttgttactgtgctaataaacaatattaaaaaccacctaataaacactgctgtgttcatttacttttcttttgccttttggttgccattcgcagattcttctgaaatcgataggtatctgcttctaaaacaagctaaaaataatgcatatttagtaggtattagttagttacctatattaggatctgtactttacacagctgtagatgaggtatcctagaaaaggttaaataatctaccccatttaggcttcaaagacgaaccctactgcatctttttaaaagcattttctgacttgcagatgctgtagtagcaagtacatgagaaatgggttccgtsatggataaattggtmccctgccttagggggca

SEQ ID NO: 53 - DNA, 1828 bp, Homo sapiens
gcggaggagtggtgtgtgtgcgagcgtgtgtggctgggggaagccattgcctgtttaatagttgctgttgctgcacttccgcttctctcccagcgagagagagacacgagtggccaggcccagccgcagccgcagcagcagccgccgcggcggcacggaggagccagacacaaagagaggggctgtttgcggggtggggtggggggttcgctatgtcggatgacgattcgagggccagcaccagctcctcctcatcttcgtcttccaaccagcaaaccgagaaagamacaaacacccccaagaagaaggagagtaaagtcagcatgagcaaaaactccaaactcctctccaccagcgccaagagaattcagaaggagctggcggacatcactttagaccctccacctaattgcagtgctggtcccaaaggcgataacatctatgaatggagatcaaccattctagggcctccaggatccgtgtatgagggtggtgtattctttctcgatatcacttttacaccagaatatcccttcaagcctccaaaggttacatttcggacaagaatctatcattgtaatattaacagtcaaggtgttatttgcttggacatattgaaagataattggagtccagcactaaccatttctaaagtcctcctttctatctgctcacttcttacagactgtaatcctgccgaccccttggtgggaagtattgccactcagtatatgaccaacagagcagaacatgacagaatggccagacagtggaccaagagatacgctacataaattggggtttcacaattcttacattatttgtctgtcacagaagagagctgcttatgattttgaaggggtcagggagggtgggagttggtaaagagtagggtatttctataacagatattattcagtcttatttcctaagattttgttgtaacttaaggtatcttgctacagtagacagaattggtaatagcaacttttaaaattgtcattagttctgcaatattagctgaaatgtagtacagaaaagaatgtacatttagacatttgggttcagttgcttgtagtctgtaaatttaaaacagcttaatttggtacaggttacacatatggccatttatgtaaagtccctctaagactacatactttttgtttaaaacaaaattggaatttgttttcccttcttggaagggaacattgatatttaacagagtttttagagattgtcatctcatatatataaaatggacacgtggctataaaacmccatataagagatgagtagtgcgttttattttatatgccaatctactttgtttwaaaaaggtctgaatcaggacttgtgaaaacctgtagtgaaataccttaagctgttaactaactgtaaggcgtggaataggagttgctcagtggattggttctatgttgtggactacttaagtctgcatttgttactgtgctaataaacaatattaaaaaccacctaataaacactgctgtgttcatttacttttcttttgccttttggttgccattcgcagattcttctgaaatcgataggtatctgcttctaaaacaagctaaaaataatgcatatttagtaggtattagttagttacctatattaggatctgtactttacacagctgtagatgaggtatcctagaaaaggttaaataatctaccccatttaggcttcaaagacgaaccctactgcatctttttaaaagcattttctgacttgcagatgctgtagtagcaagtacatgagaaatgggttccgtsatggataaattggtmccctgccttagggggca

SEQ ID NO: 54 - DNA, 5566 bp, Homo sapiens
ggcacccgagccctgagagtccgccgccaacgcgcaggtgctagcggccccttcgccctgcagcccctttgcttttactctgtccaaagttaacatgtcactgaaaaacgagccacgggtaaayacctctgcactgcagaaaattgctgctgacatgagtaatatcatagaaaatctggacacgcgggaactccactttgagggagaggaggtagactacgacgtgtctcccagcgatsccaagatacaagaagtgtatatccctttctctgctatttataacactcaaggatttaaggagcctaatatacagacgtatctctccggctgtccaataaaagcacaagttctggaagtggaacgcttcacatctacaacaagggtaccaagtattaatctttacactattgaattaacacatggggaatttaaatggcaagttaagaggaaattcaagcattttcaagaatttcacagagagctgctcaagtacaaagcctttatccgcatccccattcccactagaagacacacgtttaggaggcaaaacgtcagagaggagcctcgagagatgcccagtttgccccgttcatctgaaaacatgataagagaagaacaattccttggtagaagaaaacaactggaagattacttgacaaagatactaaaaatgcccatgtatagaaactatcatgccacaacagagtttcttgatataagccagctgtctttcatccatgatttgggaccaaagggcatagaaggtatgataatgaaaagatctggaggacacagaataccaggcttgaattgctgtggtcagggaagagcctgctacagatggtcaaaaagatggttaatagtgaaagattcctttttattgtatatgaaaccagacagcggtgccattgccttcgtcctgctggtagacaaagaattcaaaattaaggtggggaagaaggagacagaaacgaaatatggaatccgaattgataatctttcaaggacacttattttaaaatgcaacagctatagacatgctcggtggtggggaggggctatagaagaattcatccagaaacatggcaccaactttctcaaagatcatcgatttgggtcatatgctgctatccaagagaatgctttagctaaatggtatgttaatgccaaaggatattttgaagatgtggcaaatgcaatggaagaggcaaatgaagagatttttatcacagactggtggctgagtccagaaatcttcctgaaacgcccagtggttgagggaaatcgttggaggttggactgcattcttaaacgaaaagcacaacaaggagtgaggatcttcataatgctctacaaagaggtggaactcgctcttggcatcaatagtgaatacaccaagaggactttgatgcgtctacatcccaacataaaggtgatgagacacccggatcatgtgtcatccaccgtctatttgtgggctcaccatgagaagcttgtcatcattgaccaatcggtggcctttgtgggagggattgacctggcctatggaaggtgggacgacaatgagcacagactcacagacgtgggcagtgtgaagcgggtcacttcaggaccgtctctgggttccctcccacctgccgcaatggagtctatggaatccttaagactcaaagataaaaatgagcctgttcaaaacctacccatccagaagagtattgatgatgtggattcaaaactgaaaggaataggaaagccaagaaagttctccaaatttagtctctacaagcagctccacaggcaccacctgcacgacgcagatagcatcagcagcattgacagcacctccagttattttaatcactatagaagtcatcacaatttaatccatggtttaaaaccccacttcaaactctttcacccgtccagtgagtctgagcaaggactcactagacctcatkctgataccgggtccatccgyagtttacagacaggtgtgggagagctgcatggggaaaccagattctggcatggaaaggactactgcaatttcgtcttcaaagactgggttcaacttgataaaccttttgctgatttcattgacaggtactccacgccccggatgccctggcatgacattgcctctgcagtccacgggaaggcggctcgtgatgtggcacgtcacttcatccagcgctggaacttcacaaaaattatgaaatcaaaatatcggtccctttcttatccttttctgcttccaaagtctcaaacaacagcccatgagttgagatatcaagtgcctgggtctgtccatgctaacgtacagttgctccgctctgctgctgattggtctgctggtataaagtaccatgaagagtccatccaygccgcttacgtccatgtgatagagaacagcaggcactatatctatatcgaaaaccagtttttcataagctgtgctgatgacaaagttgtgttcaacaagataggcgatgccattgcccagaggatcctgaaagctcacagggaaaaccagaaataccgggtatatgtcrtgataccacttctgccagggttcgaaggagacatttcaaccggcggaggaaatgctctacaggcaatcatgcacttcaactacagaaccatgtgcagaggagaaaattccatccttggacagttaaaagcagagcttggtaatcagtggataaattacatatcattctgtggtcttagaacacatgcagagctcgaaggaaacctagtmactgagcttatctatgtccacagcaagttgttaattgctgatgataacactgttattattggctctgccaacataaatgaccgcagcatgctgggaaagcgtgacagtgaaatggctgtcattgtgcaagatacagagactgttccttcagtaatggatggaaaagagtaccaagctggccggtttgcccgaggacttcggctacagtgctttagggttgtccttggctatcttgatgacccaagtgaggacattcaggatccagtgagtgacaaattcttcaaggaggtgtgggtttcaacagcagctcgaaatgctacaatttatgacaaggttttccggtgccttcccaatgatgaagtacacaatttaattcagctgagagactttataaacaagcccrtattagctaaggaagatcccattcgagctgaggaggaactgaagaagatccgtggatttttggtgcaattccccttttatttcttgtctgaagaaagcctactgccttctgttggraccaaagaggccatagtgcccatggaggtttggacttaagagatattcattggcagctcaaagacttccaccctggagacmacactgcacacagtgacttcctggggatgtcatagccaaagccaggcctgacgcattctcgtatccaacccaaggaccttttggaatgactggggagggctgcagtcacattgatgtaaggactgtaaacatcagcaagactttataattccttctgcctaacttgtaaaaagggggctgcattcttgttggtagcatgtactctgttgagtaaaacacatattcaaattccgtataccaaaatccatttcctttgtaacaagaatttaccagtaactgtgatctaggttgccaaaagttgtctgaatctccttattcttctctgatcttcatttatgcagccaatgtctagctggacctgccctcatcttgcagttcatacaggcactgtttgagagattgtttattattagatgttgtaatgctgcttcaagattcttcatggttacatgggatgcccctgctcatctggtcctgaagtagtaacattcacccaaatgaggatatagtcattattccttttcagtcactgtacgaacacggcagactttagcctacacagtagactgtgttaggcacttctggtaacattgacactgtatcttgacaccactaagcaacaggaaggaataaattccaatattgagacagagatttatttcattttgctcccaaaggcactgacaacatgagtccttgtgattaggcccacctgatcaaatgtaaaaacatgcatgggatatttgattacgtaacaaccagctaaaactgagagcacacagccttcggaaacccccaaggtgtcgaggaggatcagatccagataagagaagatgattccttctagtcctgtaaaatttcctgtcatccttagctgctgggttgattgaaatttgatctctacatttcaaaatcaaactagtgaatacagtttgtctttcaagagaatcagaggcatcgtaactcctaccaagttagtaagtatgagtctaaccttgtttgacattcaggtcttctgctacattatcttctttgagaaaaattaattgattataaaatatgtgctacttcacttacattattaaatatgtattaacgcctctcaccagggcttccagtgaagttacaatgccctagtctgtgaattagtctggaaacgtgtttttccttttcggatgttagagtaccctttgataaactaaattttactaagctgaacaactctgacagtctaaagagctaatgtgggttaccaaaaggcctgtacctgtaaaacaaaatgcaggtgtaatgattatacatgtctatggattacctggacatactctcatttgggttgttcttcaaagaagcaagcagccgatccctgttttcataaagctaatacttcagttggaaaaattaaacaggagcacaaagtcagggataggggttagcagaagagagaaatagtgtcacatcaagggcaggatctcatagctagggaacatttcacaaataaggtgagattttgtaaccaataataaaaatgaatgtttttataagtaaataacttatttttcatatggctaaagatggtaaaatgacttcattctatagccattgtaaataagaatttgctattgatgaaagaagttcagattggcatttgaagtattgagtgtatgggatctctaaggatttcttagattttatatttaaatattttttaaaccttagaggagtcaacaaactggctcttgattttcagcaccctactctcatgaaaaaagcctgaaaggaccctttcccttataagtaatttaatccaatttctccccattttatagatgaggaaactgaggctcagatcagatgagaactcacttaaatccactcaatgtgtagatggtagagctgggactagcaacattgctgcagcccattgttggcctctctcttcactttatcattgcccaagaatgaggatatgcagtaaacagaattcaggcaagatacctytaagctgttttgaaccctctgatattttgtatttatgtgtttgtctgtctccccctactagaatgtaagctccatggggcagggacttcactgtattttgttcatagtgtatccccagagcctggaccagtgcttggcacataggagatggcaataaatgcttgtagaattaataaacaaggtgaaggagagagctaatgaaat

SEQ ID NO: 55 - DNA, 5810 bp, Homo sapiens
cgagttatgaaactttgggaaaagagagaacaaggaacgcgggcgatcagaggcccagtcgcgagacctgccccgctggggcctccagccggcaccgcgacgccccgggacctggcaccgcctcgctccacccctgcgaatccggggcgaatccgggcggagagttcctgccggccgcgcagcgcagagccccctccggcccgccctctctccctccctcccgctgagctccagctgtgccagaggcacccgagccctgagagtccgccgccaacgcgcaggtgctagcggccccttcgccctgcagcccctttgcttttactctgtccaaagttaacatgtcactgaaaaacgagccacgggtaaayacctctgcactgcagaaaattgctgctgacatgagtaatatcatagaaaatctggacacgcgggaactccactttgagggagaggaggtagactacgacgtgtctcccagcgatsccaagatacaagaagtgtatatccctttctctgctatttataacactcaaggatttaaggagcctaatatacagacgtatctctccggctgtccaataaaagcacaagttctggaagtggaacgcttcacatctacaacaagggtaccaagtattaatctttacactattgaattaacacatggggaatttaaatggcaagttaagaggaaattcaagcattttcaagaatttcacagagagctgctcaagtacaaagcctttatccgcatccccattcccactagaagacacacgtttaggaggcaaaacgtcagagaggagcctcgagagatgcccagtttgccccgttcatctgaaaacatgataagagaagaacaattccttggtagaagaaaacaactggaagattacttgacaaagatactaaaaatgcccatgtatagaaactatcatgccacaacagagtttcttgatataagccagctgtctttcatccatgatttgggaccaaagggcatagaaggtatgataatgaaaagatctggaggacacagaataccaggcttgaattgctgtggtcagggaagagcctgctacagatggtcaaaaagatggttaatagtgaaagattcctttttattgtatatgaaaccagacagcggtgccattgccttcgtcctgctggtagacaaagaattcaaaattaaggtggggaagaaggagacagaaacgaaatatggaatccgaattgataatctttcaaggacacttattttaaaatgcaacagctatagacatgctcggtggtggggaggggctatagaagaattcatccagaaacatggcaccaactttctcaaagatcatcgatttgggtcatatgctgctatccaagagaatgctttagctaaatggtatgttaatgccaaaggatattttgaagatgtggcaaatgcaatggaagaggcaaatgaagagatttttatcacagactggtggctgagtccagaaatcttcctgaaacgcccagtggttgagggaaatcgttggaggttggactgcattcttaaacgaaaagcacaacaaggagtgaggatcttcataatgctctacaaagaggtggaactcgctcttggcatcaatagtgaatacaccaagaggactttgatgcgtctacatcccaacataaaggtgatgagacacccggatcatgtgtcatccaccgtctatttgtgggctcaccatgagaagcttgtcatcattgaccaatcggtggcctttgtgggagggattgacctggcctatggaaggtgggacgacaatgagcacagactcacagacgtgggcagtgtgaagcgggtcacttcaggaccgtctctgggttccctcccacctgccgcaatggagtctatggaatccttaagactcaaagataaaaatgagcctgttcaaaacctacccatccagaagagtattgatgatgtggattcaaaactgaaaggaataggaaagccaagaaagttctccaaatttagtctctacaagcagctccacaggcaccacctgcacgacgcagatagcatcagcagcattgacagcacctccagttattttaatcactatagaagtcatcacaatttaatccatggtttaaaaccccacttcaaactctttcacccgtccagtgagtctgagcaaggactcactagacctcatkctgataccgggtccatccgyagtttacagacaggtgtgggagagctgcatggggaaaccagattctggcatggaaaggactactgcaatttcgtcttcaaagactgggttcaacttgataaaccttttgctgatttcattgacaggtactccacgccccggatgccctggcatgacattgcctctgcagtccacgggaaggcggctcgtgatgtggcacgtcacttcatccagcgctggaacttcacaaaaattatgaaatcaaaatatcggtccctttcttatccttttctgcttccaaagtctcaaacaacagcccatgagttgagatatcaagtgcctgggtctgtccatgctaacgtacagttgctccgctctgctgctgattggtctgctggtataaagtaccatgaagagtccatccaygccgcttacgtccatgtgatagagaacagcaggcactatatctatatcgaaaaccagtttttcataagctgtgctgatgacaaagttgtgttcaacaagataggcgatgccattgcccagaggatcctgaaagctcacagggaaaaccagaaataccgggtatatgtcrtgataccacttctgccagggttcgaaggagacatttcaaccggcggaggaaatgctctacaggcaatcatgcacttcaactacagaaccatgtgcagaggagaaaattccatccttggacagttaaaagcagagcttggtaatcagtggataaattacatatcattctgtggtcttagaacacatgcagagctcgaaggaaacctagtmactgagcttatctatgtccacagcaagttgttaattgctgatgataacactgttattattggctctgccaacataaatgaccgcagcatgctgggaaagcgtgacagtgaaatggctgtcattgtgcaagatacagagactgttccttcagtaatggatggaaaagagtaccaagctggccggtttgcccgaggacttcggctacagtgctttagggttgtccttggctatcttgatgacccaagtgaggacattcaggatccagtgagtgacaaattcttcaaggaggtgtgggtttcaacagcagctcgaaatgctacaatttatgacaaggttttccggtgccttcccaatgatgaagtacacaatttaattcagctgagagactttataaacaagcccrtattagctaaggaagatcccattcgagctgaggaggaactgaagaagatccgtggatttttggtgcaattccccttttatttcttgtctgaagaaagcctactgccttctgttggraccaaagaggccatagtgcccatggaggtttggacttaagagatattcattggcagctcaaagacttccaccctggagacmacactgcacacagtgacttcctggggatgtcatagccaaagccaggcctgacgcattctcgtatccaacccaaggaccttttggaatgactggggagggctgcagtcacattgatgtaaggactgtaaacatcagcaagactttataattccttctgcctaacttgtaaaaagggggctgcattcttgttggtagcatgtactctgttgagtaaaacacatattcaaattccgtataccaaaatccatttcctttgtaacaagaatttaccagtaactgtgatctaggttgccaaaagttgtctgaatctccttattcttctctgatcttcatttatgcagccaatgtctagctggacctgccctcatcttgcagttcatacaggcactgtttgagagattgtttattattagatgttgtaatgctgcttcaagattcttcatggttacatgggatgcccctgctcatctggtcctgaagtagtaacattcacccaaatgaggatatagtcattattccttttcagtcactgtacgaacacggcagactttagcctacacagtagactgtgttaggcacttctggtaacattgacactgtatcttgacaccactaagcaacaggaaggaataaattccaatattgagacagagatttatttcattttgctcccaaaggcactgacaacatgagtccttgtgattaggcccacctgatcaaatgtaaaaacatgcatgggatatttgattacgtaacaaccagctaaaactgagagcacacagccttcggaaacccccaaggtgtcgaggaggatcagatccagataagagaagatgattccttctagtcctgtaaaatttcctgtcatccttagctgctgggttgattgaaatttgatctctacatttcaaaatcaaactagtgaatacagtttgtctttcaagagaatcagaggcatcgtaactcctaccaagttagtaagtatgagtctaaccttgtttgacattcaggtcttctgctacattatcttctttgagaaaaattaattgattataaaatatgtgctacttcacttacattattaaatatgtattaacgcctctcaccagggcttccagtgaagttacaatgccctagtctgtgaattagtctggaaacgtgtttttccttttcggatgttagagtaccctttgataaactaaattttactaagctgaacaactctgacagtctaaagagctaatgtgggttaccaaaaggcctgtacctgtaaaacaaaatgcaggtgtaatgattatacatgtctatggattacctggacatactctcatttgggttgttcttcaaagaagcaagcagccgatccctgttttcataaagctaatacttcagttggaaaaattaaacaggagcacaaagtcagggataggggttagcagaagagagaaatagtgtcacatcaagggcaggatctcatagctagggaacatttcacaaataaggtgagattttgtaaccaataataaaaatgaatgtttttataagtaaataacttatttttcatatggctaaagatggtaaaatgacttcattctatagccattgtaaataagaatttgctattgatgaaagaagttcagattggcatttgaagtattgagtgtatgggatctctaaggatttcttagattttatatttaaatattttttaaaccttagaggagtcaacaaactggctcttgattttcagcaccctactctcatgaaaaaagcctgaaaggaccctttcccttataagtaatttaatccaatttctccccattttatagatgaggaaactgaggctcagatcagatgagaactcacttaaatccactcaatgtgtagatggtagagctgggactagcaacattgctgcagcccattgttggcctctctcttcactttatcattgcccaagaatgaggatatgcagtaaacagaattcaggcaagatacctytaagctgttttgaaccctctgatattttgtatttatgtgtttgtctgtctccccctactagaatgtaagctccatggggcagggacttcactgtattttgttcatagtgtatccccagagcctggaccagtgcttggcacataggagatggcaataaatgcttgtagaattaataaacaaggtgaaggagagagctaatgaaat

SEQ ID NO: 56 - DNA, 2215 bp, Homo sapiens
gcctggacccggcgggcgcacggctccgagyccagcgcagccgagccggtctgcagaggggcccccagaactttgtgtgtgtgtgtgcacgcgcgcgcgtgtgtgcccaggtgcgagggtkcgcgcgtgtgctggcggggagggaaccgacccgaaagagagccccacgctggcaaagtggctcgcccatctcacagccggttggcgctcgcggaggagacatatactgcctggactgcctggctgatgtgagctagtttgtctggttgagttggatgtttaaatagaaggcagaacaacaacagagcacggttcccataagggcggcgagatcagcctcctgtctcatctggaagaccaccactctggggtctcagaggaatgatggaagccttggggtttctaaaattggaagtgaatggccccatggtgayggtggccctgtcagtggctctcttggccctcctgaaatggtactccacatcagcattctcaagactggagaagttaggcctcagacatcccaagccttctcctttcattggaaacttgacatttttccrccagggtttttgggaaagccaaatggagctcagaaagctgtatggacctctgtgtgggtactatcttggtcgtcggatgtttattgttatttctgagccagacatgatcaagcaggtgttggttgagaacttcagtaactttaccaacagaatggcgtcgggtttggagttcaagtcrgtagccgacagcgttctgtttttacgtgacaaaagatgggaagaggtcagaggtgccctgatgtctgctttcagtcctgaaaagctgaacgagatggttcccctcatcagccaagcctgcgamcttmtcctggctcatttaaaacgctatgcggaatctggggacgcatttgacatccagaggtgctactgcaattacaccacagatgtggttgccagcgtcgcstttggcaccccggtggactcctggcaggcccctgaggatccctttgtgaaacactgcaagcgtttcttcgaattctgcatccccagacctatcctggttttactcttatcatttccatccataatggtcccactggcccggattttgcccaataagaaccgagacgaactgaatggcttttttaacraactcattrggaatgtgattgccttgcgggaccagcaagctgccgaagagaggcggagagacttcctccaaatggtcctggatgcccgacattctgcaagtcccatgggcgtgcaagactttgacatcgtcagagacgttttctcctctactgggtgcaagccgaacccttcccggmaacaccagcccagccctatggccaggcctttgactgtggatgagaytgtgggccaggccttcatcttcctcatcgctggctatgaaatcatcaccaacacactttcttttgccacctacstactggccaccaaccctgactgccaagagaagcttctgagagaggtagacgtttttaaggagaaacacatggcccctgagttctgcagcctcraggaagkcctgccctatctggacatggtgattgcagagacgctraggatgtacccgccagctttcagattcacacgggaggcagctsaggactgcgaggtgctggggcagygcatccccrcaggcrctgtgctagagatggcygtgggtgccctgcaccatgaccctgagcactggccaagcccggagamcttcaaccctgaaaggttcacggctgaggccmggcagcagcaccggcccttcacgtacctgcccttcggggccggcccacggagctgcctcggggtgcgtctagggctgcttgaggtcaagttgacactgctccacgtgctgcacaagttccggttccaagcctgccctgagacccaggtaccgctgcagctagaatccaaatctgccctaggtccaaaaaatggtgtctatatcaagatcgtatcccgctgacacagaaggctgccgggtsgggggagggcacccccaaattcaaagaaaaccctaagtgtggatgttcagaattttggaaaaatgtcactgaagtgattgaaagagtgcctggcatgcaaggrtaagaggttctttacataacatttcctaaatgcttaataaacrtttgttgcacttggttttgacattgccaatggggtttgaaccagtgctctctctaaatgaagaa

SEQ ID NO: 57 - DNA, 2069 bp, Homo sapiens
aaggaataaagttgctgattcattcctttacactgaaaccctttgttgtgccctcctcttccttcctctttatagggagacactctgagaaagagcacattgtgggggcccactccatgtgatgtttgcttggttgcctgttcccttttctacctgcagagcacggttcccataagggcggcgagatcagcctcctgtctcatctggaagaccaccactctggggtctcagaggaatgatggaagccttggggtttctaaaattggaagtgaatggccccatggtgayggtggccctgtcagtggctctcttggccctcctgaaatggtactccacatcagcattctcaagactggagaagttaggcctcagacatcccaagccttctcctttcattggaaacttgacatttttccrccagggtttttgggaaagccaaatggagctcagaaagctgtatggacctctgtgtgggtactatcttggtcgtcggatgtttattgttatttctgagccagacatgatcaagcaggtgttggttgagaacttcagtaactttaccaacagaatggcgtcgggtttggagttcaagtcrgtagccgacagcgttctgtttttacgtgacaaaagatgggaagaggtcagaggtgccctgatgtctgctttcagtcctgaaaagctgaacgagatggttcccctcatcagccaagcctgcgamcttmtcctggctcatttaaaacgctatgcggaatctggggacgcatttgacatccagaggtgctactgcaattacaccacagatgtggttgccagcgtcgcstttggcaccccggtggactcctggcaggcccctgaggatccctttgtgaaacactgcaagcgtttcttcgaattctgcatccccagacctatcctggttttactcttatcatttccatccataatggtcccactggcccggattttgcccaataagaaccgagacgaactgaatggcttttttaacraactcattrggaatgtgattgccttgcgggaccagcaagctgccgaagagaggcggagagacttcctccaaatggtcctggatgcccgacattctgcaagtcccatgggcgtgcaagactttgacatcgtcagagacgttttctcctctactgggtgcaagccgaacccttcccggmaacaccagcccagccctatggccaggcctttgactgtggatgagaytgtgggccaggccttcatcttcctcatcgctggctatgaaatcatcaccaacacactttcttttgccacctacstactggccaccaaccctgactgccaagagaagcttctgagagaggtagacgtttttaaggagaaacacatggcccctgagttctgcagcctcraggaagkcctgccctatctggacatggtgattgcagagacgctraggatgtacccgccagctttcagattcacacgggaggcagctsaggactgcgaggtgctggggcagygcatccccrcaggcrctgtgctagagatggcygtgggtgccctgcaccatgaccctgagcactggccaagcccggagamcttcaaccctgaaaggttcacggctgaggccmggcagcagcaccggcccttcacgtacctgcccttcggggccggcccacggagctgcctcggggtgcgtctagggctgcttgaggtcaagttgacactgctccacgtgctgcacaagttccggttccaagcctgccctgagacccaggtaccgctgcagctagaatccaaatctgccctaggtccaaaaaatggtgtctatatcaagatcgtatcccgctgacacagaaggctgccgggtsgggggagggcacccccaaattcaaagaaaaccctaagtgtggatgttcagaattttggaaaaatgtcactgaagtgattgaaagagtgcctggcatgcaaggrtaagaggttctttacataacatttcctaaatgcttaataaacrtttgttgcacttggttttgacattgccaatggggtttgaaccagtgctctctctaaatgaagaa

SEQ ID NO: 58 - DNA, 1906 bp, Homo sapiens
aaggaataaagttgctgattcattcctttacactgaaaccctttgttgtgccctcctcttccttcctctttatagggagacactctgagaaagagcacattgtgggggcccactccatgtgatgtttgcttggttgcctgttcccttttctacctgcagagcacggttcccataagggcggcgagatcagcctcctgtctcatctggaagaccaccactctggggtctcagaggaatgatggaagccttggggtttctaaaattggaagtgaatggccccatggtgayggtggccctgtcagtggctctcttggccctcctgaaatggtactccacatcagcattctcaagactggagaagttaggcctcagacatcccaagccttctcctttcattggaaacttgacatttttccrccagggtttttgggaaagccaaatggagctcagaaagctgtatggacctctgtgtgggtactatcttggtcgtcggatgtttattgttatttctgagccagacatgatcaagcaggtgttggttgagaacttcagtaactttaccaacagaatggcgtcgggtttggagttcaagtcrgtagccgacagcgttctgtttttacgtgacaaaagatgggaagaggtcagaggtgccctgatgtctgctttcagtcctgaaaagctgaacgagatggttcccctcatcagccaagcctgcgamcttmtcctggctcatttaaaacgctatgcggaatctggggacgcatttgacatccagaggtgctactgcaattacaccacagatgtggttgccagcgtcgcstttggcaccccggtggactcctggcaggcccctgaggatccctttgtgaaacactgcaagcgtttcttcgaattctgcatccccagacctatcctggttttactcttatcatttccatccataatggtcccactggcccggattttgcccaataagaaccgagacgaactgaatggcttttttaacraactcattrggaatgtgattgccttgcgggaccagcaagctgccgaagagaggcggagagacttcctccaaatggtcctggatgcccgacattctgcaagtcccatgggcgtgcaagactttgacatcgtcagagacgttttctcctctactgggtgcaagccgaacccttcccggmaacaccagcccagccctatggccaggcctttgactgtggatgagaytgtgggccaggccttcatcttcctcatcgctggctatgaaatcatcaccaacacactttcttttgccacctacstactggccaccaaccctgactgccaagagaagcttctgagagaggtagacgtttttaaggagaaacacatggcccctgagttctgcagcctcraggaagkcctgccctatctggacatggtgattgcagagacgctraggatgtacccgccagctttcagattcacacgggaggcagctsaggactgcgaggtgctggggcagygcatccccrcaggcrctgtgctagagatggcygtgggtgccctgcaccatgaccctgagcactggccaagcccggagamcttcaaccctgaaaggtaccgctgcagctagaatccaaatctgccctaggtccaaaaaatggtgtctatatcaagatcgtatcccgctgacacagaaggctgccgggtsgggggagggcacccccaaattcaaagaaaaccctaagtgtggatgttcagaattttggaaaaatgtcactgaagtgattgaaagagtgcctggcatgcaaggrtaagaggttctttacataacatttcctaaatgcttaataaacrtttgttgcacttggttttgacattgccaatggggtttgaaccagtgctctctctaaatgaagaa

SEQ ID NO: 59 - DNA, 4943 bp, Homo sapiens
atttgttggtgttaaygcatctgacatcaactattcagcaggccgctatgacccctcagttaagcctccctttgacataggtttcgaaggcattggggaggtggtggccctaggcctctctgctagtgccagatacacagttggccaagctgtggcttacatggcacctggttcttttgctgagtacacagttgtgcctgccagcattgcaactccagtgccctcagtgaaacccgagtatcttaccctgctggtaagtggcaccaccgcatacatcagcctgaaagagctcggaggactgtcggaagggaaaaaagttttggtgacagcagcagctgggggaacgggccagtttgccatgcagctttcaaagaargcaaagtgccatgtaattggaacctgctcttctgatgaaaagtctgcttttctgaaatctcttggctgtgatcgtcctatcaactataaaactgaacccgtaggtaccgtccttaagcaggagtaccctgaaggtgtcgatgtggtctatgaatctgttgggggagccatgtttgacttggctgtagacgccctggctacgaaagggcgcttgatagtaatagggtttatctctggctaccaaactcctactggcctttcgcctgtgaaagcaggaacattgccagccaaactgctcaagaaatctgccagcgtacagggcttcttcctgaaccattacctttctaagtatcaagcagccatgagccacttgctcgagatgtktgtgagcggagacctkgtttgtgaggtggaccttggagatctgtctccagagggcaggtttactggcctggagtccatattccgtgctgtcaattatatgtacatgggaaaaaacactggaaaaattktagttgaattacctcactctgtcaacagtaagctgtaaaaacagaacaatgacataartcaagggagaaagaaaatgggcactttatgtctcagaattactcaaatcaatttatttttagttggtaatggatataatatttcttaaaacaaaagtaaggtgttaatgaataggtctctccttctcctcctcctcctcctcttcccttgggggaaaaaaaaaaatgtgctaataaaacttccctccatggctaagagggaaaacgcttacattcaattctttagtcatggatggtctcgttccagatgttattgttccagggaactaaattcattcctgatgccagatctgatcgagtcagtatgtcttcagcttgatcagattttaaaatcagttttgaaagtggttcccgacttctttgctttgggagaatttggtcttatgctcataagcagttcatgagtgacaagtgtagcaaaagccagccatatattttcagaatctatatcctcaggaaatggtcctttttttttctataaatcaccaaccaactatctaaatggacatttgggggaattccctcccaaatttgattttgttattagaaaaatgattccgtgaacacagatgtgttttgaagaagtagcacgtaatggcttttatctaccatcaacctgataaggcacatgtgaaatggaaatgttctctttcctctgaagcagcaaattaatgttgaaaacttacatagacagaaagtaggttttggaaagggaaaccacagagattagggggacttaaaattaatataggcacaggaaagagaaaagtgtgcgctccattctcagtgggggttcaccacaaaacacgggccccaggagggaagcgctgtctaggcacacggcaaggccttagtaacagcatgctacactgctcgaggtacrgtatgtcccatcgccctgtgcaccgtagagacctcagtcatctcaaggaagaatacatttgcttctccttagaggcgttcgaactagaagctatgcgttacctctgattctggaaacagaatagcagccactcattctgcattcccatttttctctccacgtgttctggtggaatgagatgctccttggcactatagcctgatgtcccacattgacccactgaccacacaggaaaagcagcgaaacctgcaccctctcttctgagtcacgcctgtggctcatcggcttccctcttaacctttagtgccctgaagactgctgccgctgtcaccgttgcgctgaaaccccatgggcccgttctgattgaaggtgaagcccaccagattatttttcaaagtcttaggtttcggtgtatctaacctgctcagtaaatatggacgcaattaaagatgctctaggaaatttggggactgtatttaatttttctttccttccatctgaggagcraggaaatcctactgctgaatagctgttagtatctattttacaagatttactcattttcaggtacctaatgtagctgctagcatgcatgcacaacaatacaatttatatggtaaatggaaccaaataatggcttcactgaatgttatggctgcactgaagggaaatgtcacggtaaatagctgccaaattatggatcatgccgaagtgtcacaactgcactaaagacaaatagcactagaggctattgccactgtgacgcttttgagttatgaagaagggtagcggcctgatgcgaggctctttgtgtcctcattatagcaaagggttactggtgcaggggactaggaaaaacccgtccagtgtggtgcttagttattcatccatccctttcagacctaacagccacagccacayggaaagagactttgcctcacttttacattcacaaacaaacaaaggaggggggagcaggttttatgaatgtaactgtgcacaggaaatgactggtaatggaaaaaatgttgtaataaaataatctaatcaaagaatattattaaatttaacatagtctatgtccaaaaggcttagttgcttcttatgcagatagatgtgtgaaatctaagcagtaatgtactttctccctttgtaaagacttggggagtaaggacattaccaactaaattgcttcttcgaaactgaagtgagtcccggtttgtttcattttaatgggagggtaataaagatgaaagaccaacattttaactgatggatcccttaagctacagaatagaaatttattgtgttttgagggaatatactaaatgcagctatgtaaaaataaaattcaaacgcccaggattaaaataaaatataatctgaaaacctcatgttctctctttccccaaactaagaaagtgcactgcatgctgttttcacttattcttagaaaacaagcatgaaagattcckcccattcagataatgccaaaaatatgtttaaacttttttttattcttttgaaaaatgatttgtaaattgagggtcatagttcagcatcagtttcatcttctgggattattgttcaagaccagcctctaatgggaggtgaaacggtacgatggtctcaacacctttcttctgaactgtaatacatatcacaaaaagtacatccataattcagggcaattgtcagtctttttagagaaggggccagggtggaacaatcccagtgagtaaattatttctcagcgtggacttctctgcatgtcgggcttarggtcaccagccgggcagggtggaaggagcttgcctctttgagaaaccaaggagtcccagtgatctgttaccatttggttatgacttctaaagagccaaatgctattccttcaagcctgttttgcaggcagaaaataccakcagtgtcatttaggggttcctttgatgatgactactgctgttaactgacctcagcattaaaaaaaaaaaaattcagggaatagtttgcaaagaaatgaaggaagttttgcatgatatattctataacttgtcattatatgatttcatctggatgaagttcctcaggagtaggatagagcctctgtaaatggtcattagtattacattctgtgtttatctaatgaaagtgcagtgacaagtagctgcttcttattaaaatgaaaatcctgcattatgtacttgaggaacattccagctaatgaggatgtaatgtcctcagtacaacrcagaccttctttttgtgttcaccaccacaagatgctggaagcttgacaaatgatatcatttaagacacatgcctgccttagggacctggtttttggcttcctgtttctggcttttatttgggtaacgtttataatggccacccgacttgtacctgggtaatgttttaaccccttccccagagttctcaattagcatgaatttactacagtcagagtttcctttaaattggggtgggggtgctaagcactgaaaatatctttcttgattactttaccatgtggacatatgggataaatactgtatttcagatttacataaaagtagattagtaatgcacagctttcagaataaaaacaatgataaaaaagaccaagcactatcaactttggacagtaatttcctaggtgttaaacaagttttctgaatrcaatctggatgcaaaacggcctgatttgatgaattcataattttcttctgtatactttcattttattaaatattttattacttggttaaacacaagaattatctatgtaaacttcatgggcttttttgttgaaagttagatgttcagtaactaatttcccagttatggcccagaattaaacatttatgatcatatttcagaagtcaaaatacaaaactggattatcaaaacggttggtgtggtcactttaaactggactatcagtatggttgccgtggtcactttaagckggattatcagtacggttggtgtggtcactttggtttatcatcaatacagttggtgtggtcactttaaactggattaccaatatggttggtgtggtcgctttaaagtttgttttcattttttttctatttttaawtcttacgggtatatag

SEQ ID NO: 60 - DNA, 5796 bp, Homo sapiens
tccccgccctgcccggggtccccggtcgtgccccgccgcccgggccgcgctcggggttgattcgtaccaccttgsaaggaagtgaacgcttcgcacgggaaggggaggcgcctgcgccggccgccgcgcagctccggggacgcccggggctgccgccggctcggggccgcagacgaccgcgggacgcgcgagtcccccgtccccccttgcccgccgtcccccccgccacccttgcccgagaggagtcaaatccggcttttagagctcggggagggtggggatatccggtgcctctcccgcgccaggaggaagggggagggcggagaggatccttggccagtctgcgccgagcagattcaaaccaaaacaaaaagattaaaggagcagcggccggggcggcagcggtccccaggccgggacacccggggtggtgcgcccgggttcgcgggggctgcgccggcgccggggaggcggggggagcgggagcgggcgacgcggggaaggggggagccagggggagggcgccggccggaggaggggcggacccgccgccctagccgagcagagcacagccgagccgagcggcccgggcgggggccgaccccggccagcgtcggcgcagagagcgggcggaggcgcaggccatgctgcggctggtgcccaccggggcccgggccatcgtggacatgtcgtacgcccgccacttcctggacttccagggctccgccattccccaagccatgcagaagctggtggtgacccggctgagccccaacttccgcgaggccgtcaccctgagccgggactgcccggtgccgctccccggggacggagacctcctcgtccggaaccgatttgttggtgttaaygcatctgacatcaactattcagcaggccgctatgacccctcagttaagcctccctttgacataggtttcgaaggcattggggaggtggtggccctaggcctctctgctagtgccagatacacagttggccaagctgtggcttacatggcacctggttcttttgctgagtacacagttgtgcctgccagcattgcaactccagtgccctcagtgaaacccgagtatcttaccctgctggtaagtggcaccaccgcatacatcagcctgaaagagctcggaggactgtcggaagggaaaaaagttttggtgacagcagcagctgggggaacgggccagtttgccatgcagctttcaaagaargcaaagtgccatgtaattggaacctgctcttctgatgaaaagtctgcttttctgaaatctcttggctgtgatcgtcctatcaactataaaactgaacccgtaggtaccgtccttaagcaggagtaccctgaaggtgtcgatgtggtctatgaatctgttgggggagccatgtttgacttggctgtagacgccctggctacgaaagggcgcttgatagtaatagggtttatctctggctaccaaactcctactggcctttcgcctgtgaaagcaggaacattgccagccaaactgctcaagaaatctgccagcgtacagggcttcttcctgaaccattacctttctaagtatcaagcagccatgagccacttgctcgagatgtktgtgagcggagacctkgtttgtgaggtggaccttggagatctgtctccagagggcaggtttactggcctggagtccatattccgtgctgtcaattatatgtacatgggaaaaaacactggaaaaattktagttgaattacctcactctgtcaacagtaagctgtaaaaacagaacaatgacataartcaagggagaaagaaaatgggcactttatgtctcagaattactcaaatcaatttatttttagttggtaatggatataatatttcttaaaacaaaagtaaggtgttaatgaataggtctctccttctcctcctcctcctcctcttcccttgggggaaaaaaaaaaatgtgctaataaaacttccctccatggctaagagggaaaacgcttacattcaattctttagtcatggatggtctcgttccagatgttattgttccagggaactaaattcattcctgatgccagatctgatcgagtcagtatgtcttcagcttgatcagattttaaaatcagttttgaaagtggttcccgacttctttgctttgggagaatttggtcttatgctcataagcagttcatgagtgacaagtgtagcaaaagccagccatatattttcagaatctatatcctcaggaaatggtcctttttttttctataaatcaccaaccaactatctaaatggacatttgggggaattccctcccaaatttgattttgttattagaaaaatgattccgtgaacacagatgtgttttgaagaagtagcacgtaatggcttttatctaccatcaacctgataaggcacatgtgaaatggaaatgttctctttcctctgaagcagcaaattaatgttgaaaacttacatagacagaaagtaggttttggaaagggaaaccacagagattagggggacttaaaattaatataggcacaggaaagagaaaagtgtgcgctccattctcagtgggggttcaccacaaaacacgggccccaggagggaagcgctgtctaggcacacggcaaggccttagtaacagcatgctacactgctcgaggtacrgtatgtcccatcgccctgtgcaccgtagagacctcagtcatctcaaggaagaatacatttgcttctccttagaggcgttcgaactagaagctatgcgttacctctgattctggaaacagaatagcagccactcattctgcattcccatttttctctccacgtgttctggtggaatgagatgctccttggcactatagcctgatgtcccacattgacccactgaccacacaggaaaagcagcgaaacctgcaccctctcttctgagtcacgcctgtggctcatcggcttccctcttaacctttagtgccctgaagactgctgccgctgtcaccgttgcgctgaaaccccatgggcccgttctgattgaaggtgaagcccaccagattatttttcaaagtcttaggtttcggtgtatctaacctgctcagtaaatatggacgcaattaaagatgctctaggaaatttggggactgtatttaatttttctttccttccatctgaggagcraggaaatcctactgctgaatagctgttagtatctattttacaagatttactcattttcaggtacctaatgtagctgctagcatgcatgcacaacaatacaatttatatggtaaatggaaccaaataatggcttcactgaatgttatggctgcactgaagggaaatgtcacggtaaatagctgccaaattatggatcatgccgaagtgtcacaactgcactaaagacaaatagcactagaggctattgccactgtgacgcttttgagttatgaagaagggtagcggcctgatgcgaggctctttgtgtcctcattatagcaaagggttactggtgcaggggactaggaaaaacccgtccagtgtggtgcttagttattcatccatccctttcagacctaacagccacagccacayggaaagagactttgcctcacttttacattcacaaacaaacaaaggaggggggagcaggttttatgaatgtaactgtgcacaggaaatgactggtaatggaaaaaatgttgtaataaaataatctaatcaaagaatattattaaatttaacatagtctatgtccaaaaggcttagttgcttcttatgcagatagatgtgtgaaatctaagcagtaatgtactttctccctttgtaaagacttggggagtaaggacattaccaactaaattgcttcttcgaaactgaagtgagtcccggtttgtttcattttaatgggagggtaataaagatgaaagaccaacattttaactgatggatcccttaagctacagaatagaaatttattgtgttttgagggaatatactaaatgcagctatgtaaaaataaaattcaaacgcccaggattaaaataaaatataatctgaaaacctcatgttctctctttccccaaactaagaaagtgcactgcatgctgttttcacttattcttagaaaacaagcatgaaagattcckcccattcagataatgccaaaaatatgtttaaacttttttttattcttttgaaaaatgatttgtaaattgagggtcatagttcagcatcagtttcatcttctgggattattgttcaagaccagcctctaatgggaggtgaaacggtacgatggtctcaacacctttcttctgaactgtaatacatatcacaaaaagtacatccataattcagggcaattgtcagtctttttagagaaggggccagggtggaacaatcccagtgagtaaattatttctcagcgtggacttctctgcatgtcgggcttarggtcaccagccgggcagggtggaaggagcttgcctctttgagaaaccaaggagtcccagtgatctgttaccatttggttatgacttctaaagagccaaatgctattccttcaagcctgttttgcaggcagaaaataccakcagtgtcatttaggggttcctttgatgatgactactgctgttaactgacctcagcattaaaaaaaaaaaaattcagggaatagtttgcaaagaaatgaaggaagttttgcatgatatattctataacttgtcattatatgatttcatctggatgaagttcctcaggagtaggatagagcctctgtaaatggtcattagtattacattctgtgtttatctaatgaaagtgcagtgacaagtagctgcttcttattaaaatgaaaatcctgcattatgtacttgaggaacattccagctaatgaggatgtaatgtcctcagtacaacrcagaccttctttttgtgttcaccaccacaagatgctggaagcttgacaaatgatatcatttaagacacatgcctgccttagggacctggtttttggcttcctgtttctggcttttatttgggtaacgtttataatggccacccgacttgtacctgggtaatgttttaaccccttccccagagttctcaattagcatgaatttactacagtcagagtttcctttaaattggggtgggggtgctaagcactgaaaatatctttcttgattactttaccatgtggacatatgggataaatactgtatttcagatttacataaaagtagattagtaatgcacagctttcagaataaaaacaatgataaaaaagaccaagcactatcaactttggacagtaatttcctaggtgttaaacaagttttctgaatrcaatctggatgcaaaacggcctgatttgatgaattcataattttcttctgtatactttcattttattaaatattttattacttggttaaacacaagaattatctatgtaaacttcatgggcttttttgttgaaagttagatgttcagtaactaatttcccagttatggcccagaattaaacatttatgatcatatttcagaagtcaaaatacaaaactggattatcaaaacggttggtgtggtcactttaaactggactatcagtatggttgccgtggtcactttaagckggattatcagtacggttggtgtggtcactttggtttatcatcaatacagttggtgtggtcactttaaactggattaccaatatggttggtgtggtcgctttaaagtttgttttcattttttttctatttttaawtcttacgggtatatag

SEQ ID NO: 61 - DNA, 1148 bp, Homo sapiens
cagcttgtcctctatgacttacccagaaggcaacgcttctctttctggtcaaaatggctggtaagcaggccgtttcagcatcaggcaagtggctggatggtattcgaaaatggtattacaatgctgcaggattcaataaacyggggttaatgcgagatgatacaatatacgaggatgaagatgtaaaagaagccataagaagacttcctgagaacctttataatgacaggatgtttcgcattaagagggcactggaccygaacttgaagcatcagatcttgcctaaagagcagtggaccaaatatgaagaggaaaatttctaccttgaaccrtatctgaaagaggttattcgggaaagaaaagaaagagaagaatgggcaaagaagtaatcatgtagttgaagtctgtggatgcagctgttatgaagatggttaaacttgaaacaaacaattttaagaattatttggtctgaagatgttttactttaaataaatgtctattgtaatggctggagtttttgaattccaaaccttatactgaataactactgaatccctttactgttaaatttttttccaaactttcaagatatatttagttgtgtttaactgctacttggagctcagaagccactttatcagttttcctcactggttggatagcctatcagtttatggaaggatataacttccgtaagttacatccttatggaagctactgaataaaagaagggggtatgcaccccctagtttgccaagattgagaaatagcctcttcactggtatgcaaacagatttgattttgcatcctatcatttaaaaaraaattatgtctgcaccccaacataggcatacttaagtaatatacatactcctgtgctaacatgtatactagaaaacaaaaagatgttagaaaaataaaagtataaagacaaatcatactgtccccatatcccagtgacttttccactttggaaatgattgttatgaagtttaagggttggatactagtcagttaaaagttttaagattatagggtaatttttaaaaatataaattagaatcattggcaaggcatggtggctcatgcctgtaatcccagcactttgggaggccgaggcgggcgggtcacctgaagtcaggaatttg

SEQ ID NO: 62 - DNA, 1975 bp, Homo sapiens
cctgacacgccckcaaggcccgcggagctgctcctgcctcggcctctctgagccaaccacggggcggggcgtgaacgccgggcggggacgtgccgttctggggggcgtgtccaccggcgggggcgtgccgtcctgggggcgtggctctctgctccggtgcaggcccgcagggcgccctgggctgggagcaacgcgactgaccgtggtcgtgggcggacggcggctgcagcgyggaggagctggggtcgctgtgggtcgcgaagcagagcccgggacgtgcgcgcttggtgcacgatcctgaaggggagctccgaggggcccgggtckccagggctgctgcggccattcccggagcccggcgcggggcccgcgagatactggtttaggccgtcccagggctccgggcgcacccggtggccgctgctgcagcggagggagcgcggcggcgcgggggctcggagacagcgtttctcccggaagtcttcctcgggcagcaggtgggaagtgggagccggagcggcagctggcagcgttctctccgcaggtcggcaccatgcgccctgcagccytgcgyggggccctgctgggctgcctctgcctggcgttgctttgcctgggcggtgcggacaagcgcctgcgtgacaaccatgagtggaaaaaactaattatggttcagcactggcctgagacagtatgcgagaaaattcaaaacgactgtagagaccctccggattactggacaatacatggactatggcccgataaaagtgaaggatgtaatagatcgtggcccttcaatttagaagagattaaggatcttttgccagaaatgagggcatactggcctgacgtaattcactcgtttcccaatcgcagccgcttctggaagcatgagtgggaaaagcatgggacctgcgccgcccaggtggatgcgctcaactcccagaagaagtactttggcagaagcctggaactctayagggagctggacctcaacagtgtgcttctaaaattggggataaaaccatccatcaattactaccaagttgcagattttaaagatgccctygccagagtatatggagtgatacccaaaatccagtgccttccaccaagccaggatgaggaagtacagacaattggtcagatagaactgtgcctcactaagcaagaccagcagctgcaaaactgcaccgagccrggggagcagccgtmccccaagcaggaagtctggctggcaaatggggccgccgagagcyggggtctgagagtctgtgaagatggcccagtcttctatcccccacctaaaaagaccaagcattgatgcccaagttttggaaatattctgttttaaaaagcaagagaaattcacaaactgcagctttctaaaaaacaactccaaagtgaagtctgtttattttgctgtttcccctccatgcctgtgaattggatgttgtggtccctgtagagtgagtgcatgtggcgtacacggggagaaaggagctctcccacgcctgagtggctgttttgtgcttgggataaagctcacagattgtttttttttttctctattaaactcttcagtgccctggtagatcaggcaggcatacttggaatttagacagatggcaccgattcaggggactctcttgctcgagttttcccctcggagcctgttgccttcttggcgcagggaccctgtcaagacgaagagctccacgcatggcaggagcccacgctgatgcctggtgggcctggggggtgtctctagctcagactgggtctgttccatgtgaccagagccccaggacatcgttccttagccagctgctccgttgttggaggcctggtgtggtcacaggtgtgtcctagaacggtgactttgcccctcctgccctaggagatttgggtgtattcacagagcagccatctcctgtctccgtcagagcagtctcttccaggttactggaaggtc

SEQ ID NO: 63 - DNA, 2136 bp, Homo sapiens
cctgacacgccckcaaggcccgcggagctgctcctgcctcggcctctctgagccaaccacggggcggggcgtgaacgccgggcggggacgtgccgttctggggggcgtgtccaccggcgggggcgtgccgtcctgggggcgtggctctctgctccggtgcaggcccgcagggcgccctgggctgggagcaacgcgactgaccgtggtcgtgggcggacggcggctgcagcgyggaggagctggggtcgctgtgggtcgcgaagcagagcccgggacgtgcgcgcttggtgcacgatcctgaaggggagctccgaggggcccgggtckccagggctgctgcggccattcccggagcccggcgcggggcccgcgagatactggtttaggccgtcccagggctccgggcgcacccggtggccgctgctgcagcggagggagcgcggcggcgcgggggctcggagacagcgtttctcccggaagtcttcctcgggcagcaggtgggaagtgggagccggagcggcagctggcagcgttctctccgcaggtcggcaccatgcgccctgcagccytgcgyggggccctgctgggctgcctctgcctggcgttgctttgcctgggcggtgcggacaagcgcctgcgactgctcccagcctaggacgcgacaaagcaggtggcaggcttggtggagcactgttcctgcactcgaagttctctcagaggtcgaagaagtcgtggaggggacacttaatttcagctttcactgcggcgggtggtgaaacgacggttcttcctctttttgatgacaaccatgagtggaaaaaactaattatggttcagcactggcctgagacagtatgcgagaaaattcaaaacgactgtagagaccctccggattactggacaatacatggactatggcccgataaaagtgaaggatgtaatagatcgtggcccttcaatttagaagagattaaggatcttttgccagaaatgagggcatactggcctgacgtaattcactcgtttcccaatcgcagccgcttctggaagcatgagtgggaaaagcatgggacctgcgccgcccaggtggatgcgctcaactcccagaagaagtactttggcagaagcctggaactctayagggagctggacctcaacagtgtgcttctaaaattggggataaaaccatccatcaattactaccaagttgcagattttaaagatgccctygccagagtatatggagtgatacccaaaatccagtgccttccaccaagccaggatgaggaagtacagacaattggtcagatagaactgtgcctcactaagcaagaccagcagctgcaaaactgcaccgagccrggggagcagccgtmccccaagcaggaagtctggctggcaaatggggccgccgagagcyggggtctgagagtctgtgaagatggcccagtcttctatcccccacctaaaaagaccaagcattgatgcccaagttttggaaatattctgttttaaaaagcaagagaaattcacaaactgcagctttctaaaaaacaactccaaagtgaagtctgtttattttgctgtttcccctccatgcctgtgaattggatgttgtggtccctgtagagtgagtgcatgtggcgtacacggggagaaaggagctctcccacgcctgagtggctgttttgtgcttgggataaagctcacagattgtttttttttttctctattaaactcttcagtgccctggtagatcaggcaggcatacttggaatttagacagatggcaccgattcaggggactctcttgctcgagttttcccctcggagcctgttgccttcttggcgcagggaccctgtcaagacgaagagctccacgcatggcaggagcccacgctgatgcctggtgggcctggggggtgtctctagctcagactgggtctgttccatgtgaccagagccccaggacatcgttccttagccagctgctccgttgttggaggcctggtgtggtcacaggtgtgtcctagaacggtgactttgcccctcctgccctaggagatttgggtgtattcacagagcagccatctcctgtctccgtcagagcagtctcttccaggttactggaaggtc

SEQ ID NO: 64 - DNA, 1490 bp, Homo sapiens
ttggtgctcccagcacctagcaccgggagactggagaggtttccaggagagtgacccgagtcggcaccatgcgccctgcagccytgcgyggggccctgctgggctgcctctgcctggcgttgctttgcctgggcggtgcggacaagcgcctgcgtgacaaccatgagtggaaaaaactaattatggttcagcactggcctgagacagtatgcgagaaaattcaaaacgactgtagagaccctccggattactggacaatacatggactatggcccgataaaagtgaaggatgtaatagatcgtggcccttcaatttagaagagattaaggatcttttgccagaaatgagggcatactggcctgacgtaattcactcgtttcccaatcgcagccgcttctggaagcatgagtgggaaaagcatgggacctgcgccgcccaggtggatgcgctcaactcccagaagaagtactttggcagaagcctggaactctayagggagctggacctcaacagtgtgcttctaaaattggggataaaaccatccatcaattactaccaagttgcagattttaaagatgccctygccagagtatatggagtgatacccaaaatccagtgccttccaccaagccaggatgaggaagtacagacaattggtcagatagaactgtgcctcactaagcaagaccagcagctgcaaaactgcaccgagccrggggagcagccgtmccccaagcaggaagtctggctggcaaatggggccgccgagagcyggggtctgagagtctgtgaagatggcccagtcttctatcccccacctaaaaagaccaagcattgatgcccaagttttggaaatattctgttttaaaaagcaagagaaattcacaaactgcagctttctaaaaaacaactccaaagtgaagtctgtttattttgctgtttcccctccatgcctgtgaattggatgttgtggtccctgtagagtgagtgcatgtggcgtacacggggagaaaggagctctcccacgcctgagtggctgttttgtgcttgggataaagctcacagattgtttttttttttctctattaaactcttcagtgccctggtagatcaggcaggcatacttggaatttagacagatggcaccgattcaggggactctcttgctcgagttttcccctcggagcctgttgccttcttggcgcagggaccctgtcaagacgaagagctccacgcatggcaggagcccacgctgatgcctggtgggcctggggggtgtctctagctcagactgggtctgttccatgtgaccagagccccaggacatcgttccttagccagctgctccgttgttggaggcctggtgtggtcacaggtgtgtcctagaacggtgactttgcccctcctgccctaggagatttgggtgtattcacagagcagccatctcctgtctccgtcagagcagtctcttccaggttactggaaggtc

SEQ ID NO: 65 - DNA, 1852 bp, Homo sapiens
cctgacacgccckcaaggcccgcggagctgctcctgcctcggcctctctgagccaaccacggggcggggcgtgaacgccgggcggggacgtgccgttctggggggcgtgtccaccggcgggggcgtgccgtcctgggggcgtggctctctgctccggtgcaggcccgcagggcgccctgggctgggagcaacgcgactgaccgtggtcgtgggcggacggcggctgcagcgyggaggagctggggtcgctgtgggtcgcgaagcagagcccgggacgtgcgcgcttggtgcacgatcctgaaggggagctccgaggggcccgggtckccagggctgctgcggccattcccggagcccggcgcggggcccgcgagatactggtttaggccgtcccagggctccgggcgcacccggtggccgctgctgcagcggagggagcgcggcggcgcgggggctcggagacagcgtttctcccggaagtcttcctcgggcagcaggtgggaagtgggagccggagcggcagctggcagcgttctctccgcaggtcggcaccatgcgccctgcagccytgcgyggggccctgctgggctgcctctgcctggcgttgctttgcctgggcggtgcggacaagcgcctgcgtgacaaccatgagtggaaaaaactaattatggttcagcactggcctgagacagtatgcgagaaaattcaaaacgactgtagagaccctccggattactggacaatacatggactatggcccgataaaagtgaaggatgtaatagatcgtggcccttcaatttagaagagattaagaaaaattggatggagattacagacagttcactcccttccccctcaacatgggacctgcgccgcccaggtggatgcgctcaactcccagaagaagtactttggcagaagcctggaactctayagggagctggacctcaacaggtgggtgcgcccttcccccggctgcacttcccagtggggatctctgctgtcgcccaagcctgacagctggatccagkggagtgggtgtagacctcactgccctccagcagcttctgcatgtgcactattcggctactgggatcattcctgaggaatgttctgagcctaccaagcctttccagatcattctacatcacgatcacacagagtgggtgcagagtattgggatgcccatctgggcaccatctcatcatcagagtcggccatagggaaaacgakgactccaaccagcatgtgccgttctcagscatgattcctgataaaggatagtgcattaataagtcgtttccttagaaagacggaaactctggaagtctgtaggtctttgccgcagaactcctggaacaagcaggcaggaaagagatgtgggccagggttctttaagccccagaaatgaccccaacctgcctaaatcgtccctgcctgccctcacctctattcttgagaagtggaatacgttgtcccacttgagccagttgacttgtaaagcaaagtgccttctgagcgccacaccgagcccactcactgtccgaatctggttgctagagagccagggtgtgcccttacctctccgtcgggacgtttcagggtgtcagcgtcttagctgctctcactgaccttcatcataagaggtcataataaaccagtgaagtcgtgaaaaacatgacaggcaattgcacagcctctgtgttgctgcttttggaattcacgcagcttgttttagagcaattctccttcaaatcagaataataccaggagccttagctaatcagctgtatttaaggtttctgaatcaaaactgcttaaaagatgaataaacctccattgcttatctag

SEQ ID NO: 66 - DNA, 2695 bp, Homo sapiens
cctgacacgccckcaaggcccgcggagctgctcctgcctcggcctctctgagccaaccacggggcggggcgtgaacgccgggcggggacgtgccgttctggggggcgtgtccaccggcgggggcgtgccgtcctgggggcgtggctctctgctccggtgcaggcccgcagggcgccctgggctgggagcaacgcgactgaccgtggtcgtgggcggacggcggctgcagcgyggaggagctggggtcgctgtgggtcgcgaagcagagcccgggacgtgcgcgcttggtgcacgatcctgaaggggagctccgaggggcccgggtckccagggctgctgcggccattcccggagcccggcgcggggcccgcgagatactggtttaggccgtcccagggctccgggcgcacccggtggccgctgctgcagcggagggagcgcggcggcgcgggggctcggagacagcgtttctcccggaagtcttcctcgggcagcaggtgggaagtgggagccggagcggcagctggcagcgttctctccgcaggtcggcaccatgcgccctgcagccytgcgyggggccctgctgggctgcctctgcctggcgttgctttgcctgggcggtgcggacaagcgcctgcgtgacaaccatgagtggaaaaaactaattatggttcagcactggcctgagacagtatgcgagaaaattcaaaacgactgtagagaccctccggattactggacaatacatggactatggcccgataaaagtgaaggatgtaatagatcgtggcccttcaatttagaagagattaagaaaaattggatggagattacagacagttcactcccttccccctcaactctcccaatcattaacatcttctatagtgtgttacatttgttacaattaatgaactgatactgatactttattattaaataaagtttagcattaacattagggtttactcctgtgttgtgcggctttggacaaatgcaggagagcaagtcccacccagtgtgctctggagcagccgctggccctaaaccccctgagccatacctccccttcttcctccccttgaacccccaagcaaccgcgaatctcattcctgtctcttaagactaccttttccaaattgtcacgtcgttggaatcatacagtatgtagcctctgcagactggcttcttgcacttagcaatgtatgtttgcagttcctccagtgtcttttcatgactcgacggctcattggtttttgttgctgaaaatattccattgtttggatgtacactttatcccttcacctataacagcttgtattttcgtgtgcagttttatgattactcaaattgcacttgtagatatatcttaacaaacacttcatacaaaataagcataggattattttattcaccaaagtattgttaattagcagagctcaattctttggtgtcagtttatcaaatttaccttctaggttttgagtttattattaagaacctgcgtagacttattttattttttaatgcataggatcttttgccagaaatgagggcatactggcctgacgtaattcactcgtttcccaatcgcagccgcttctggaagcatgagtgggaaaagcatgggacctgcgccgcccaggtggatgcgctcaactcccagaagaagtactttggcagaagcctggaactctayagggagctggacctcaacagtgtgcttctaaaattggggataaaaccatccatcaattactaccaagttgcagattttaaagatgccctygccagagtatatggagtgatacccaaaatccagtgccttccaccaagccaggatgaggaagtacagacaattggtcagatagaactgtgcctcactaagcaagaccagcagctgcaaaactgcaccgagccrggggagcagccgtmccccaagcaggaagtctggctggcaaatggggccgccgagagcyggggtctgagagtctgtgaagatggcccagtcttctatcccccacctaaaaagaccaagcattgatgcccaagttttggaaatattctgttttaaaaagcaagagaaattcacaaactgcagctttctaaaaaacaactccaaagtgaagtctgtttattttgctgtttcccctccatgcctgtgaattggatgttgtggtccctgtagagtgagtgcatgtggcgtacacggggagaaaggagctctcccacgcctgagtggctgttttgtgcttgggataaagctcacagattgtttttttttttctctattaaactcttcagtgccctggtagatcaggcaggcatacttggaatttagacagatggcaccgattcaggggactctcttgctcgagttttcccctcggagcctgttgccttcttggcgcagggaccctgtcaagacgaagagctccacgcatggcaggagcccacgctgatgcctggtgggcctggggggtgtctctagctcagactgggtctgttccatgtgaccagagccccaggacatcgttccttagccagctgctccgttgttggaggcctggtgtggtcacaggtgtgtcctagaacggtgactttgcccctcctgccctaggagatttgggtgtattcacagagcagccatctcctgtctccgtcagagcagtctcttccaggttactggaaggtc

SEQ ID NO: 67 - DNA, 2445 bp, Homo sapiens
aggaatgttggtgctcccagcacctagcaccgggagactggagaggtttccaggagagtgacccgagtaggtcccctcctaattctggagccgtccctcgggctgcgcagtggagcgccgaggtggcgggaggctgcggggagcctgsgcggccaagcaccatctgcagtcaggagctcccgggcagcttgcagggcgcagtttttgaaagcgrgtgctgcgtgcggaccgcgggcctgcagggatcttttgccagaaatgagggcatactggcctgacgtaattcactcgtttcccaatcgcagccgcttctggaagcatgagtgggaaaagcatgggacctgcgccgcccaggtggatgcgctcaactcccagaagaagtactttggcagaagcctggaactctayagggagctggacctcaacaggtgggtgcgcccttcccccggctgcacttcccagtggggatctctgctgtcgcccaagcctgacagctggatccagkggagtgggtgtagacctcactgccctccagcagcttctgcatgtgcactattcggctactgggatcattcctgaggaatgttctgagcctaccaagcctttccagatcattctacatcacgatcacacagagtgggtgcagagtattgggatgcccatctgggcaccatctcatcatcagagtcggccatagggaaaacgakgactccaaccagcatgtgccgaactctgtggccaagacagtctgacaataagttattgcccacagaggatgtctaagtctttgtgtccactctgtgatcgtgatctagaattttctaccaaggcttgatggggaactaggatattcttctgcaatgattcagaattttacagtgtacctttatamtttaataagtgaattctatatatggtagtttggtaggattctgtgtagaagtgctttaggaggtgattgaaagctgtagggacttaccatacggttatgtattgcttggtgatggggtataaaattgtcatgtgaacatcttggagtgcacttacttagctgatacagcccacgacacacatatgctttgtggtatagcctgttgcttcgaggctacaaacctgtacagtgtgtgactctactgagtactgtaggcacctgtatgtaacacaatggtaaggatttgtgtatctaaacatatctcaacatagaaaaggcacagtagaaatgtggtcatatgggaccgccctcgtacatgcaggccttcactgactgaatgtcgtaatgtggcgcatgactgtgtttaaagatttgtccaaatgcagtttaccaggataagcctggaatccgatttcaattgctgtcttttaaagcaggtgtggcaaacgggtggtgatgtgtgtgccagctccactcggtggtggccccagcgctccyatgctcygaaggagtcaggaactggaaagggtrcctgcctggagcagtttgtgtgtgtgcyaaggggtggggaaggcggggactgggaaccatgtatttgcagtccatgttgacacatttgttgcataaagtcatagaaaacactttcctttaagagtgtcttaatttttaccatgaaatatgatacctgaaaagaacaagaaagsaaagtggaccttcattatacagctaacttttttaaatttaaattttagtgtgcttctaaaattggggataaaaccatccatcaattactaccaagtaagtcttgcttttgcttcttttctcgtgtgtctctcccggggacctccagtagggccgtttcagcctctgagtcaatgggctgtaaattgccccagtgcaaacccccttcctacttaaatgttatcatgtgaacagattttatttgcattttattttcctgcgcatgttgagtaggagctgaaggctgcttagaccagtgatttggaagcacagatttcatggctccctttgtgagaagtgtgtgctccagggtccggcagagcaggtggaatctgcagtttsaagagtcacattcacttttataacgtagtcttatatttgtttgtggtttgttttcatgataaaattgtgatttgttttatgataaaagaaactatagatatttaagcatgacaagatgttattagctggtaagcatatacaaaaagttgctttttgccaggtgtggtgactcacgcctataaatcccaggaccttgggaggctcaggctggaggattgcttgtggctagaatttcgagaccagcctgggcagcagagtgagacctctagaaagaagtaaaagtagctgagcatgatagtatgtgtctgtggtctcagctattcaggaagctaaggtcagaggattgcctgcgcccaggaatttgaggctgcagtgagccatggtcgccccactgcactccagtctgggcgacagccagatcacgtctcttt

SEQ ID NO: 68 - DNA, 1534 bp, Homo sapiens
cctgacacgccckcaaggcccgcggagctgctcctgcctcggcctctctgagccaaccacggggcggggcgtgaacgccgggcggggacgtgccgttctggggggcgtgtccaccggcgggggcgtgccgtcctgggggcgtggctctctgctccggtgcaggcccgcagggcgccctgggctgggagcaacgcgactgaccgtggtcgtgggcggacggcggctgcagcgyggaggagctggggtcgctgtgggtcgcgaagcagagcccgggacgtgcgcgcttggtgcacgatcctgaaggggagctccgaggggcccgggtckccagggctgctgcggccattcccggagcccggcgcggggcccgcgagatactggtttaggccgtcccagggctccgggcgcacccggtggccgctgctgcagcggagggagcgcggcggcgcgggggctcggagacagcgtttctcccggaagtcttcctcgggcagcaggtgggaagtgggagccggagcggcagctggcagcgttctctccgcaggtcggcaccatgcgccctgcagccytgcgyggggccctgctgggctgcctctgcctggcgttgctttgcctgggcggtgcggacaagcgcctgcgtgacaaccatgagtggaaaaaactaattatggttcagcactggcctgagacagtatgcgagaaaattcaaaacgactgtagagaccctccggattactggacaatacatggactatggcccgataaaagtgaaggatgtaatagatcgtggcccttcaatttagaagagattaaggatcttttgccagaaatgagggcatactggcctgacgtaattcactcgtttcccaatcgcagccgcttctggaagcatgagtgggaaaagcatgggacctgcgccgcccaggtggatgcgctcaactcccagaagaagtactttggcagaagcctggaactctayagggagctggacctcaacagtgtgcttctaaaattggggataaaaccatccatcaattactaccaagagctgaaggctgcttagaccagtgatttggaagcacagatttcatggctccctttgtgagaagtgtgtgctccagggtccggcagagcaggtggaatctgcagtttsaagagtcacattcacttttataacgtagtcttatatttgtttgtggtttgttttcatgataaaattgtgatttgttttatgataaaagaaactatagatatttaagcatgacaagatgttattagctggtaagcatatacaaaaagttgctttttgccaggtgtggtgactcacgcctataaatcccaggaccttgggaggctcaggctggaggattgcttgtggctagaatttcgagaccagcctgggcagcagagtgagacctctagaaagaagtaaaagtagctgagcatgatagtatgtgtctgtggtctcagctattcaggaagctaaggtcagaggattgcctgcgcccaggaatttgaggctgcagtgagccat

SEQ ID NO: 69 - DNA, 2119 bp, Homo sapiens
cctgacacgccckcaaggcccgcggagctgctcctgcctcggcctctctgagccaaccacggggcggggcgtgaacgccgggcggggacgtgccgttctggggggcgtgtccaccggcgggggcgtgccgtcctgggggcgtggctctctgctccggtgcaggcccgcagggcgccctgggctgggagcaacgcgactgaccgtggtcgtgggcggacggcggctgcagcgyggaggagctggggtcgctgtgggtcgcgaagcagagcccgggacgtgcgcgcttggtgcacgatcctgaaggggagctccgaggggcccgggtckccagggctgctgcggccattcccggagcccggcgcggggcccgcgagatactggtttaggccgtcccagggctccgggcgcacccggtggccgctgctgcagcggagggagcgcggcggcgcgggggctcggagacagcgtttctcccggaagtcttcctcgggcagcaggtgggaagtgggagccggagcggcagctggcagcgttctctccgcaggtcggcaccatgcgccctgcagccytgcgyggggccctgctgggctgcctctgcctggcgttgctttgcctgggcggtgcggacaagcgcctgcgactgctcccagcctaggacgcgacaaagcaggtggcaggcttggtggagcactgttcctgcactcgaagttctctcagaggtcgaagaagtcgtggaggggacacttaatttcagctttcactgcggcgggtggtgaaacgacgtgacaaccatgagtggaaaaaactaattatggttcagcactggcctgagacagtatgcgagaaaattcaaaacgactgtagagaccctccggattactggacaatacatggactatggcccgataaaagtgaaggatgtaatagatcgtggcccttcaatttagaagagattaaggatcttttgccagaaatgagggcatactggcctgacgtaattcactcgtttcccaatcgcagccgcttctggaagcatgagtgggaaaagcatgggacctgcgccgcccaggtggatgcgctcaactcccagaagaagtactttggcagaagcctggaactctayagggagctggacctcaacagtgtgcttctaaaattggggataaaaccatccatcaattactaccaagttgcagattttaaagatgccctygccagagtatatggagtgatacccaaaatccagtgccttccaccaagccaggatgaggaagtacagacaattggtcagatagaactgtgcctcactaagcaagaccagcagctgcaaaactgcaccgagccrggggagcagccgtmccccaagcaggaagtctggctggcaaatggggccgccgagagcyggggtctgagagtctgtgaagatggcccagtcttctatcccccacctaaaaagaccaagcattgatgcccaagttttggaaatattctgttttaaaaagcaagagaaattcacaaactgcagctttctaaaaaacaactccaaagtgaagtctgtttattttgctgtttcccctccatgcctgtgaattggatgttgtggtccctgtagagtgagtgcatgtggcgtacacggggagaaaggagctctcccacgcctgagtggctgttttgtgcttgggataaagctcacagattgtttttttttttctctattaaactcttcagtgccctggtagatcaggcaggcatacttggaatttagacagatggcaccgattcaggggactctcttgctcgagttttcccctcggagcctgttgccttcttggcgcagggaccctgtcaagacgaagagctccacgcatggcaggagcccacgctgatgcctggtgggcctggggggtgtctctagctcagactgggtctgttccatgtgaccagagccccaggacatcgttccttagccagctgctccgttgttggaggcctggtgtggtcacaggtgtgtcctagaacggtgactttgcccctcctgccctaggagatttgggtgtattcacagagcagccatctcctgtctccgtcagagcagtctcttccaggttactggaaggtc

SEQ ID NO: 70 - DNA, 1625 bp, Homo sapiens
ccaggagagtgacccgagtaggtcccctcctaattctggagccgtccctcgggctgcgcagtggagcgccgaggtggcgggaggctgcggggagcctgsgcggccaagcaccatctgcagtcaggagctcccgggcagcttgcagggcgcagtttttgaaagcgrgtgctgcgtgcggaccgcgggcctgcagggtcggcaccatgcgccctgcagccytgcgyggggccctgctgggctgcctctgcctggcgttgctttgcctgggcggtgcggacaagcgcctgcgtgacaaccatgagtggaaaaaactaattatggttcagcactggcctgagacagtatgcgagaaaattcaaaacgactgtagagaccctccggattactggacaatacatggactatggcccgataaaagtgaaggatgtaatagatcgtggcccttcaatttagaagagattaaggatcttttgccagaaatgagggcatactggcctgacgtaattcactcgtttcccaatcgcagccgcttctggaagcatgagtgggaaaagcatgggacctgcgccgcccaggtggatgcgctcaactcccagaagaagtactttggcagaagcctggaactctayagggagctggacctcaacagtgtgcttctaaaattggggataaaaccatccatcaattactaccaagttgcagattttaaagatgccctygccagagtatatggagtgatacccaaaatccagtgccttccaccaagccaggatgaggaagtacagacaattggtcagatagaactgtgcctcactaagcaagaccagcagctgcaaaactgcaccgagccrggggagcagccgtmccccaagcaggaagtctggctggcaaatggggccgccgagagcyggggtctgagagtctgtgaagatggcccagtcttctatcccccacctaaaaagaccaagcattgatgcccaagttttggaaatattctgttttaaaaagcaagagaaattcacaaactgcagctttctaaaaaacaactccaaagtgaagtctgtttattttgctgtttcccctccatgcctgtgaattggatgttgtggtccctgtagagtgagtgcatgtggcgtacacggggagaaaggagctctcccacgcctgagtggctgttttgtgcttgggataaagctcacagattgtttttttttttctctattaaactcttcagtgccctggtagatcaggcaggcatacttggaatttagacagatggcaccgattcaggggactctcttgctcgagttttcccctcggagcctgttgccttcttggcgcagggaccctgtcaagacgaagagctccacgcatggcaggagcccacgctgatgcctggtgggcctggggggtgtctctagctcagactgggtctgttccatgtgaccagagccccaggacatcgttccttagccagctgctccgttgttggaggcctggtgtggtcacaggtgtgtcctagaacggtgactttgcccctcctgccctaggagatttgggtgtattcacagagcagccatctcctgtctccgtcagagcagtctcttccaggttactggaaggtc

SEQ ID NO: 71 - DNA, 2281 bp, Homo sapiens
ggagggcggcgctcggggcgggaggcccggccgggtccgctaggacagcggggccgctgggaagttgtgagagcggcgctcgggggcgcgcttgcgtgcacgagggcccgggccgcgagcagccgcggcygtcccggtcgccacccttagcagcggtcgmggtcggtgccgaagcggtgttccccgccttagccgctggcgcctcccaagagagcggccggtgggccckcgtcctgtcagtggcgtcggaggccggcgctgcggtggccgcgcccttctggtgctcggacaccgctgaggagccggggccgggcacggctggctgacggctccgggcagctaaggctgcccgaggagaaggcggcggccgcggcgtaggcgcacgtccggcgggctcctggagcctggaggaggccgaggggaccatgtccgggaggcgcttccacctctccaccaccgaccgcgtcatcaaagctgtcccctttcctccaacccaacggcttactttcaaggaagtatttgagaatgggaaacctaaagttgatgttttaaaaaaccatttggtaaaggaaggacgactggaagaggaagtagccttaaagataatcaatgatggggctgccatcctgaggcaagagaagactatgatagaagtagatgctccaatcacagtatgtggtgatattcatggacaattctttgacctaatgaagttatttgaagttggaggatcacctagtaacacacgctacctctttctgggtgactatgtggacagaggctatttcagtatagagtgtgtgctgtatttatggagtttaaagattaatcatcccaaaacattgtttctgcttcggggaaatcatgaatgcaggcatcttacagactatttcaccttcaaacaggaatgtcgaatcaaatattcggaacaggtgtatgatgcctgtatggagacatttgactgtcttcctcttgctgccctcttaaaccagcagtttctctgtgtacatggaggaatgtcacctgaaattacttctttagatgacattaggaaattagacaggtttacggaacctcccgcctttggacctgtgtgtgacctgctttggtctgatccctcagaggattatggcaatgagaagaccttggagcactatacccacaacactgtccgagggtgctcttatttctacagttaccctgcagtttgtgaatttttgcagaacaataatttactatcaattatcagagcccatgaagcccaagatgctgggtatcgaatgtacaggaagagccaagccacaggctttccatcacttattacaattttctctgcccccaattacctagatgtctataacaataaagctgctgtgttgaaatatgaaaacaatgtcatgaatatcaggcagtttaactgttctccacacccctactggcttccaaactttatggatgttttcacatggtctttgccttttgttggggaaaaagtcacagagatgctggtaaatgtgctcaacatatgctctgatgacgaactgatttctgatgatgaagcagaaggaagcactacagttcgtaaggagatcatcaggaataagatcagagccattgggaagatggcacgggtcttttcaattcttcggcaagaaagtgagagtgtgctgactctcaagggcctgactcccacaggcacactccctctgggcgtcctctcaggaggcaagcagactatcgagacagccatcagagggttctcgcttcagcacaagatccggagttttgaagaagcgcgaggtctggaccgaattaatgagcgaatgccaccccgaaaggatagcatacacgctggtgggccaatgaaatctgtaacctcagcacactcacatgctgygcacaggagcgaccaagggaagaaagcccattcatgacttaragtcctgccgtggctcaggtgkatctaaaactcaagaacaaattctatttatttattattggaaaatgaaaagcaactcaaaacaacttcaacstggaggtgcatttataattcagtctgcatttattctgtaaaaaggtgrctgttttataaattcttttaatttatgttcaatatatataaaaagtgcatctgttttgtttttcccttttttctccataattttaagaaatgaatctgattgttgtcaacacatttgtgaagtcttgtgctataaaggggaacttcccctaataaaagggccttggaaacctcaaacctgggtttctgacttgaactagt

SEQ ID NO: 72 - DNA, 2311 bp, Homo sapiens
ggagggcggcgctcggggcgggaggcccggccgggtccgctaggacagcggggccgctgggaagttgtgagagcggcgctcgggggcgcgcttgcgtgcacgagggcccgggccgcgagcagccgcggcygtcccggtcgccacccttagcagcggtcgmggtcggtgccgaagcggtgttccccgccttagccgctggcgcctcccaagagagcggccggtgggccckcgtcctgtcagtggcgtcggaggccggcgctgcggtggccgcgcccttctggtgctcggacaccgctgaggagccggggccgggcacggctggctgacggctccgggcagctaaggctgcccgaggagaaggcggcggccgcggcgtaggcgcacgtccggcgggctcctggagcctggaggaggccgaggggaccatgtccgggaggcgcttccacctctccaccaccgaccgcgtcatcaaagctgtcccctttcctccaacccaacggcttactttcaaggaagtatttgagaatgggaaacctaaagttgatgttttaaaaaaccatttggtaaaggaaggacgactggaagaggaagtagccttaaagataatcaatgatggggctgccatcctgaggcaagagaagactatgatagaagtagatgctccaatcacagtatgtggtgatattcatggacaattctttgacctaatgaagttatttgaagttggaggatcacctagtaacacacgctacctctttctgggtgactatgtggacagaggctatttcagtatagagtgtgtgctgtatttatggagtttaaagattaatcatcccaaaacattgtttctgcttcggggaaatcatgaatgcaggcatcttacagactatttcaccttcaaacaggaatgtcgaatcaaatattcggaacaggtgtatgatgcctgtatggagacatttgactgtcttcctcttgctgccctcttaaaccagcagtttctctgtgtacatggaggaatgtcacctgaaattacttctttagatgacattaggaaattagacaggtttacggaacctcccgcctttggacctgtgtgtgacctgctttggtctgatccctcagaggattatggcaatgagaagaccttggagcactatacccacaacactgtccgagggtgctcttatttctacagttaccctgcagtttgtgaatttttgcagaacaataatttactatcaattatcagagcccatgaagcccaagatgctgggtatcgaatgtacaggaagagccaagccacaggctttccatcacttattacaattttctctgcccccaattacctagatgtctataacaataaagctgctgtgttgaaatatgaaaacaatgtcatgaatatcaggcagtttaactgttctccacacccctactggcttccaaactttatggatgttttcacatggtctttgccttttgttggggaaaaagtcacagagatgctggtaaatgtgctcaacatatgctctgatgacgaactgatttctgatgatgaagcagaaggaagcactacagttcgtaaggagatcatcaggaataagatcagagccattgggaagatggcacgggtcttttcaattcttcggcaagaaagtgagagtgtgctgactctcaagggcctgactcccacaggcacactccctctgggcgtcctctcaggaggcaagcagactatcgagacagccacagtagaagcggtagaggcccgggaagccatcagagggttctcgcttcagcacaagatccggagttttgaagaagcgcgaggtctggaccgaattaatgagcgaatgccaccccgaaaggatagcatacacgctggtgggccaatgaaatctgtaacctcagcacactcacatgctgygcacaggagcgaccaagggaagaaagcccattcatgacttaragtcctgccgtggctcaggtgkatctaaaactcaagaacaaattctatttatttattattggaaaatgaaaagcaactcaaaacaacttcaacstggaggtgcatttataattcagtctgcatttattctgtaaaaaggtgrctgttttataaattcttttaatttatgttcaatatatataaaaagtgcatctgttttgtttttcccttttttctccataattttaagaaatgaatctgattgttgtcaacacatttgtgaagtcttgtgctataaaggggaacttcccctaataaaagggccttggaaacctcaaacctgggtttctgacttgaactagt

SEQ ID NO: 73 - DNA, 3126 bp, Homo sapiens
agacgtctgcgcgcgaatgccgtggcgcgaacttgggactgcagaggcgcgcctggcggatctgagtgtgttgcccgggcagcggcgcgcgggaccaacgcaaggcaacagctgacagacgaagaaaagtgctggacaggaagggagaattctgaygccaacatgcagcgaagtatcatgtcatttttccaccccaagaaagagggtaaagcaaagaagcctgagaaggaggcatccaatagcagcagagagacggagccccctccaaaggcggcactgaaggagtggaatggagtggtgtccgagagtgactctccggtgaagaggccagggaggaaggcggcccgggtcctgggcagcgaaggggaagaggaggatgaagcccttagccctgctaaaggccagaagcctgccctggactgctcacaggtctccccgccccgtcctgccacatctcctgagaacaatgcttccctctctgacacctctcccatggacagttccccatcagggattcygaagcgtcgcacagctcggaagcagctcccgaaacggaccattcaggaagtcctggaagagcagagtgaggacgaggacagagaagccaagaggaagaaggaggaggaagaagaggagaccccgaaagaaagcctcacagaggctgaagtggcmacagagaaggaaggagaagacggggaccagcccaccacgcctcccaagcccctaaagacctccaaagcagagaccccgacggaaagcgtttcagagcctgaggtggccacgaagcaggaactgcaggaggaggaagagcagaccaagcctccccgcagagctcccaagacgctcagcagcttcttcaccccccggaagccagcagtcaaaaaagaagtgaaggaagaggagccaggggctccaggaaaggagggagctgctgagggacccctggatccatctggttacaatcctgccaagaacaactatcatcccgtggaagatgcctgctggaaaccgggccagaaggttccttacctggctgtggcccggacgtttgagaagatcgaggaggtgtctgctcggctccggatggtggagacgctgagcaacttgctgcgctccgtggtggccctgtcgcctccagacctcctccctgtcctctacctcagcctcaaccaccttgggccaccccagcagggcctggagcttggcgtgggtgatggtgtccttctcaaggcagtggcccaggccacaggtcggcagctggagtccrtccgggctgaggcagccgagaaaggcgacgtggggctggtggccgagaacagccgcagcacccagaggctcatgctgccaccacctccgctcactgcctccggggtcttcagcaagttccgcgacatcgccaggctcactggcagtgcttccacagccaagaagatagacatcatcaaaggcctctttgtggcctgccgccactcagaagcccggttcatcgctaggtccctgagcggacggctgcgccttgggctggcagagcagtcggtgctggctgccctctcccaggcagtgagcctcacgcccccgggccaagaattcccaccagccatggtggatgctgggaagggcaagacagcagaggccagaaagacgtggctggaggagcaaggcatgatcctgaagcagacgttctgcgaggttcccgacctggaccgaattatccccgtgctgctggagcacggcctggaacgtctcccggagcactgcaagctsagcccagggattcccctgaaaccaatgttggcccatcccacccggggcatcagcgaggtcctgaaacgctttgaggaggcagctttcacctgcgaatacaaatatgacgggcagagggcacagatccacgccctggaaggcggggaggtgaagatcttcagcaggaatcaggaagacaacactgggaagtacccggacatcatcagccgcatccccaagattaaactcccatcggtcacatccttcatcctggacaccgaagccgtggcttgggaccgggaaaagaagcagatccagccattccaagtgctcaccaccckcaaacgcaaggaggtggatgcgtctgagatccaggtgcaggtgtgtttgtacgccttcgacctcatctacctcaatggagagtccctggtacgtgagcccctttcccggcgccggcagctgctccgggagaactttgtggagacagagggcgagtttgtcttcgccacctccctggacaccaaggacatcgagcagatcgccgagttcctggagcagtcagtgaaagactcctgcgaggggctgatggtgaagaccctggatgttgatgccacctacgagatcgccaagagatcgcacaactggctcaagctgaagaaggactaccttgatggcgtgggtgacaccctggacctggtggtgatyggcgcctacctgggccgggggaagygggccggccgrtacgggggcttcctgctggcctcctacgacgaggacagtgaggagctgcaggccatatgcaagcttggaactggcttcagtgaygaggagctggaggagcatcaccagagcctcaaggcsctggtgctgcccagcccacgcccttacgtgcggatagatggcgctgtgattcccgaccactggctggaccccagcgctgtgtgggaggtgaagtgcgctgacctctccctctctcccatctaccctgctgcgcggggcctggtggatagtgacaagggcatctcccttcgcttccctcggtttattcgagtccgtgaagacaagcagccrgagcaggccaccaccagtgctcakgtggcctgtttgtaccggaagcaragtcagattcagaaccaacaaggcgaggactcaggctctgaccctgaagatacctactaagccctcgccctcctagggcctgggtacagggcatgagttggacggaccccagggttattattgcctttgctttttagcaaatctgctgtggcaggctgtggattttgagagtcaggggaggggtgtgtgtgtgagggggtggcttactcyggagtctgggattcatcccgtcatttctttcaataaataattatyggatagcta

SEQ ID NO: 74 - DNA, 3036 bp, Homo sapiens
agacgtctgcgcgcgaatgccgtggcgcgaacttgggactgcagaggcgcgcctggcggatctgagtgtgttgcccgggcagcggcgcgcgggaccaacgcaaggcaacagctgacagacgaagaaaagtgctggacaggaagggagaattctgaygccaacatgcagcgaagtatcatggcggcactgaaggagtggaatggagtggtgtccgagagtgactctccggtgaagaggccagggaggaaggcggcccgggtcctgggcagcgaaggggaagaggaggatgaagcccttagccctgctaaaggccagaagcctgccctggactgctcacaggtctccccgccccgtcctgccacatctcctgagaacaatgcttccctctctgacacctctcccatggacagttccccatcagggattcygaagcgtcgcacagctcggaagcagctcccgaaacggaccattcaggaagtcctggaagagcagagtgaggacgaggacagagaagccaagaggaagaaggaggaggaagaagaggagaccccgaaagaaagcctcacagaggctgaagtggcmacagagaaggaaggagaagacggggaccagcccaccacgcctcccaagcccctaaagacctccaaagcagagaccccgacggaaagcgtttcagagcctgaggtggccacgaagcaggaactgcaggaggaggaagagcagaccaagcctccccgcagagctcccaagacgctcagcagcttcttcaccccccggaagccagcagtcaaaaaagaagtgaaggaagaggagccaggggctccaggaaaggagggagctgctgagggacccctggatccatctggttacaatcctgccaagaacaactatcatcccgtggaagatgcctgctggaaaccgggccagaaggttccttacctggctgtggcccggacgtttgagaagatcgaggaggtgtctgctcggctccggatggtggagacgctgagcaacttgctgcgctccgtggtggccctgtcgcctccagacctcctccctgtcctctacctcagcctcaaccaccttgggccaccccagcagggcctggagcttggcgtgggtgatggtgtccttctcaaggcagtggcccaggccacaggtcggcagctggagtccrtccgggctgaggcagccgagaaaggcgacgtggggctggtggccgagaacagccgcagcacccagaggctcatgctgccaccacctccgctcactgcctccggggtcttcagcaagttccgcgacatcgccaggctcactggcagtgcttccacagccaagaagatagacatcatcaaaggcctctttgtggcctgccgccactcagaagcccggttcatcgctaggtccctgagcggacggctgcgccttgggctggcagagcagtcggtgctggctgccctctcccaggcagtgagcctcacgcccccgggccaagaattcccaccagccatggtggatgctgggaagggcaagacagcagaggccagaaagacgtggctggaggagcaaggcatgatcctgaagcagacgttctgcgaggttcccgacctggaccgaattatccccgtgctgctggagcacggcctggaacgtctcccggagcactgcaagctsagcccagggattcccctgaaaccaatgttggcccatcccacccggggcatcagcgaggtcctgaaacgctttgaggaggcagctttcacctgcgaatacaaatatgacgggcagagggcacagatccacgccctggaaggcggggaggtgaagatcttcagcaggaatcaggaagacaacactgggaagtacccggacatcatcagccgcatccccaagattaaactcccatcggtcacatccttcatcctggacaccgaagccgtggcttgggaccgggaaaagaagcagatccagccattccaagtgctcaccaccckcaaacgcaaggaggtggatgcgtctgagatccaggtgcaggtgtgtttgtacgccttcgacctcatctacctcaatggagagtccctggtacgtgagcccctttcccggcgccggcagctgctccgggagaactttgtggagacagagggcgagtttgtcttcgccacctccctggacaccaaggacatcgagcagatcgccgagttcctggagcagtcagtgaaagactcctgcgaggggctgatggtgaagaccctggatgttgatgccacctacgagatcgccaagagatcgcacaactggctcaagctgaagaaggactaccttgatggcgtgggtgacaccctggacctggtggtgatyggcgcctacctgggccgggggaagygggccggccgrtacgggggcttcctgctggcctcctacgacgaggacagtgaggagctgcaggccatatgcaagcttggaactggcttcagtgaygaggagctggaggagcatcaccagagcctcaaggcsctggtgctgcccagcccacgcccttacgtgcggatagatggcgctgtgattcccgaccactggctggaccccagcgctgtgtgggaggtgaagtgcgctgacctctccctctctcccatctaccctgctgcgcggggcctggtggatagtgacaagggcatctcccttcgcttccctcggtttattcgagtccgtgaagacaagcagccrgagcaggccaccaccagtgctcakgtggcctgtttgtaccggaagcaragtcagattcagaaccaacaaggcgaggactcaggctctgaccctgaagatacctactaagccctcgccctcctagggcctgggtacagggcatgagttggacggaccccagggttattattgcctttgctttttagcaaatctgctgtggcaggctgtggattttgagagtcaggggaggggtgtgtgtgtgagggggtggcttactcyggagtctgggattcatcccgtcatttctttcaataaataattatyggatagcta

SEQ ID NO: 75 - DNA, 7558 bp, Homo sapiens
gccccgacgccgcgtccctgcagccctcgcccggcgctccagtagcaggacccggtctcgggaccagccggtaatatgcacgtgtcactagctgaggccctggaggttcggggtggaccacttcaggaggaagaaatatgggctgtattaaatcaaagtgctgaaagtctccaagaattattcagaaaagtaagcctagctgatcctgctgcccttggcttcatcatttctccatggtctctgctgttgctgccatctggtagtgtgtcatttacagatgaaaatatttccaatcaggatcttcgagcattcactgcaccagaggttcttcaaaatcagtcactaacttctctctcagatgttgaaaagatccacatttattctcttggaatgacactgtattggggggctgattatgaagtgcctcagagccaacctattaagcttggagatcatctcaacagcatactgcttggaatgtgtgaggatgttatttacgctcgagtttctgttcggactgtgctggatgcttgcagtgcccacattaggaatagcaattgtgcaccctcattttcctacgtgaaacacttggtaaaactggttctgggaaatctttctgggacagatcagctttcctgtaacagtgaacaaaagcctgatcgaagccaggctattcgagatcgattgcgaggaaaaggattaccaacaggaagaagctctacttctgatgtactagacatacaaaagcctccactctctcatcagacctttcttaacaaagggcttagtaaatctatgggatttctgtccatcaaagatacacaagatgagaattatttcaaggacattttatcagataattctggacgtgaagattctgaaaatacattctccccttaccagttcaaaactagtggcccagaaaaaaaacccatccctrgcattgatgtgctttctaagaagaagatctgggcttcatccatggacttgctttgtacagctgacagagacttctcttcaggagagactgccacatatcgtcgttgtcaccctgaggcagtaacagtgcggacttcaactactcctagaaaaaaggaggcaagatactcagatggaagtatagccttggatatctttggccctcagaaaatggatccaatatatcacactcgagaattgcccacctcctcagcaatatcaagtgctttggaccgaatcygagagagacaaaagaaacttcaggttctgagggaagccatgaatgtagaagaaccagttcgaagatacaaaacttatcatggtgatgtctttagtacctccagtgaaagtccatctattatttcctctgaatcagatttcagacaagtgagaagaagtgaagcctcaaagaggtttgaatccagcagtggtctcccaggggtagatgaaaccttaagtcaaggccagtcacagagaccgagcagacaatatgaaacaccctttgaaggcaacttaattaatcaagagatcatgctaaaacggcaagaggaagaactgatgcagctacaagccaaaatggcccttagacagtctcggttgagcctatatccaggagacacaatcaaagcgtccatgcttgacatcaccagggatccgttaagagaaattgccctagaaacagccatgactcaaagaaaactgaggaatttctttggccctgagtttgtgaaaatgacaattgaaccatttatatctttggatttgccacggtctattcttactaagaaagggaagaatgaggataaccgaaggaaagtaaacataatgcttctgaacgggcaaagactggaactgacctgtgataccaaaactatatgtaaagatgtgtttgatatggttgtggcacatattggcttagtagagcatcatttgtttgctttagctaccctcaaagataatgaatatttctttgttgatcctgacttaaaattaaccaaagtggccccagagggatggaaagaagaaccaaagaaaaagaccaaagccactgttaattttactttgtttttcagaattaaattttttatggatgatgttagtctaatacaacatactctgacgtgtcatcagtattaccttcagcttcgaaaagatattttggaggaaaggatgcactgtgatgatgagacttccttattgctggcatccttggctctccaggctgagtatggagattatcaaccagaggttcatggtgtgtcttactttagaatggagcactatttgcccgccagagtgatggagaaacttgatttatcctatatcaaagaagagttacccaaattgcataatacctatgtgggagcttctgaaaaagagacagagttagaatttttaaaggtctgccaaagactgacagaatatggagttcattttcaccgagtgcaccctgagaagaagtcacaaacaggaatattgcttggagtctgttctaaaggtgtccttgtgtttgaagttcacaatggagtgcgcacattggtccttcgctttccatggagggaaaccaagaaaatatctttttctaaaaagaaaatcacattgcaaaatacatcagatggaataaaacatggcttccagacagacaacagtaagatatgccagtacctgctgcacctctgctcttaccagcataagttccagctacagatgagagcaagacagagcaaccaagatgcccaagatattgatgtgctacacaaaagatggagcatagtatcttcaccagaaagggagatcaccttagtgaacctgaaaaaagatgcaaagtatggcttgggatttcaaattattggtggggagaagatgggaagactggacctaggcatatttatcagttcagttgcccctggaggaccagctgacttggatggatgcttgaagccaggagaccgtttgatatctgtgaatagtgtgagtctggagggagtcagccaccatgctgcaattgaaattttgcaaaatgcacctgaagatgtgacacttgttatctctcagccaaaagaaaagatatccaaagtgccttctactcctgtgcatctcaccaatgagatgaaaaactacatgaagaaatcttcctacatgcaagacagtgctatagattcttcttccaaggatcaccactggtcacgtggtaccctgaggcacatctcggagaactcctttgggccrtctgggggcctgcgggaaggaagcctgagttctcaagattccaggactgagagtgccagcttgtctcaaagccaggtcaatggtttctttgccagccatttaggtgaccaaacctggcaggaatcacagcatggcagcccttccccatctgtaatatccaaagccaccgagaaagagactttcactgatagtaaccaaagcaaaactaaaaagccaggcatttctgatgtaactgattactcagaccgtggagattcagacatggatgaagccacttactccagcagtcaggatcatcaaacaccaaaacaggaatcttcctcttcagtgaatacatccaacaagatgaattttaaaactttbtcttcatcacctcctaagcctggagatatctttgaggttgaactggctaaaaatgataacagcttggggataagtgtcacgggaggtgtgaatacgagtgtcagacatggtggcatttatgtgaaagctgttattccccagggagcagcagagtctgatggtagaattcacaaaggtgatcgcgtcctagctgtcaatggagttagtctagaaggagccacccataagcaagctgtggaaacactgagaaatacaggacaggtggttcatctgttattagaaaagggacaatctccaacatctaaagaacatgtcccggtaaccccacagtgtaccctttcagatcagaatgcccaaggtcaaggcccagaaaaagtgaagaaaacaactcaggtcaaagactacagctttgtcactgaagaaaatacatttgaggtaaaattatttaaaaatagctcaggtctaggattcagtttttctcgagaagataatcttatrccggagcaaattaatgccagcatagtaagggttaaaaagctctttcctggacagccagcagcagaaagtggaaaaattgatgtaggagatgttatcttgaaagtgaatggagcctctttgaaaggactatctcagcaggaagtcatatctgctctcaggggaactgctccagaagtattcttgcttctctgcagacctccacctggtgtgctaccggaaattgatactgcgcttttgaccccacttcagtctccagcacaagtacttccaaacagcagtaaagactcttctcagccatcatgtgtgragcaaagcaccagctcagatgaaaatgaaatgtcagacaaaagcaaaaaacagtgcaagtccccatccagaagagacagttacagtgacagcagtgggagtggagaagatgacttagtgacagctccagsaaacatatcaaattcgacctggagttcagctttgcatcagactctaagcaacatggtatcacaggcacagagtcatcatgaagcacccaagagtcaagaagataccatttgtaccatgttttactatcctcagaaaattcccaataaaccagagtttgaggacagtaatccttcccctctaccaccggatatggctcctgggcagagttatcaaccccaatcagaayctgcttcctctagttcgatggataagtatcatatacatcacatttctgaaccaactagacaagaaaactggacacctttgaaaaatgacttggaaaatcaccttgaagactttgaactggaagtagaactcctcattaccctaattaaatcaraaaaaggaagcctgggttttacagtaaccaaaggcaatcagagaattggttgttatgttcatgatgtcatacaggatccagccaaaagtgatggaaggctaaaacctggggaccggctcataaaggttaatgatacagatgttactaatatgactcatacagatgcagttaatctgctccgggctgcatccaaaacagtcagattagttattggacgagttctagaattacccagaataccaatgttgcctcatttgctaccggacataacrctaacrtgcaacaaagaggagttgggtttttccttatgtggaggtcatgacagcctttatcaagtggtatatattagtgatattaatccaaggtccgtcgcagccattgagggtaatctccagctattagatgtcatccattatgtgaacggagtcagcacacaaggaatgaccttggaggaagttaacagagcattagacatgtcacttccttcattggtattgaaagcaacaagaaatgatcttccagtggtccccagctcaaagaggtctgctgtttcagctccaaagtcaaccaaaggcaatggttcctacagtgtggggtcttgcagccagcctgccctcactcctaatgattcattctccacggttgctggggaagaaataaatgaaatatcgtaccccaaaggaaaatgttctacttatcagataaagggatcaccaaacttgactctgcccaaagaatcttatatacaagaagatgacatttatgatgattcccaagaagctgaagttatccagtctctgctggatgttgtggatgaggaagcccagaatcttttaaacgaaaataatgcagcaggakactcctgtggtccaggtacattaaagatgaatgggaagttatcagaagagagaacagaagatacagactgcgatggttcacctttacctgagtattttactgaggccaccaaaatgaatggctgtgaagaatattgtgaagaaaaagtaaaaagtgaaagcttaattcagaagccacaagaaaagaagactgatgatgatgaaataacatggggaaatgatgagttgccaatagagagaacaaaccatgaagattctgataaagatcattcctttctgacaaacgatgagctcgctgtactccctgtcgtcaaagtgcttccctctggtaaatacacgggtgccaacttaaaatcagtcattcgagtcctgcggggtttgctagatcaaggaattccttctaaggagctggagaatcttcaagaattaaaacctttggatcagtgtctaattgggcaaactaaggaaaacagaaggaagaacagatataaaaatatacttccctatgatgctacaagagtgcctcttggagatgaaggtggctatatcaatgccagcttcattaagataccagttgggaaagaagagttcgtttacattgcctgccaaggaccactgcctacaactgttggagacttctggcagatgatttgggagcaaaaatccacagtgatagccatgatgactcaagaagtagaaggagaaaaaatcaaatgccagcgctattggcccaacatcctaggcaaaacaacaatggtcagcaacagacttcgactggctcttgtgagaatgcagcagctgaagggctttgtggtgagggcaatgacccttgaagatattcagaccagagaggtgcgccatatttctcatctgaatttcactgcctggccagaccatgatayaccttctcaaccagatgatctgcttacttttatctcctacatgagacacatccacagatcaggcccaatcattacgcactgcagtgctggcattggacgttcagggaccctgatttgcatagatgtggttctgggattaatcagtcaggatcttgattttgacatctctgatttggtgcgctgcatkagactacaaagacacggaatggttcagacagaggatcaatatrttttctgctatcaagtcatcctttatgtcctgacacgtcttcaagcagaagaagagcaaaaacagcagcctcagcttctgaagtgacatgaaaagagcctctggatgcatttccatttctctccttaacctccagcagactmctgctctctatccaaaataaagatcacagagcagcaagttcatacaacatgcatgttctcctctatcttagaggggtattcttcttgaaaataaaaaatattgaaatgctgtatttttacagctactttaacctatgataattatttacaaaattttaacactaaccaaacaatgcagatcttagggatgattaaaggcagcatttgatgatagcagacattgttacaaggacatggtgagtctatttttaatgcaccaatcttgtttatagcaaaaatgttttccaatattttaataaagtagttattttataggggatacttgaaaccagtatttaagctttaaatgacagtaatattggcatagaaaaaagtagcaaatgtttactgtatcaatttctaatgtttactatatagaatttcctgtaatatatttatatactttttcatgaaaatggagttatcagttatctgtttgttactgcatcatctgtttgtaatcattatctcactttgtaaataaaaacacmccttaaaacatg

SEQ ID NO: 76 - DNA, 8074 bp, Homo sapiens
gccccgacgccgcgtccctgcagccctcgcccggcgctccagtagcaggacccggtctcgggaccagccggtaatatgcacgtgtcactagctgaggccctggaggttcggggtggaccacttcaggaggaagaaatatgggctgtattaaatcaaagtgctgaaagtctccaagaattattcagaaaagtaagcctagctgatcctgctgcccttggcttcatcatttctccatggtctctgctgttgctgccatctggtagtgtgtcatttacagatgaaaatatttccaatcaggatcttcgagcattcactgcaccagaggttcttcaaaatcagtcactaacttctctctcagatgttgaaaagatccacatttattctcttggaatgacactgtattggggggctgattatgaagtgcctcagagccaacctattaagcttggagatcatctcaacagcatactgcttggaatgtgtgaggatgttatttacgctcgagtttctgttcggactgtgctggatgcttgcagtgcccacattaggaatagcaattgtgcaccctcattttcctacgtgaaacacttggtaaaactggttctgggaaatctttctgggacagatcagctttcctgtaacagtgaacaaaagcctgatcgaagccaggctattcgagatcgattgcgaggaaaaggattaccaacaggaagaagctctacttctgatgtactagacatacaaaagcctccactctctcatcagacctttcttaacaaagggcttagtaaatctatgggatttctgtccatcaaagatacacaagatgagaattatttcaaggacattttatcagataattctggacgtgaagattctgaaaatacattctccccttaccagttcaaaactagtggcccagaaaaaaaacccatccctrgcattgatgtgctttctaagaagaagatctgggcttcatccatggacttgctttgtacagctgacagagacttctcttcaggagagactgccacatatcgtcgttgtcaccctgaggcagtaacagtgcggacttcaactactcctagaaaaaaggaggcaagatactcagatggaagtatagccttggatatctttggccctcagaaaatggatccaatatatcacactcgagaattgcccacctcctcagcaatatcaagtgctttggaccgaatcygagagagacaaaagaaacttcaggttctgagggaagccatgaatgtagaagaaccagttcgaagatacaaaacttatcatggtgatgtctttagtacctccagtgaaagtccatctattatttcctctgaatcagatttcagacaagtgagaagaagtgaagcctcaaagaggtttgaatccagcagtggtctcccaggggtagatgaaaccttaagtcaaggccagtcacagagaccgagcagacaatatgaaacaccctttgaaggcaacttaattaatcaagagatcatgctaaaacggcaagaggaagaactgatgcagctacaagccaaaatggcccttagacagtctcggttgagcctatatccaggagacacaatcaaagcgtccatgcttgacatcaccagggatccgttaagagaaattgccctagaaacagccatgactcaaagaaaactgaggaatttctttggccctgagtttgtgaaaatgacaattgaaccatttatatctttggatttgccacggtctattcttactaagaaagggaagaatgaggataaccgaaggaaagtaaacataatgcttctgaacgggcaaagactggaactgacctgtgataccaaaactatatgtaaagatgtgtttgatatggttgtggcacatattggcttagtagagcatcatttgtttgctttagctaccctcaaagataatgaatatttctttgttgatcctgacttaaaattaaccaaagtggccccagagggatggaaagaagaaccaaagaaaaagaccaaagccactgttaattttactttgtttttcagaattaaattttttatggatgatgttagtctaatacaacatactctgacgtgtcatcagtattaccttcagcttcgaaaagatattttggaggaaaggatgcactgtgatgatgagacttccttattgctggcatccttggctctccaggctgagtatggagattatcaaccagaggttcatggtgtgtcttactttagaatggagcactatttgcccgccagagtgatggagaaacttgatttatcctatatcaaagaagagttacccaaattgcataatacctatgtgggagcttctgaaaaagagacagagttagaatttttaaaggtctgccaaagactgacagaatatggagttcattttcaccgagtgcaccctgagaagaagtcacaaacaggaatattgcttggagtctgttctaaaggtgtccttgtgtttgaagttcacaatggagtgcgcacattggtccttcgctttccatggagggaaaccaagaaaatatctttttctaaaaagaaaatcacattgcaaaatacatcagatggaataaaacatggcttccagacagacaacagtaagatatgccagtacctgctgcacctctgctcttaccagcataagttccagctacagatgagagcaagacagagcaaccaagatgcccaagatattgagagagcttcgtttaggagcctgaatctccaagcagagtctgttagaggatttaatatgggacgagcaatcagcactggcagtctggccagcagcaccctcaacaaacttgctgttcgacctttatcrgttcaagctgagattctgaagaggctatcctgctcagagctgtcgctttaccagccattgcaaaacagttcaaaagagaagaatgacaaagcttcatgggaggaaaagcctagagagatgagtaaatcataccatgatctcagtcaggcctctctctatccacatcggaaaaatgtcattgttaacatggaacccccaccacaaaccgttgcagagttggtgggaaaaccttctcaccagatgtcaagatctgatgcagaatctttggcaggagtgacaaaacttaataattcaaagtctgttgcgagtttaaatagaagtcctgaaaggaggaaacatgaatcagactcctcatccattgaagaccctgggcaagcatatgttctagatgtgctacacaaaagatggagcatagtatcttcaccagaaagggagatcaccttagtgaacctgaaaaaagatgcaaagtatggcttgggatttcaaattattggtggggagaagatgggaagactggacctaggcatatttatcagttcagttgcccctggaggaccagctgacttggatggatgcttgaagccaggagaccgtttgatatctgtgaatagtgtgagtctggagggagtcagccaccatgctgcaattgaaattttgcaaaatgcacctgaagatgtgacacttgttatctctcagccaaaagaaaagatatccaaagtgccttctactcctgtgcatctcaccaatgagatgaaaaactacatgaagaaatcttcctacatgcaagacagtgctatagattcttcttccaaggatcaccactggtcacgtggtaccctgaggcacatctcggagaactcctttgggccrtctgggggcctgcgggaaggaagcctgagttctcaagattccaggactgagagtgccagcttgtctcaaagccaggtcaatggtttctttgccagccatttaggtgaccaaacctggcaggaatcacagcatggcagcccttccccatctgtaatatccaaagccaccgagaaagagactttcactgatagtaaccaaagcaaaactaaaaagccaggcatttctgatgtaactgattactcagaccgtggagattcagacatggatgaagccacttactccagcagtcaggatcatcaaacaccaaaacaggaatcttcctcttcagtgaatacatccaacaagatgaattttaaaactttbtcttcatcacctcctaagcctggagatatctttgaggttgaactggctaaaaatgataacagcttggggataagtgtcacgggaggtgtgaatacgagtgtcagacatggtggcatttatgtgaaagctgttattccccagggagcagcagagtctgatggtagaattcacaaaggtgatcgcgtcctagctgtcaatggagttagtctagaaggagccacccataagcaagctgtggaaacactgagaaatacaggacaggtggttcatctgttattagaaaagggacaatctccaacatctaaagaacatgtcccggtaaccccacagtgtaccctttcagatcagaatgcccaaggtcaaggcccagaaaaagtgaagaaaacaactcaggtcaaagactacagctttgtcactgaagaaaatacatttgaggtaaaattatttaaaaatagctcaggtctaggattcagtttttctcgagaagataatcttatrccggagcaaattaatgccagcatagtaagggttaaaaagctctttcctggacagccagcagcagaaagtggaaaaattgatgtaggagatgttatcttgaaagtgaatggagcctctttgaaaggactatctcagcaggaagtcatatctgctctcaggggaactgctccagaagtattcttgcttctctgcagacctccacctggtgtgctaccggaaattgatactgcgcttttgaccccacttcagtctccagcacaagtacttccaaacagcagtaaagactcttctcagccatcatgtgtgragcaaagcaccagctcagatgaaaatgaaatgtcagacaaaagcaaaaaacagtgcaagtccccatccagaagagacagttacagtgacagcagtgggagtggagaagatgacttagtgacagctccagsaaacatatcaaattcgacctggagttcagctttgcatcagactctaagcaacatggtatcacaggcacagagtcatcatgaagcacccaagagtcaagaagataccatttgtaccatgttttactatcctcagaaaattcccaataaaccagagtttgaggacagtaatccttcccctctaccaccggatatggctcctgggcagagttatcaaccccaatcagaayctgcttcctctagttcgatggataagtatcatatacatcacatttctgaaccaactagacaagaaaactggacacctttgaaaaatgacttggaaaatcaccttgaagactttgaactggaagtagaactcctcattaccctaattaaatcaraaaaaggaagcctgggttttacagtaaccaaaggcaatcagagaattggttgttatgttcatgatgtcatacaggatccagccaaaagtgatggaaggctaaaacctggggaccggctcataaaggttaatgatacagatgttactaatatgactcatacagatgcagttaatctgctccgggctgcatccaaaacagtcagattagttattggacgagttctagaattacccagaataccaatgttgcctcatttgctaccggacataacrctaacrtgcaacaaagaggagttgggtttttccttatgtggaggtcatgacagcctttatcaagtggtatatattagtgatattaatccaaggtccgtcgcagccattgagggtaatctccagctattagatgtcatccattatgtgaacggagtcagcacacaaggaatgaccttggaggaagttaacagagcattagacatgtcacttccttcattggtattgaaagcaacaagaaatgatcttccagtggtccccagctcaaagaggtctgctgtttcagctccaaagtcaaccaaaggcaatggttcctacagtgtggggtcttgcagccagcctgccctcactcctaatgattcattctccacggttgctggggaagaaataaatgaaatatcgtaccccaaaggaaaatgttctacttatcagataaagggatcaccaaacttgactctgcccaaagaatcttatatacaagaagatgacatttatgatgattcccaagaagctgaagttatccagtctctgctggatgttgtggatgaggaagcccagaatcttttaaacgaaaataatgcagcaggakactcctgtggtccaggtacattaaagatgaatgggaagttatcagaagagagaacagaagatacagactgcgatggttcacctttacctgagtattttactgaggccaccaaaatgaatggctgtgaagaatattgtgaagaaaaagtaaaaagtgaaagcttaattcagaagccacaagaaaagaagactgatgatgatgaaataacatggggaaatgatgagttgccaatagagagaacaaaccatgaagattctgataaagatcattcctttctgacaaacgatgagctcgctgtactccctgtcgtcaaagtgcttccctctggtaaatacacgggtgccaacttaaaatcagtcattcgagtcctgcggggtttgctagatcaaggaattccttctaaggagctggagaatcttcaagaattaaaacctttggatcagtgtctaattgggcaaactaaggaaaacagaaggaagaacagatataaaaatatacttccctatgatgctacaagagtgcctcttggagatgaaggtggctatatcaatgccagcttcattaagataccagttgggaaagaagagttcgtttacattgcctgccaaggaccactgcctacaactgttggagacttctggcagatgatttgggagcaaaaatccacagtgatagccatgatgactcaagaagtagaaggagaaaaaatcaaatgccagcgctattggcccaacatcctaggcaaaacaacaatggtcagcaacagacttcgactggctcttgtgagaatgcagcagctgaagggctttgtggtgagggcaatgacccttgaagatattcagaccagagaggtgcgccatatttctcatctgaatttcactgcctggccagaccatgatayaccttctcaaccagatgatctgcttacttttatctcctacatgagacacatccacagatcaggcccaatcattacgcactgcagtgctggcattggacgttcagggaccctgatttgcatagatgtggttctgggattaatcagtcaggatcttgattttgacatctctgatttggtgcgctgcatkagactacaaagacacggaatggttcagacagaggatcaatatrttttctgctatcaagtcatcctttatgtcctgacacgtcttcaagcagaagaagagcaaaaacagcagcctcagcttctgaagtgacatgaaaagagcctctggatgcatttccatttctctccttaacctccagcagactmctgctctctatccaaaataaagatcacagagcagcaagttcatacaacatgcatgttctcctctatcttagaggggtattcttcttgaaaataaaaaatattgaaatgctgtatttttacagctactttaacctatgataattatttacaaaattttaacactaaccaaacaatgcagatcttagggatgattaaaggcagcatttgatgatagcagacattgttacaaggacatggtgagtctatttttaatgcaccaatcttgtttatagcaaaaatgttttccaatattttaataaagtagttattttataggggatacttgaaaccagtatttaagctttaaatgacagtaatattggcatagaaaaaagtagcaaatgtttactgtatcaatttctaatgtttactatatagaatttcctgtaatatatttatatactttttcatgaaaatggagttatcagttatctgtttgttactgcatcatctgtttgtaatcattatctcactttgtaaataaaaacacmccttaaaacatg

SEQ ID NO: 77 - DNA, 8146 bp, Homo sapiens
gccccgacgccgcgtccctgcagccctcgcccggcgctccagtagcaggacccggtctcgggaccagccggtaatatgcacgtgtcactagctgaggccctggaggttcggggtggaccacttcaggaggaagaaatatgggctgtattaaatcaaagtgctgaaagtctccaagaattattcagaaaagtaagcctagctgatcctgctgcccttggcttcatcatttctccatggtctctgctgttgctgccatctggtagtgtgtcatttacagatgaaaatatttccaatcaggatcttcgagcattcactgcaccagaggttcttcaaaatcagtcactaacttctctctcagatgttgaaaagatccacatttattctcttggaatgacactgtattggggggctgattatgaagtgcctcagagccaacctattaagcttggagatcatctcaacagcatactgcttggaatgtgtgaggatgttatttacgctcgagtttctgttcggactgtgctggatgcttgcagtgcccacattaggaatagcaattgtgcaccctcattttcctacgtgaaacacttggtaaaactggttctgggaaatctttctgggacagatcagctttcctgtaacagtgaacaaaagcctgatcgaagccaggctattcgagatcgattgcgaggaaaaggattaccaacaggaagaagctctacttctgatgtactagacatacaaaagcctccactctctcatcagacctttcttaacaaagggcttagtaaatctatgggatttctgtccatcaaagatacacaagatgagaattatttcaaggacattttatcagataattctggacgtgaagattctgaaaatacattctccccttaccagttcaaaactagtggcccagaaaaaaaacccatccctrgcattgatgtgctttctaagaagaagatctgggcttcatccatggacttgctttgtacagctgacagagacttctcttcaggagagactgccacatatcgtcgttgtcaccctgaggcagtaacagtgcggacttcaactactcctagaaaaaaggaggcaagatactcagatggaagtatagccttggatatctttggccctcagaaaatggatccaatatatcacactcgagaattgcccacctcctcagcaatatcaagtgctttggaccgaatcygagagagacaaaagaaacttcaggttctgagggaagccatgaatgtagaagaaccagttcgaagatacaaaacttatcatggtgatgtctttagtacctccagtgaaagtccatctattatttcctctgaatcagatttcagacaagtgagaagaagtgaagcctcaaagaggtttgaatccagcagtggtctcccaggggtagatgaaaccttaagtcaaggccagtcacagagaccgagcagacaatatgaaacaccctttgaaggcaacttaattaatcaagagatcatgctaaaacggcaagaggaagaactgatgcagctacaagccaaaatggcccttagacagtctcggttgagcctatatccaggagacacaatcaaagcgtccatgcttgacatcaccagggatccgttaagagaaattgccctagaaacagccatgactcaaagaaaactgaggaatttctttggccctgagtttgtgaaaatgacaattgaaccatttatatctttggatttgccacggtctattcttactaagaaagggaagaatgaggataaccgaaggaaagtaaacataatgcttctgaacgggcaaagactggaactgacctgtgataccaaaactatatgtaaagatgtgtttgatatggttgtggcacatattggcttagtagagcatcatttgtttgctttagctaccctcaaagataatgaatatttctttgttgatcctgacttaaaattaaccaaagtggccccagagggatggaaagaagaaccaaagaaaaagaccaaagccactgttaattttactttgtttttcagaattaaattttttatggatgatgttagtctaatacaacatactctgacgtgtcatcagtattaccttcagcttcgaaaagatattttggaggaaaggatgcactgtgatgatgagacttccttattgctggcatccttggctctccaggctgagtatggagattatcaaccagaggttcatggtgtgtcttactttagaatggagcactatttgcccgccagagtgatggagaaacttgatttatcctatatcaaagaagagttacccaaattgcataatacctatgtgggagcttctgaaaaagagacagagttagaatttttaaaggtctgccaaagactgacagaatatggagttcattttcaccgagtgcaccctgagaagaagtcacaaacaggaatattgcttggagtctgttctaaaggtgtccttgtgtttgaagttcacaatggagtgcgcacattggtccttcgctttccatggagggaaaccaagaaaatatctttttctaaaaagaaaatcacattgcaaaatacatcagatggaataaaacatggcttccagacagacaacagtaagatatgccagtacctgctgcacctctgctcttaccagcataagttccagctacagatgagagcaagacagagcaaccaagatgcccaagatattgagagagcttcgtttaggagcctgaatctccaagcagagtctgttagaggatttaatatgggacgagcaatcagcactggcagtctggccagcagcaccctcaacaaacttgctgttcgacctttatcrgttcaagctgagattctgaagaggctatcctgctcagagctgtcgctttaccagccattgcaaaacagttcaaaagagaagaatgacaaagcttcatgggaggaaaagcctagagagatgagtaaatcataccatgatctcagtcaggcctctctctatccacatcggaaaaatgtcattgttaacatggaacccccaccacaaaccgttgcagagttggtgggaaaaccttctcaccagatgtcaagatctgatgcagaatctttggcaggagtgacaaaacttaataattcaaagtctgttgcgagtttaaatagaagtcctgaaaggaggaaacatgaatcagactcctcatccattgaagaccctgggcaagcatatgttctaggaatgactatgcatagttctggaaactcttcatcccaagtacccttaaaagaaaatgatgtgctacacaaaagatggagcatagtatcttcaccagaaagggagatcaccttagtgaacctgaaaaaagatgcaaagtatggcttgggatttcaaattattggtggggagaagatgggaagactggacctaggcatatttatcagttcagttgcccctggaggaccagctgacttggatggatgcttgaagccaggagaccgtttgatatctgtgaatagtgtgagtctggagggagtcagccaccatgctgcaattgaaattttgcaaaatgcacctgaagatgtgacacttgttatctctcagccaaaagaaaagatatccaaagtgccttctactcctgtgcatctcaccaatgagatgaaaaactacatgaagaaatcttcctacatgcaagacagtgctatagattcttcttccaaggatcaccactggtcacgtggtaccctgaggcacatctcggagaactcctttgggccrtctgggggcctgcgggaaggaagcctgagttctcaagattccaggactgagagtgccagcttgtctcaaagccaggtcaatggtttctttgccagccatttaggtgaccaaacctggcaggaatcacagcatggcagcccttccccatctgtaatatccaaagccaccgagaaagagactttcactgatagtaaccaaagcaaaactaaaaagccaggcatttctgatgtaactgattactcagaccgtggagattcagacatggatgaagccacttactccagcagtcaggatcatcaaacaccaaaacaggaatcttcctcttcagtgaatacatccaacaagatgaattttaaaactttbtcttcatcacctcctaagcctggagatatctttgaggttgaactggctaaaaatgataacagcttggggataagtgtcacggtactgtttgacaagggaggtgtgaatacgagtgtcagacatggtggcatttatgtgaaagctgttattccccagggagcagcagagtctgatggtagaattcacaaaggtgatcgcgtcctagctgtcaatggagttagtctagaaggagccacccataagcaagctgtggaaacactgagaaatacaggacaggtggttcatctgttattagaaaagggacaatctccaacatctaaagaacatgtcccggtaaccccacagtgtaccctttcagatcagaatgcccaaggtcaaggcccagaaaaagtgaagaaaacaactcaggtcaaagactacagctttgtcactgaagaaaatacatttgaggtaaaattatttaaaaatagctcaggtctaggattcagtttttctcgagaagataatcttatrccggagcaaattaatgccagcatagtaagggttaaaaagctctttcctggacagccagcagcagaaagtggaaaaattgatgtaggagatgttatcttgaaagtgaatggagcctctttgaaaggactatctcagcaggaagtcatatctgctctcaggggaactgctccagaagtattcttgcttctctgcagacctccacctggtgtgctaccggaaattgatactgcgcttttgaccccacttcagtctccagcacaagtacttccaaacagcagtaaagactcttctcagccatcatgtgtgragcaaagcaccagctcagatgaaaatgaaatgtcagacaaaagcaaaaaacagtgcaagtccccatccagaagagacagttacagtgacagcagtgggagtggagaagatgacttagtgacagctccagsaaacatatcaaattcgacctggagttcagctttgcatcagactctaagcaacatggtatcacaggcacagagtcatcatgaagcacccaagagtcaagaagataccatttgtaccatgttttactatcctcagaaaattcccaataaaccagagtttgaggacagtaatccttcccctctaccaccggatatggctcctgggcagagttatcaaccccaatcagaayctgcttcctctagttcgatggataagtatcatatacatcacatttctgaaccaactagacaagaaaactggacacctttgaaaaatgacttggaaaatcaccttgaagactttgaactggaagtagaactcctcattaccctaattaaatcaraaaaaggaagcctgggttttacagtaaccaaaggcaatcagagaattggttgttatgttcatgatgtcatacaggatccagccaaaagtgatggaaggctaaaacctggggaccggctcataaaggttaatgatacagatgttactaatatgactcatacagatgcagttaatctgctccgggctgcatccaaaacagtcagattagttattggacgagttctagaattacccagaataccaatgttgcctcatttgctaccggacataacrctaacrtgcaacaaagaggagttgggtttttccttatgtggaggtcatgacagcctttatcaagtggtatatattagtgatattaatccaaggtccgtcgcagccattgagggtaatctccagctattagatgtcatccattatgtgaacggagtcagcacacaaggaatgaccttggaggaagttaacagagcattagacatgtcacttccttcattggtattgaaagcaacaagaaatgatcttccagtggtccccagctcaaagaggtctgctgtttcagctccaaagtcaaccaaaggcaatggttcctacagtgtggggtcttgcagccagcctgccctcactcctaatgattcattctccacggttgctggggaagaaataaatgaaatatcgtaccccaaaggaaaatgttctacttatcagataaagggatcaccaaacttgactctgcccaaagaatcttatatacaagaagatgacatttatgatgattcccaagaagctgaagttatccagtctctgctggatgttgtggatgaggaagcccagaatcttttaaacgaaaataatgcagcaggakactcctgtggtccaggtacattaaagatgaatgggaagttatcagaagagagaacagaagatacagactgcgatggttcacctttacctgagtattttactgaggccaccaaaatgaatggctgtgaagaatattgtgaagaaaaagtaaaaagtgaaagcttaattcagaagccacaagaaaagaagactgatgatgatgaaataacatggggaaatgatgagttgccaatagagagaacaaaccatgaagattctgataaagatcattcctttctgacaaacgatgagctcgctgtactccctgtcgtcaaagtgcttccctctggtaaatacacgggtgccaacttaaaatcagtcattcgagtcctgcggggtttgctagatcaaggaattccttctaaggagctggagaatcttcaagaattaaaacctttggatcagtgtctaattgggcaaactaaggaaaacagaaggaagaacagatataaaaatatacttccctatgatgctacaagagtgcctcttggagatgaaggtggctatatcaatgccagcttcattaagataccagttgggaaagaagagttcgtttacattgcctgccaaggaccactgcctacaactgttggagacttctggcagatgatttgggagcaaaaatccacagtgatagccatgatgactcaagaagtagaaggagaaaaaatcaaatgccagcgctattggcccaacatcctaggcaaaacaacaatggtcagcaacagacttcgactggctcttgtgagaatgcagcagctgaagggctttgtggtgagggcaatgacccttgaagatattcagaccagagaggtgcgccatatttctcatctgaatttcactgcctggccagaccatgatayaccttctcaaccagatgatctgcttacttttatctcctacatgagacacatccacagatcaggcccaatcattacgcactgcagtgctggcattggacgttcagggaccctgatttgcatagatgtggttctgggattaatcagtcaggatcttgattttgacatctctgatttggtgcgctgcatkagactacaaagacacggaatggttcagacagaggatcaatatrttttctgctatcaagtcatcctttatgtcctgacacgtcttcaagcagaagaagagcaaaaacagcagcctcagcttctgaagtgacatgaaaagagcctctggatgcatttccatttctctccttaacctccagcagactmctgctctctatccaaaataaagatcacagagcagcaagttcatacaacatgcatgttctcctctatcttagaggggtattcttcttgaaaataaaaaatattgaaatgctgtatttttacagctactttaacctatgataattatttacaaaattttaacactaaccaaacaatgcagatcttagggatgattaaaggcagcatttgatgatagcagacattgttacaaggacatggtgagtctatttttaatgcaccaatcttgtttatagcaaaaatgttttccaatattttaataaagtagttattttataggggatacttgaaaccagtatttaagctttaaatgacagtaatattggcatagaaaaaagtagcaaatgtttactgtatcaatttctaatgtttactatatagaatttcctgtaatatatttatatactttttcatgaaaatggagttatcagttatctgtttgttactgcatcatctgtttgtaatcattatctcactttgtaaataaaaacacmccttaaaacatg

SEQ ID NO: 78 - DNA, 8131 bp, Homo sapiens
gccccgacgccgcgtccctgcagccctcgcccggcgctccagtagcaggacccggtctcgggaccagccggtaatatgcacgtgtcactagctgaggccctggaggttcggggtggaccacttcaggaggaagaaatatgggctgtattaaatcaaagtgctgaaagtctccaagaattattcagaaaagtaagcctagctgatcctgctgcccttggcttcatcatttctccatggtctctgctgttgctgccatctggtagtgtgtcatttacagatgaaaatatttccaatcaggatcttcgagcattcactgcaccagaggttcttcaaaatcagtcactaacttctctctcagatgttgaaaagatccacatttattctcttggaatgacactgtattggggggctgattatgaagtgcctcagagccaacctattaagcttggagatcatctcaacagcatactgcttggaatgtgtgaggatgttatttacgctcgagtttctgttcggactgtgctggatgcttgcagtgcccacattaggaatagcaattgtgcaccctcattttcctacgtgaaacacttggtaaaactggttctgggaaatctttctgggacagatcagctttcctgtaacagtgaacaaaagcctgatcgaagccaggctattcgagatcgattgcgaggaaaaggattaccaacaggaagaagctctacttctgatgtactagacatacaaaagcctccactctctcatcagacctttcttaacaaagggcttagtaaatctatgggatttctgtccatcaaagatacacaagatgagaattatttcaaggacattttatcagataattctggacgtgaagattctgaaaatacattctccccttaccagttcaaaactagtggcccagaaaaaaaacccatccctrgcattgatgtgctttctaagaagaagatctgggcttcatccatggacttgctttgtacagctgacagagacttctcttcaggagagactgccacatatcgtcgttgtcaccctgaggcagtaacagtgcggacttcaactactcctagaaaaaaggaggcaagatactcagatggaagtatagccttggatatctttggccctcagaaaatggatccaatatatcacactcgagaattgcccacctcctcagcaatatcaagtgctttggaccgaatcygagagagacaaaagaaacttcaggttctgagggaagccatgaatgtagaagaaccagttcgaagatacaaaacttatcatggtgatgtctttagtacctccagtgaaagtccatctattatttcctctgaatcagatttcagacaagtgagaagaagtgaagcctcaaagaggtttgaatccagcagtggtctcccaggggtagatgaaaccttaagtcaaggccagtcacagagaccgagcagacaatatgaaacaccctttgaaggcaacttaattaatcaagagatcatgctaaaacggcaagaggaagaactgatgcagctacaagccaaaatggcccttagacagtctcggttgagcctatatccaggagacacaatcaaagcgtccatgcttgacatcaccagggatccgttaagagaaattgccctagaaacagccatgactcaaagaaaactgaggaatttctttggccctgagtttgtgaaaatgacaattgaaccatttatatctttggatttgccacggtctattcttactaagaaagggaagaatgaggataaccgaaggaaagtaaacataatgcttctgaacgggcaaagactggaactgacctgtgataccaaaactatatgtaaagatgtgtttgatatggttgtggcacatattggcttagtagagcatcatttgtttgctttagctaccctcaaagataatgaatatttctttgttgatcctgacttaaaattaaccaaagtggccccagagggatggaaagaagaaccaaagaaaaagaccaaagccactgttaattttactttgtttttcagaattaaattttttatggatgatgttagtctaatacaacatactctgacgtgtcatcagtattaccttcagcttcgaaaagatattttggaggaaaggatgcactgtgatgatgagacttccttattgctggcatccttggctctccaggctgagtatggagattatcaaccagaggttcatggtgtgtcttactttagaatggagcactatttgcccgccagagtgatggagaaacttgatttatcctatatcaaagaagagttacccaaattgcataatacctatgtgggagcttctgaaaaagagacagagttagaatttttaaaggtctgccaaagactgacagaatatggagttcattttcaccgagtgcaccctgagaagaagtcacaaacaggaatattgcttggagtctgttctaaaggtgtccttgtgtttgaagttcacaatggagtgcgcacattggtccttcgctttccatggagggaaaccaagaaaatatctttttctaaaaagaaaatcacattgcaaaatacatcagatggaataaaacatggcttccagacagacaacagtaagatatgccagtacctgctgcacctctgctcttaccagcataagttccagctacagatgagagcaagacagagcaaccaagatgcccaagatattgagagagcttcgtttaggagcctgaatctccaagcagagtctgttagaggatttaatatgggacgagcaatcagcactggcagtctggccagcagcaccctcaacaaacttgctgttcgacctttatcrgttcaagctgagattctgaagaggctatcctgctcagagctgtcgctttaccagccattgcaaaacagttcaaaagagaagaatgacaaagcttcatgggaggaaaagcctagagagatgagtaaatcataccatgatctcagtcaggcctctctctatccacatcggaaaaatgtcattgttaacatggaacccccaccacaaaccgttgcagagttggtgggaaaaccttctcaccagatgtcaagatctgatgcagaatctttggcaggagtgacaaaacttaataattcaaagtctgttgcgagtttaaatagaagtcctgaaaggaggaaacatgaatcagactcctcatccattgaagaccctgggcaagcatatgttctaggaatgactatgcatagttctggaaactcttcatcccaagtacccttaaaagaaaatgatgtgctacacaaaagatggagcatagtatcttcaccagaaagggagatcaccttagtgaacctgaaaaaagatgcaaagtatggcttgggatttcaaattattggtggggagaagatgggaagactggacctaggcatatttatcagttcagttgcccctggaggaccagctgacttggatggatgcttgaagccaggagaccgtttgatatctgtgaatagtgtgagtctggagggagtcagccaccatgctgcaattgaaattttgcaaaatgcacctgaagatgtgacacttgttatctctcagccaaaagaaaagatatccaaagtgccttctactcctgtgcatctcaccaatgagatgaaaaactacatgaagaaatcttcctacatgcaagacagtgctatagattcttcttccaaggatcaccactggtcacgtggtaccctgaggcacatctcggagaactcctttgggccrtctgggggcctgcgggaaggaagcctgagttctcaagattccaggactgagagtgccagcttgtctcaaagccaggtcaatggtttctttgccagccatttaggtgaccaaacctggcaggaatcacagcatggcagcccttccccatctgtaatatccaaagccaccgagaaagagactttcactgatagtaaccaaagcaaaactaaaaagccaggcatttctgatgtaactgattactcagaccgtggagattcagacatggatgaagccacttactccagcagtcaggatcatcaaacaccaaaacaggaatcttcctcttcagtgaatacatccaacaagatgaattttaaaactttbtcttcatcacctcctaagcctggagatatctttgaggttgaactggctaaaaatgataacagcttggggataagtgtcacgggaggtgtgaatacgagtgtcagacatggtggcatttatgtgaaagctgttattccccagggagcagcagagtctgatggtagaattcacaaaggtgatcgcgtcctagctgtcaatggagttagtctagaaggagccacccataagcaagctgtggaaacactgagaaatacaggacaggtggttcatctgttattagaaaagggacaatctccaacatctaaagaacatgtcccggtaaccccacagtgtaccctttcagatcagaatgcccaaggtcaaggcccagaaaaagtgaagaaaacaactcaggtcaaagactacagctttgtcactgaagaaaatacatttgaggtaaaattatttaaaaatagctcaggtctaggattcagtttttctcgagaagataatcttatrccggagcaaattaatgccagcatagtaagggttaaaaagctctttcctggacagccagcagcagaaagtggaaaaattgatgtaggagatgttatcttgaaagtgaatggagcctctttgaaaggactatctcagcaggaagtcatatctgctctcaggggaactgctccagaagtattcttgcttctctgcagacctccacctggtgtgctaccggaaattgatactgcgcttttgaccccacttcagtctccagcacaagtacttccaaacagcagtaaagactcttctcagccatcatgtgtgragcaaagcaccagctcagatgaaaatgaaatgtcagacaaaagcaaaaaacagtgcaagtccccatccagaagagacagttacagtgacagcagtgggagtggagaagatgacttagtgacagctccagsaaacatatcaaattcgacctggagttcagctttgcatcagactctaagcaacatggtatcacaggcacagagtcatcatgaagcacccaagagtcaagaagataccatttgtaccatgttttactatcctcagaaaattcccaataaaccagagtttgaggacagtaatccttcccctctaccaccggatatggctcctgggcagagttatcaaccccaatcagaayctgcttcctctagttcgatggataagtatcatatacatcacatttctgaaccaactagacaagaaaactggacacctttgaaaaatgacttggaaaatcaccttgaagactttgaactggaagtagaactcctcattaccctaattaaatcaraaaaaggaagcctgggttttacagtaaccaaaggcaatcagagaattggttgttatgttcatgatgtcatacaggatccagccaaaagtgatggaaggctaaaacctggggaccggctcataaaggttaatgatacagatgttactaatatgactcatacagatgcagttaatctgctccgggctgcatccaaaacagtcagattagttattggacgagttctagaattacccagaataccaatgttgcctcatttgctaccggacataacrctaacrtgcaacaaagaggagttgggtttttccttatgtggaggtcatgacagcctttatcaagtggtatatattagtgatattaatccaaggtccgtcgcagccattgagggtaatctccagctattagatgtcatccattatgtgaacggagtcagcacacaaggaatgaccttggaggaagttaacagagcattagacatgtcacttccttcattggtattgaaagcaacaagaaatgatcttccagtggtccccagctcaaagaggtctgctgtttcagctccaaagtcaaccaaaggcaatggttcctacagtgtggggtcttgcagccagcctgccctcactcctaatgattcattctccacggttgctggggaagaaataaatgaaatatcgtaccccaaaggaaaatgttctacttatcagataaagggatcaccaaacttgactctgcccaaagaatcttatatacaagaagatgacatttatgatgattcccaagaagctgaagttatccagtctctgctggatgttgtggatgaggaagcccagaatcttttaaacgaaaataatgcagcaggakactcctgtggtccaggtacattaaagatgaatgggaagttatcagaagagagaacagaagatacagactgcgatggttcacctttacctgagtattttactgaggccaccaaaatgaatggctgtgaagaatattgtgaagaaaaagtaaaaagtgaaagcttaattcagaagccacaagaaaagaagactgatgatgatgaaataacatggggaaatgatgagttgccaatagagagaacaaaccatgaagattctgataaagatcattcctttctgacaaacgatgagctcgctgtactccctgtcgtcaaagtgcttccctctggtaaatacacgggtgccaacttaaaatcagtcattcgagtcctgcggggtttgctagatcaaggaattccttctaaggagctggagaatcttcaagaattaaaacctttggatcagtgtctaattgggcaaactaaggaaaacagaaggaagaacagatataaaaatatacttccctatgatgctacaagagtgcctcttggagatgaaggtggctatatcaatgccagcttcattaagataccagttgggaaagaagagttcgtttacattgcctgccaaggaccactgcctacaactgttggagacttctggcagatgatttgggagcaaaaatccacagtgatagccatgatgactcaagaagtagaaggagaaaaaatcaaatgccagcgctattggcccaacatcctaggcaaaacaacaatggtcagcaacagacttcgactggctcttgtgagaatgcagcagctgaagggctttgtggtgagggcaatgacccttgaagatattcagaccagagaggtgcgccatatttctcatctgaatttcactgcctggccagaccatgatayaccttctcaaccagatgatctgcttacttttatctcctacatgagacacatccacagatcaggcccaatcattacgcactgcagtgctggcattggacgttcagggaccctgatttgcatagatgtggttctgggattaatcagtcaggatcttgattttgacatctctgatttggtgcgctgcatkagactacaaagacacggaatggttcagacagaggatcaatatrttttctgctatcaagtcatcctttatgtcctgacacgtcttcaagcagaagaagagcaaaaacagcagcctcagcttctgaagtgacatgaaaagagcctctggatgcatttccatttctctccttaacctccagcagactmctgctctctatccaaaataaagatcacagagcagcaagttcatacaacatgcatgttctcctctatcttagaggggtattcttcttgaaaataaaaaatattgaaatgctgtatttttacagctactttaacctatgataattatttacaaaattttaacactaaccaaacaatgcagatcttagggatgattaaaggcagcatttgatgatagcagacattgttacaaggacatggtgagtctatttttaatgcaccaatcttgtttatagcaaaaatgttttccaatattttaataaagtagttattttataggggatacttgaaaccagtatttaagctttaaatgacagtaatattggcatagaaaaaagtagcaaatgtttactgtatcaatttctaatgtttactatatagaatttcctgtaatatatttatatactttttcatgaaaatggagttatcagttatctgtttgttactgcatcatctgtttgtaatcattatctcactttgtaaataaaaacacmccttaaaacatg

SEQ ID NO: 79 - DNA, 10041 bp, Homo sapiens
tgaataattgaactttgtttatttctccatatttttgcagtggtaattccattataaaacctaatgaaacaatgtttttatagatggtgtggaaagacttttctgggctcagaggtgaaactgacccttgtgtatcagcagcatttctgactgactgagagagtgtagtgattaacagagttgtgatgttagttaagaaacttagatttgccattgtagcttttctaccaattagcagattgtttaactcactgaaattgtaaagtggtagacgtggacttagtcattactgggcagcttatgaattgtattcatttactcatgatgtaaaaatggttagtctccacttttaaggctctagttctagtggctaaataggtacttatttatacagtatgataactgctgtattaaaatacatgtctcaaatgtggaatagtagaagaggtgaagaaaatcatagtttgaggtagaatactgtttgctggtcttaaaaactgtggtattttggtgattccataaattaggtcagatacttccactggagggaaacagttyaaaggatatatgtgatactattaatagaatgaggaagacacaccagatatttaggagggaattagcgagcttgaaactaagagctggtttgaatgagactgggtcataagtgatttcaagtaccagattaaggcactgagattttatttttaagcactgaagtcagattttttccttttaaaagaaaggattcatgatgaaatctgctttttgttttgcagagagcttggagataattctggtggctgtgtggagtatgtgttggaggtattaaattttcacagtatatataaggcagcaattgataggcctttcacagattcttctgataactacataaagagacaaaaaaaagaaaaaagagcaaagatctgtgctgtgtcaagtatgacagccatcactcatggctctccagtaggagggaacgacagccagggccaggttcttgatggccagtctcagcatctcttccaacagaaccagacttcatcacctgattcttccaatgagaattccgtagcaactcctcctccagaggaacaagggcaaggtgatgccccaccacagcatgaagatgaagagcctgcatttccacatactgagctggcaaacctggatgacatgatcaacaggcctcgatgggtggttcctgttttgccaaaaggggaattagaagtgcttttagaagctgctattgatcttagtgtaaaaggccttgatgttaaaagtgaagcatgccaacgtttttttcgagatggactaacaatatctttcactaaaattcttatggatgaggctgtgagtggctggaagtttgaaattcatagatgtattattaacaatactcatcgcctagtggagctttgtgtggccaagttgtcccaagattggtttccacttctagaacttctcgccatggccttaaatcctcactgcaagtttcatatctacaatggtacacgtccgtgtgaattaatttcctcaaatgctcagttgcctgaagatgaattatttgctygttcttcagatcctcgatcaccaaaaggttggctagtggatctcatcaataaatttggcacattaaatgggttccagattttgcatgatcgtttttttaatggatcagcattaaatattcaaataattgcagctcttattaaaccatttggacaatgctatgagtttctcagtcaacatacactgaaaaagtacttcattccagttatagaaatagttccacatttattggaaaacttaactgatgaagaactgaaaaaggaggcaaagaatgaagccaaaaatgatgccctttcaatgattattaaatctttgaagaacttagcttcaagaatttcaggacaagatgagactataaaaaatttggaaatttttaggttaaagatgatactcagattgttgcaaatttcctcttttaatggaaagatgaatgcactgaatgaaataaataaggttatatctagtgtatcatattatactcatcggcatagtaatcctgaggaggaagaatggctgacagctgagcgaatggcagaatggatacagcaaaataatatcttatccatagtcttgcaagacagtcttcatcaaccacaatatgtagaaaagctagagaaaattcttcgttttgtgattaaagaaaaggctcttacattacaggaccttgataatatctgggcagcacaggcaggaaaacatgaagccattgtgaagaatgtacatgatctgctagcaaagttggcttgggatttttstcctggacaacwtgatcatctttttgaytgctttaaggcaagttggacaaatgcaagtaaaaagcaacgtgaaaagctccttgagttgatacgccgtcttgcagaagatgataaagatggtgtgatggcacacaaagtgttgaaccttctttggaacctggctcagagtgatgatgtgcctgtagacatcatggaccttgctcttagtgcccacataaaaatactagattatagttgttcccaggatcgagatgcacagaagatccagtggatagatcactttatagaagaacttcgcacaaatgacaagtgggtaattcctgctctgaaacaaataagagaaatttgtagtttgtttggtgaagcatctcaaaatttgagtcaaactcagcgaagtccccacatattttatcgccatgatttaatcaaccagcttcaacaaaatcatgctttagttactttggtagcagaaaaccttgcaacctacatgaatagcatcagattgtatgctggagatcatgaagactatgatccacaaacagtgaggcttggaagtcgatacagtcatgttcaagaagttcaagaacgactaaacttccttagatttttactgaaggatggccaactgtggctctgtgctcctcaggcaaaacaaatatggaagtgcttagcagaaaatgcagtttatctttgtgatcgtgaagcctgttttaagtggtattccaagttaatgggggatgaaccagacttggatcctgatattaataaggacttctttgaaagtaatgtacttcagcttgatccttcccttttaactgaaaatggaatgaaatgctttgaaagatttttcaaagctgtcaattgtcgagaaaggaaactaatagcaaaaagaagatcctatatgatggatgatttggaattaattggactagactacctttggagggttgtgattcagagtagtgacgagattgctaacagagctatagatcttcttaaagagatatacacaaaccttggcccaagattaaaagccaatcaggtggttatccatgaagacttcattcagtcttgctttgatcgtttaaaagcatcatatgatacactgtgtgtttttgatggtgacaaaaacagcattaattgtgcaagacaagaagccattcgaatggttagagtattaactgttataaaagagtacattaatgaatgtgacagtgattatcacaaggaaagaatgattctmcctatgtcgagagcatttcgtggcaaacacctctctcttatagttcggtttccaaaccagggcagacaggttgatgagttggatatatggtctcatacgaatgacacaattggttcagtacggcgatgtattgttaatcgtattaaagccaatgtagcccacaaaaaaattgaactttttgtgggtggtgagctgatagattctgaagatgacagaaagctaattggacaattaaacttaaaagataaatctctaattacagccaaacttacacaaataaatttcaatatgccatcaagtcctgatagctcttccgattcctcaactgcatctcctggaaaccaccgtaatcattacaatgatggtcccaatctagaggtggaaagttgtttgcctggggtgataatgtcagtgcatcccagatacatctctttcctttggcaagttgcagacttaggtagcaacctgaatatgycacctcttagagatggagcaagagtacttatgaaacttatgccaccagatagaacagctgtagaaaaattacgarctgtttgtttggaccatgcaaaacttggagaaggcaaacttagtccaccccttgactctcttttctttggtccttctgcctcccaagttctatacctaacagaggtagtttatgccttgttaatgcctgctggtgtgcctctaactgatgggtcctctgactttcaagttcacttcttgaaaagtggtggcttacctcttgtactgagtatgctaataagaaataacttcttgccaaatacagatatggaaactcgaaggggtgcttatttaaatgctcttaaaatagccaaactgttgttaactgcgattggctatggccatgttcgagctgtagcagaagcttgtcagccagttgtagatggtacagaccccataacacagattaaccaagttactcatgatcaagcagtggtgctacaaagtgcccttcagagcattcctaatccctcatccgartgcgtacttagaaatgagtccatacttcttgctcaggaaatatctaatgaggcttcaagatatatgcctgatatttgtgtaattagggctatacagaaaattatctgggcatcagcatgtggggcattaggactagtttttagcccaaatgaagaaataactaaaatttatcagatgaccaccaatggaagcaataagctggaggtggaagatgaacaagtttgctgtgaagcactggaagtgatgaccttatgttttgctttacttccaacagcgttggatgcacttagtaaagaaaaagcctggcagaccttcatcattgacttattattgcactgtccaagcaaaactgttcgtcagttggcacaggagcagttctttttaatgtgcaccagatgttgcatgggacacaggcctctgcttttcttcattactttactctttaccatactggggagcacagcaagagagaagggtaaatattcaggtgattatttcacacttttacggcaccttctcaattatgcttacaatggcaatattaacatacccaatgctgaagttcttcttgtcagtgaaattgattggctcaaaaggattagggataatgttaaaaacacaggtgaaacaggtgtcgaagagccaatactggaaggccaccttggggtaacaaaagagttattggcctttcaaacttctgagaaaaagtatcactttggttgtgaaaaaggaggtgctaatctcattaaagaattaattgatgatttcatctttcccgcatccaaagtttacctgcagtatttaagaagtggagaactaccagctgagcaggctattccagtctgtagttcaccygttaccatcaatgccggttttgagctacttgtagcattagctattggctgtgtgaggaatctcaaacagatagtagactgtttgactgaaatgtattacatgggcacagcaattactacttgtgaagcacttactgagtgggaatatctgccccctgttggaccccgcccaccaaaaggatttgtgggactcaaaaatgctggtgctacgtgttacatgaactctgtgatccagcagctatacatgattccttctatcaggaacagtattcttgcaattgaaggcacaggtagtgatttacacgatgatatgttcggggatgagaagcaggacagtgagagtaatgttgatccccgagatgatgtatttggatatcctcatcaatttgaagacaagccagcattaagtaagacagaagataggaaagagtataatattggtgtcctaagacaccttcaggtcatctttggtcatttagctgcttcccaactacaatactatgtacccagaggattttggaaacagttcaggctttggggtgaacctgttaatctccgtgaacaacatgatgccttagagttttttaattctttggtggatagtttagatgaagctttaaaakctttaggacacccggctatactaagtaaagtcctaggaggctcctttgctgatcagaagatctgccaaggctgcccacataggtatgaatgtgaagaatcttttacaactttgaatgtggatattagaaatcatcaaaatcttcttgactctttggaacagtatatcaaaggagatttattggaaggtgcaaatgcatatcattgtgaaaaatgtgataaaaaggttgacacagtaaagcgcctgctaattaaaaaattgcctcgggttcttgctatccaactcaaacgatttgactatgactgggaaagagaatgtgcaattaaattcaatgattattttgaatttcctcgagagctggatatgggaccttacacagtagcaggtgttgcaaacctggaaagggataatgtaaactcagaaaatgagttgattgaacagaaagagcagtctgacaatgaaactgcaggaggcacaaagtacagacttgtaggagtgcttgtacacagtggtcaagcaagcggtgggcattattattcttacatcattcaaaggaatggtaaagatgatcagacagatcactggtataaatttgatgatggagatgtaacagaatgcaaaatggatgatgatgaagaaatgaaaaatcagtgttttggtggagagtacatgggagaagtatttgatcacatgatgaagcgcatgtcatataggcgacagaagaggtggtggaatgcttacatacttttttatgaacaaatggatatgatagatgaagatgatgagatgataagatacatatcagagctaactattgcaagaccccatcagatcattatgtcaccagccattgagagaagtgtacggaaacaaaatgtgaaatttatgcataaccgattgcaatatagtttagagtattttcagtttgtgaaaaaactgcttacatgtaatggtgtttatttaaaccctgctccagggcaggattatttgttgcctgaagcagaagaaattactatgattagtattcagcttgctgctagattcctctttaccactggatttcacaccaagaaaatagttcgtggtcctgccagtgactggtatgatgcactgtgcgttcttctccgtcacagcaaaaatgtacgtttttggtttactcataatgtcctttttaatgtatcaaatcgcttctctgaataccttctggagtgcccyagtgcagaagtgaggggtgcatttgcaaaacttatagtgtttattgcacacttttccttgcaagatgggtcttgtccttctccttttgcatctccaggaccttctagtcaggcatgtgataacttgagcttgagtgaccacttactaagagccacactaaatctcttgagaagggaagtttcagagcatggacatcatttacagcaatattttaatttgtttgtaatgtatgccaatttaggtgtggcagaaaaaacacagcttctgaaattgaatgtacctgctacctttatgcttgtgtctttagacgaaggaccaggtcctccaatcaaatatcagtatgctgaattaggcaagttatattcagtagtgtctcagctgattcgttgttgcaatgtgtcatcaacaatgcagtcttcaatcaatggtaatccccctctccccaatcctttcggtgaccttaatttatcacagcctataatgccaattcagcagaatgtgttagacattttatttgtgagaacaagttatgtgaagaaaattattgaagactgcagtaactcagaggataccatcaaattacttcgcttttgctcttgggagaatcctcagttctcatctactgtcctcagcgaacttctctggcaggttgcatattcatatacctatgaacttcggccatatttagatctacttttccaaattttactgattgaggactcctggcagactcacagaattcataatgcacttaaaggaattccagatgacagagatgggctgttcgatacaatacagcgctcgaagaatcactatcaaaaacgagcatatcagtgcataaaatgtatggtagctctatttagcagttgtcctgttgcttaccagatcttacagggtaacggagatcttaaaagaaaatggacctgggcagtggaatggctaggagatgaacttgaaagaagaccatatactggcaatcctcagtatagttacaacaattggtctcctccagtacaaagcaatgaaacagcaaatggttatttcttagaaagatcacatagtgctaggatgacacttgcaaaagcttgtgaactctgtccagaagaggagccagatgaccaggatgccccagatgagcatgagccctctccatcagaagatgccccattatatcctcattcacctgcctctcagtatcaacagaataatcatgtacatggacagccatatacaggaccagcagcacatcacttgaacaaccctcagaaaacaggccaacgaacacaagaaaattatgaaggcaatgaagaagtatcctcacctcagatgaaggatcagtgaaaagcaataattaactgcttcctttatgactatgcactaaggtcttatagtccaaactttctctgtgtctggctagtattgaaaactagataaactgctccaaaccaacatggagtaaagagcatattcactggtttatttgcagtaatttgcaatttgtcagtgtataagacacatgcagggtgaagtgtacagagttttgtaacaaatgactggtcctaatctgtaaatgagaaaggtatatatactatgttaatgtctgactgttaattcttaagcaagaaactttttttgatgaaaacaagtcagatctacacagtcacacaattattttttgttgtgttcactacattgtgcaattgatattgcctgctttgagcagtttggtcaacttaccaacttccccccaaaaaagggaacataaaagagcccatctttgtcagtttacaccaatagtttcttgttaatccttctttcctggatatataaggctggtggtaacttttgaattatatggttgatgtggaaaattggcagtgtaacatttctagatacttttcattacctttttattctggtatataggctaaccactttaaagctattcttatgctgtaacagttagcatggcttcacactgtttgtgtagccaagaggacagaattacatgaatgacagtgcccagagtgacagctgtatattgctcagagcttttatttcttatacctagaataaatataaaatgggggaaaaatgtgacagacaagcagtttttcattgcacacatattcttcacatttaatgtttgatagttcaatttcttgagctgaagaatatcaaagtatcgataatacgaattttaaaatattaaaaccaatacacaaaattttcctatgtcagaatgtggtggagcataatagattgtatttggtgtgcttgcgattttttttttccatagaatttattaagtgaagtttctaaaactttgcttctcctgatcccggtgaagtgtacatcataagaatccatagtactttgaagtaccattgcaccaagatgtctgactgaattcatagtcacacttttatttgaaagaaagaattgttgtagttttttttcattattctaaaactcttgttgttagatacaagatttaattaagatctaagctcctgcttatttaatgtaattctaaggtaccattttagaaaaaacatttgttttaagattccaagaaacctgtgagttaatactatatttaaaagagaattggtaaattttgaatgtgtgtaatattttggaacctgtttaaaaaccaaatatacctgcaaatagatacagcctatcctatactatttaaatgtttggctgttttgttttatagaaattattttgctgaattcacaaataaaatttaagaagactttt

SEQ ID NO: 80 - DNA, 9556 bp, Homo sapiens
tgaataattgaactttgtttatttctccatatttttgcagtggtaattccattataaaacctaatgaaacaatgtttttatagatggtgtggaaagacttttctgggctcagaggtgaaactgacccttgtgtatcagcagcatttctgactgactgagagagtgtagtgattaacagagttgtgatgttagttaagaaacttagatttgccattgtagcttttctaccaattagcagattgtttaactcactgaaattgtaaagtggtagacgtggacttagtcattactgggcagcttatgaattgtattcatttactcatgatgtaaaaatggttagtctccacttttaaggctctagttctagtggctaaataggtacttatttatacagtatgataactgctgtattaaaatacatgtctcaaatgtggaatagtagaagaggtgaagaaaatcatagtttgaggtagaatactgtttgctggtcttaaaaactgtggtattttggtgattccataaattaggtcagatacttccactggagggaaacagttyaaaggatatatgtgatactattaatagaatgaggaagacacaccagatatttaggagggaattagcgagcttgaaactaagagctggtttgaatgagactgggtcataagtgatttcaagtaccagattaaggcactgagattttatttttaagcactgaagtcagattttttccttttaaaagaaaggattcatgatgaaatctgctttttgttttgcagagagcttggagataattctggtggctgtgtggagtatgtgttggaggtattaaattttcacagtatatataaggcagcaattgataggcctttcacagattcttctgataactacataaagagacaaaaaaaagaaaaaagagcaaagatctgtgctgtgtcaagtatgacagccatcactcatggctctccagtaggagggaacgacagccagggccaggttcttgatggccagtctcagcatctcttccaacagaaccagacttcatcacctgattcttccaatgagaattccgtagcaactcctcctccagaggaacaagggcaaggtgatgccccaccacagcatgaagatgaagagcctgcatttccacatactgagctggcaaacctggatgacatgatcaacaggcctcgatgggtggttcctgttttgccaaaaggggaattagaagtgcttttagaagctgctattgatcttagtgtaaaaggccttgatgttaaaagtgaagcatgccaacgtttttttcgagatggactaacaatatctttcactaaaattcttatggatgaggctgtgagtggctggaagtttgaaattcatagatgtattattaacaatactcatcgcctagtggagctttgtgtggccaagttgtcccaagattggtttccacttctagaacttctcgccatggccttaaatcctcactgcaagtttcatatctacaatggtacacgtccgtgtgaattaatttcctcaaatgctcagttgcctgaagatgaattatttgctygttcttcagatcctcgatcaccaaaaggttggctagtggatctcatcaataaatttggcacattaaatgggttccagattttgcatgatcgtttttttaatggatcagcattaaatattcaaataattgcagctcttattaaaccatttggacaatgctatgagtttctcagtcaacatacactgaaaaagtacttcattccagttatagaaatagttccacatttattggaaaacttaactgatgaagaactgaaaaaggaggcaaagaatgaagccaaaaatgatgccctttcaatgattattaaatctttgaagaacttagcttcaagaatttcaggacaagatgagactataaaaaatttggaaatttttaggttaaagatgatactcagattgttgcaaatttcctcttttaatggaaagatgaatgcactgaatgaaataaataaggttatatctagtgtatcatattatactcatcggcatagtaatcctgaggaggaagaatggctgacagctgagcgaatggcagaatggatacagcaaaataatatcttatccatagtcttgcaagacagtcttcatcaaccacaatatgtagaaaagctagagaaaattcttcgttttgtgattaaagaaaaggctcttacattacaggaccttgataatatctgggcagcacaggcaggaaaacatgaagccattgtgaagaatgtacatgatctgctagcaaagttggcttgggatttttstcctggacaacwtgatcatctttttgaytgctttaaggcaagttggacaaatgcaagtaaaaagcaacgtgaaaagctccttgagttgatacgccgtcttgcagaagatgataaagatggtgtgatggcacacaaagtgttgaaccttctttggaacctggctcagagtgatgatgtgcctgtagacatcatggaccttgctcttagtgcccacataaaaatactagattatagttgttcccaggatcgagatgcacagaagatccagtggatagatcactttatagaagaacttcgcacaaatgacaagtgggtaattcctgctctgaaacaaataagagaaatttgtagtttgtttggtgaagcatctcaaaatttgagtcaaactcagcgaagtccccacatattttatcgccatgatttaatcaaccagcttcaacaaaatcatgctttagttactttggtagcagaaaaccttgcaacctacatgaatagcatcagattgtatgctggagatcatgaagactatgatccacaaacagtgaggcttggaagtcgatacagtcatgttcaagaagttcaagaacgactaaacttccttagatttttactgaaggatggccaactgtggctctgtgctcctcaggcaaaacaaatatggaagtgcttagcagaaaatgcagtttatctttgtgatcgtgaagcctgttttaagtggtattccaagttaatgggggatgaaccagacttggatcctgatattaataaggacttctttgaaagtaatgtacttcagcttgatccttcccttttaactgaaaatggaatgaaatgctttgaaagatttttcaaagctgtcaattgtcgagaaaggaaactaatagcaaaaagaagatcctatatgatggatgatttggaattaattggactagactacctttggagggttgtgattcagagtagtgacgagattgctaacagagctatagatcttcttaaagagatatacacaaaccttggcccaagattaaaagccaatcaggtggttatccatgaagacttcattcagtcttgctttgatcgtttaaaagcatcatatgatacactgtgtgtttttgatggtgacaaaaacagcattaattgtgcaagacaagaagccattcgaatgggcagacaggttgatgagttggatatatggtctcatacgaatgacacaattggttcagtacggcgatgtattgttaatcgtattaaagccaatgtagcccacaaaaaaattgaactttttgtgggtggtgagctgatagattctgaagatgacagaaagctaattggacaattaaacttaaaagataaatctctaattacagccaaacttacacaaataaatttcaatatgccatcaagtcctgatagctcttccgattcctcaactgcatctcctggaaaccaccgtaatcattacaatgatggtcccaatctagaggtggaaagttgtttgcctggggtgataatgtcagtgcatcccagatacatctctttcctttggcaagttgcagacttaggtagcaacctgaatatgycacctcttagagatggagcaagagtacttatgaaacttatgccaccagatagaacagctgtagaaaaattacgarctgtttgtttggaccatgcaaaacttggagaaggcaaacttagtccaccccttgactctcttttctttggtccttctgcctcccaagttctatacctaacagaggtagtttatgccttgttaatgcctgctggtgtgcctctaactgatgggtcctctgactttcaagttcacttcttgaaaagtggtggcttacctcttgtactgagtatgctaataagaaataacttcttgccaaatacagatatggaaactcgaaggggtgcttatttaaatgctcttaaaatagccaaactgttgttaactgcgattggctatggccatgttcgagctgtagcagaagcttgtcagccagttgtagatggtacagaccccataacacagattaaccaagttactcatgatcaagcagtggtgctacaaagtgcccttcagagcattcctaatccctcatccgartgcgtacttagaaatgagtccatacttcttgctcaggaaatatctaatgaggcttcaagatatatgcctgatatttgtgtaattagggctatacagaaaattatctgggcatcagcatgtggggcattaggactagtttttagcccaaatgaagaaataactaaaatttatcagatgaccaccaatggaagcaataagctggaggtggaagatgaacaagtttgctgtgaagcactggaagtgatgaccttatgttttgctttacttccaacagcgttggatgcacttagtaaagaaaaagcctggcagaccttcatcattgacttattattgcactgtccaagcaaaactgttcgtcagttggcacaggagcagttctttttaatgtgcaccagatgttgcatgggacacaggcctctgcttttcttcattactttactctttaccatactggggagcacagcaagagagaagggtaaatattcaggtgattatttcacacttttacggcaccttctcaattatgcttacaatggcaatattaacatacccaatgctgaagttcttcttgtcagtgaaattgattggctcaaaaggattagggataatgttaaaaacacaggtgaaacaggtgtcgaagagccaatactggaaggccaccttggggtaacaaaagagttattggcctttcaaacttctgagaaaaagtatcactttggttgtgaaaaaggaggtgctaatctcattaaagaattaattgatgatttcatctttcccgcatccaaagtttacctgcagtatttaagaagtggagaactaccagctgagcaggctattccagtctgtagttcaccygttaccatcaatgccggttttgagctacttgtagcattagctattggctgtgtgaggaatctcaaacagatagtagactgtttgactgaaatgtattacatgggcacagcaattactacttgtgaagcacttactgagtgggaatatctgccccctgttggaccccgcccaccaaaaggatttgtgggactcaaaaatgctggtgctacgtgttacatgaactctgtgatccagcagctatacatgattccttctatcaggaacagtattcttgcaattgaaggcacaggtagtgatttacacgatgatatgttcggggatgagaagcaggacataatgttgatccccgagatgatgtatttggatatcctcatcaatttgaagacaagccagcattaagtaagacagaagataggaaagagtataatattggtgtcctaagacaccttcaggtcatctttggtcatttagctgcttcccaactacaatactatgtacccagaggattttggaaacagttcaggctttggggtgaacctgttaatctccgtgaacaacatgatgccttagagttttttaattctttggtggatagtttagatgaagctttaaaakctttaggacacccggctatactaagtaaagtcctaggaggctcctttgctgatcagaagatctgccaaggctgcccacataggtatgaatgtgaagaatcttttacaactttgaatgtggatattagaaatcatcaaaatcttcttgactctttggaacagtatatcaaaggagatttattggaaggtgcaaatgcatatcattgtgaaaaatgtgataaaaaggttgacacagtaaagcgcctgctaattaaaaaattgcctcgggttcttgctatccaactcaaacgatttgactatgactgggaaagagaatgtgcaattaaattcaatgattattttgaatttcctcgagagctggatatgggaccttacacagtagcaggtgttgcaaacctggaaagggataatgtaaactcagaaaatgagttgattgaacagaaagagcagtctgacaatgaaactgcaggaggcacaaagtacagacttgtaggagtgcttgtacacagtggtcaagcaagcggtgggcattattattcttacatcattcaaaggaatggtaaagatgatcagacagatcactggtataaatttgatgatggagatgtaacagaatgcaaaatggatgatgatgaagaaatgaaaaatcagtgttttggtggagagtacatgggagaagtatttgatcacatgatgaagcgcatgtcatataggcgacagaagaggtggtggaatgcttacatacttttttatgaacaaatggatatgatagatgaagatgatgagatgataagatacatatcagagctaactattgcaagaccccatcagatcattatgtcaccagccattgagagaagtgtacggaaacaaaatgtgaaatttatgcataaccgattgcaatatagtttagagtattttcagtttgtgaaaaaactgcttacatgtaatggtgtttatttaaaccctgctccagggcaggattatttgttgcctgaagcagaagaaattactatgattagtattcagcttgctgctagattcctctttaccactggatttcacaccaagaaaatagttcgtggtcctgccagtgactgcaaaaatgtacgtttttggtttactcataatgtcctttttaatgtatcaaatcgcttctctgaataccttctggagtgcccyagtgcagaagtgaggggtgcatttgcaaaacttatagtgtttattgcacacttttccttgcaagatgggtcttgtccttctccttttgcatctccaggaccttctagtcaggcatgtgataacttgagcttgagtgaccacttactaagagccacactaaatctcttgagaagggaagtttcagagcatggacatcatttacagcaatattttaatttgtttgtaatgtatgccaatttaggtgtggcagaaaaaacacagcttctgaaattgaatgtacctgctacctttatgcttgtgtctttagacgaaggaccaggtcctccaatcaaatatcagtatgctgaattaggcaagttatattcagtagtgtctcagctgattcgttgttgcaatgtgtcatcaacaatgcagtcttcaatcaatgaattcataatgcacttaaaggaattccagatgacagagatgggctgttcgatacaatacagcgctcgaagaatcactatcaaaaacgagcatatcagtgcataaaatgtatggtagctctatttagcagttgtcctgttgcttaccagatcttacagggtaacggagatcttaaaagaaaatggacctgggcagtggaatggctaggagatgaacttgaaagaagaccatatactggcaatcctcagtatagttacaacaattggtctcctccagtacaaagcaatgaaacagcaaatggttatttcttagaaagatcacatagtgctaggatgacacttgcaaaagcttgtgaactctgtccagaagaggagccagatgaccaggatgccccagatgagcatgagccctctccatcagaagatgccccattatatcctcattcacctgcctctcagtatcaacagaataatcatgtacatggacagccatatacaggaccagcagcacatcacttgaacaaccctcagaaaacaggccaacgaacacaagaaaattatgaaggcaatgaagaagtatcctcacctcagatgaaggatcagtgaaaagcaataattaactgcttcctttatgactatgcactaaggtcttatagtccaaactttctctgtgtctggctagtattgaaaactagataaactgctccaaaccaacatggagtaaagagcatattcactggtttatttgcagtaatttgcaatttgtcagtgtataagacacatgcagggtgaagtgtacagagttttgtaacaaatgactggtcctaatctgtaaatgagaaaggtatatatactatgttaatgtctgactgttaattcttaagcaagaaactttttttgatgaaaacaagtcagatctacacagtcacacaattattttttgttgtgttcactacattgtgcaattgatattgcctgctttgagcagtttggtcaacttaccaacttccccccaaaaaagggaacataaaagagcccatctttgtcagtttacaccaatagtttcttgttaatccttctttcctggatatataaggctggtggtaacttttgaattatatggttgatgtggaaaattggcagtgtaacatttctagatacttttcattacctttttattctggtatataggctaaccactttaaagctattcttatgctgtaacagttagcatggcttcacactgtttgtgtagccaagaggacagaattacatgaatgacagtgcccagagtgacagctgtatattgctcagagcttttatttcttatacctagaataaatataaaatgggggaaaaatgtgacagacaagcagtttttcattgcacacatattcttcacatttaatgtttgatagttcaatttcttgagctgaagaatatcaaagtatcgataatacgaattttaaaatattaaaaccaatacacaaaattttcctatgtcagaatgtggtggagcataatagattgtatttggtgtgcttgcgattttttttttccatagaatttattaagtgaagtttctaaaactttgcttctcctgatcccggtgaagtgtacatcataagaatccatagtactttgaagtaccattgcaccaagatgtctgactgaattcatagtcacacttttatttgaaagaaagaattgttgtagttttttttcattattctaaaactcttgttgttagatacaagatttaattaagatctaagctcctgcttatttaatgtaattctaaggtaccattttagaaaaaacatttgttttaagattccaagaaacctgtgagttaatactatatttaaaagagaattggtaaattttgaatgtgtgtaatattttggaacctgtttaaaaaccaaatatacctgcaaatagatacagcctatcctatactatttaaatgtttggctgttttgttttatagaaattattttgctgaattcacaaataaaatttaagaagactttt

SEQ ID NO: 81 - DNA, 3789 bp, Homo sapiens
aaccccacaaaaattagctgggcttggtggcacacacctgtggtcccagctacctgggaggctgagcgacaccctgtctgtttctttccttttctctctctctctagctctggatcgtacaagaagggagacaaggaccactgacaagatatgtgtttcaggcggctcaaacaccacacgctcccgactacggcggaatggagagaatgtgcgcatgctcggcgggaatctgcgcatgctcggmgggaatctgcgcatgctcggagagaatctgcgcawgctcggcsggaatctgcgcgagctcggcgggaatctgcgcaagctcggcgggaatctgcgcatgctcagagttccggggcacggtttccccgcccctttcaggcctagcaggaaacgaagcggctctttccgctatctgccgcttgtccaccggaagcgagttrcgacacggcaggttcccgcccggaagaagcgaccaaagcgcctgaggaccggcaacatggtgcggtcggggaataaggcagctgttgtgctgtgtatggacgtgggctttaccatgagtaactccattcctggtatagaatccccatttgaacaagcaaagaaggtgataaccatgtttgtacagcgacaggtgtttgctgagaacaaggatgagattgctttagtcctgtttggtacagatggcactgacaatcccctttctggtggggatcagtatcagaacatcacagtgcacagacatctgatgctaccagattttgatttgctggaggacattgaaagcaaaatccaaccaggttctcaacaggctgacttcctggatgcactaatcgtgagcatggatgtgattcaacatgaaacaataggaaagaagtttgagaagaggcatattgaaatattcactgacctcagcagccgattcagcaaaagtcagctggatattataattcatagcttgaagaaatgtgacatctccctgcaattcttcttgcctttctcacttggcaaggaagatggaagtggggacagaggagatggcccctttcgcttaggtggccatgggccttcctttccactaaaaggaattaccgaacagcaaaaagaaggtcttgagatagtgaaaatggtgatgatatctttagaaggtgaagatgggttggatgaaatttattcattcagtgagagtctgagaaaactgtgcgtcttcaagaaaattgagaggcattccattcactggccctgccgactgaccattggctccaatttgtctataaggattgcagcctataaatcgattctacaggagagagttaaaaagacttggacagttgtggatgcaaaaaccctaaaaaaagaagatatacaaaaagaaacagtttattgcttaaatgatgatgatgaaactgaagttttaaaagaggatattattcaagggttccgctatggaagtgatatagttcctttctctaaagtggatgaggaacaaatgaaatataaatcggaggggaagtgcttctctgttttgggattttgtaaatcttctcaggttcagagaagattcttcatgggaaatcaagttctaaaggtctttgcagcaagagatgatgaggcagctgcagttgcactttcctccctgattcatgctttggatgacttagacatggtggccatagttcgatatgcttatgacaaaagagctaatcctcaagtcggcgtggcttttcctcatatcaagcataactatgagtgtttagtgtatgtgcagctgcctttcatggaagacttgcggcaatacatgttttcatccttgaaaaacagtaagaaatatgctcccaccgaggcacagttgaatgctgttgatgctttgattgactccatgagcttsgcaaagaaagatgagaagacagacacccttgaagacttgtttccaaccaccaaaatcccaaatcctcgatttcagagattatttcagtgtctgctgcacagagctttacatccccgggagcctctacccccarttcagcagcatatttggaatatgctgaatcctcccgctgaggtgacaacraaaagtcagattcctctctctaaaataaagaccctttttcctctgattgaagccaagaaaaaggatcaagtgactkctcaggaaattttccaagacaaccatgaagatggacctacagctaaaaaattaaagactgagcaagggggagcccacttcagcgtctccagtctggctgaaggcagtgtcacctctgttggaagtgtgaatcctgctgaaaacttccgtgttctagtgaaacagaagaaggccagctttgaggaagcgagtaaccagctcataaatcacatcgaacagtttttggatactaatgaaacaccgtattttatgaagagcatagactgcatccgagccttccgggaagaagccattaagttttcagaagagcagcgctttaacaacttcctgaaagcccttcaagagaaagtggaaattaaacaattaaatcatttctgggaaattgttgtccaggatggaattactctgatcaccaaagaggaagcctctggaagttctgtcacagctgaggaagccaaaaagtttctggcccccaaagacaaaccaagtggagacacagcagctgtatttgaagaaggtggtgatgtggacgatttattggacatgatataggtcgtggatgtatggggaatctaagagagctgccatcgctgtgatgctgggagttctaacaaaacaagttggatgcggccattcaaggggagccaaaatctcaagaaattcccagcaggttacctgraggcggatcatctaattctctgtggaatgaatacacacatatatattacaagggataatttagaccccatacaagtttataaagagtcattgttawtttctggttggtgtattattttttctgtggtcttactgatctttgtatattacatacatgctttgaagtttctggaaagtagatcttttcttgacctagyatatcagtgacagttgcagcccttgtgatgtgattagtgtctcatgtggaaccatggcatggttattgatgagtttcttaaccctttccagagtcctcctttgcctgatcctccaacagctgtcacarcttgtgttgagcaagcagtagcatttgcttcctcccaacaagcagctgggttaggaaaaccatgggtaaggacggactcacttctctttttagttgaggccttctagttaccacattactctgcctctgtatataggtggttttctttaagtggggtgggaaggggagcacaatttcccttcatactccttwtaagcagtgagttatggtggtggtctcatgaagaaaagaccttttggcccaatctctgccatatcagtgaacctttagaaactmaaaaactgagaaatttactacagtagttagaattatatcacttcactgttctctacttgcaagcctcaaagagagaaagtttcgttatattaaaacacttaggtaacttttcgrtctttcccatttctacctaagtcagctttcatctttgtggatggtgtctcctttactaaataagaaaataacaaagcccttawtctctttttttcttgtcctcattcttgccttgagttccagttcctctttggtgtacagacttcttggtacccagtcacctctgtcttcagcaccctcataagtcgtsactaatacacagttttgtacatgtaacattaaaggcataaatgactcatctctctgtgaa

SEQ ID NO: 82 - DNA, 3636 bp, Homo sapiens
tgtttcaggcggctcaaacaccacacgctcccgactacggcggaatggagagaatgtgcgcatgctcggcgggaatctgcgcatgctcggmgggaatctgcgcatgctcggagagaatctgcgcawgctcggcsggaatctgcgcgagctcggcgggaatctgcgcaagctcggcgggaatctgcgcatgctcagagttccggggcacggtttccccgcccctttcaggcctagcaggaaacgaagcggctctttccgctatctgccgcttgtccaccggaagcgagttrcgacacggcaggttcccgcccggaagaagcgaccaaagcgcctgaggaccggcaacatggtgcggtcggggaataaggcagctgttgtgctgtgtatggacgtgggctttaccatgagtaactccattcctggtatagaatccccatttgaacaagcaaagaaggtgataaccatgtttgtacagcgacaggtgtttgctgagaacaaggatgagattgctttagtcctgtttggtacagatggcactgacaatcccctttctggtggggatcagtatcagaacatcacagtgcacagacatctgatgctaccagattttgatttgctggaggacattgaaagcaaaatccaaccaggttctcaacaggctgacttcctggatgcactaatcgtgagcatggatgtgattcaacatgaaacaataggaaagaagtttgagaagaggcatattgaaatattcactgacctcagcagccgattcagcaaaagtcagctggatattataattcatagcttgaagaaatgtgacatctccctgcaattcttcttgcctttctcacttggcaaggaagatggaagtggggacagaggagatggcccctttcgcttaggtggccatgggccttcctttccactaaaaggaattaccgaacagcaaaaagaaggtcttgagatagtgaaaatggtgatgatatctttagaaggtgaagatgggttggatgaaatttattcattcagtgagagtctgagaaaactgtgcgtcttcaagaaaattgagaggcattccattcactggccctgccgactgaccattggctccaatttgtctataaggattgcagcctataaatcgattctacaggagagagttaaaaagacttggacagttgtggatgcaaaaaccctaaaaaaagaagatatacaaaaagaaacagtttattgcttaaatgatgatgatgaaactgaagttttaaaagaggatattattcaagggttccgctatggaagtgatatagttcctttctctaaagtggatgaggaacaaatgaaatataaatcggaggggaagtgcttctctgttttgggattttgtaaatcttctcaggttcagagaagattcttcatgggaaatcaagttctaaaggtctttgcagcaagagatgatgaggcagctgcagttgcactttcctccctgattcatgctttggatgacttagacatggtggccatagttcgatatgcttatgacaaaagagctaatcctcaagtcggcgtggcttttcctcatatcaagcataactatgagtgtttagtgtatgtgcagctgcctttcatggaagacttgcggcaatacatgttttcatccttgaaaaacagtaagaaatatgctcccaccgaggcacagttgaatgctgttgatgctttgattgactccatgagcttsgcaaagaaagatgagaagacagacacccttgaagacttgtttccaaccaccaaaatcccaaatcctcgatttcagagattatttcagtgtctgctgcacagagctttacatccccgggagcctctacccccarttcagcagcatatttggaatatgctgaatcctcccgctgaggtgacaacraaaagtcagattcctctctctaaaataaagaccctttttcctctgattgaagccaagaaaaaggatcaagtgactkctcaggaaattttccaagacaaccatgaagatggacctacagctaaaaaattaaagactgagcaagggggagcccacttcagcgtctccagtctggctgaaggcagtgtcacctctgttggaagtgtgaatcctgctgaaaacttccgtgttctagtgaaacagaagaaggccagctttgaggaagcgagtaaccagctcataaatcacatcgaacagtttttggatactaatgaaacaccgtattttatgaagagcatagactgcatccgagccttccgggaagaagccattaagttttcagaagagcagcgctttaacaacttcctgaaagcccttcaagagaaagtggaaattaaacaattaaatcatttctgggaaattgttgtccaggatggaattactctgatcaccaaagaggaagcctctggaagttctgtcacagctgaggaagccaaaaagtttctggcccccaaagacaaaccaagtggagacacagcagctgtatttgaagaaggtggtgatgtggacgatttattggacatgatataggtcgtggatgtatggggaatctaagagagctgccatcgctgtgatgctgggagttctaacaaaacaagttggatgcggccattcaaggggagccaaaatctcaagaaattcccagcaggttacctgraggcggatcatctaattctctgtggaatgaatacacacatatatattacaagggataatttagaccccatacaagtttataaagagtcattgttawtttctggttggtgtattattttttctgtggtcttactgatctttgtatattacatacatgctttgaagtttctggaaagtagatcttttcttgacctagyatatcagtgacagttgcagcccttgtgatgtgattagtgtctcatgtggaaccatggcatggttattgatgagtttcttaaccctttccagagtcctcctttgcctgatcctccaacagctgtcacarcttgtgttgagcaagcagtagcatttgcttcctcccaacaagcagctgggttaggaaaaccatgggtaaggacggactcacttctctttttagttgaggccttctagttaccacattactctgcctctgtatataggtggttttctttaagtggggtgggaaggggagcacaatttcccttcatactccttwtaagcagtgagttatggtggtggtctcatgaagaaaagaccttttggcccaatctctgccatatcagtgaacctttagaaactmaaaaactgagaaatttactacagtagttagaattatatcacttcactgttctctacttgcaagcctcaaagagagaaagtttcgttatattaaaacacttaggtaacttttcgrtctttcccatttctacctaagtcagctttcatctttgtggatggtgtctcctttactaaataagaaaataacaaagcccttawtctctttttttcttgtcctcattcttgccttgagttccagttcctctttggtgtacagacttcttggtacccagtcacctctgtcttcagcaccctcataagtcgtsactaatacacagttttgtacatgtaacattaaaggcataaatgactcatctctctgtgaa

SEQ ID NO: 83 - DNA, 2975 bp, Homo sapiens
ggggcacggtttccccgcccctttcaggcctagcaggaaacgaagcggctctttccgctatctgccgcttgtccaccggaagcgagttrcgacacggcaggttcccgcccggaagaagcgaccaaagcgcctgaggaccggcaacatggtgcggtcggggaataaggcagctgttgtgctgtgtatggacgtgggctttaccatgagtaactccattcctggtatagaatccccatttgaacaagcaaagaaggtgataaccatgtttgtacagcgacaggtgtttgctgagaacaaggatgagattgctttagtcctgtttggtacagatggcactgacaatcccctttctggtggggatcagtatcagaacatcacagtgcacagacatctgatgctaccagattttgatttgctggaggacattgaaagcaaaatccaaccaggttctcaacaggctgacttcctggatgcactaatcgtgagcatggatgtgattcaacatgaaacaataggaaagaagtttgagaagaggcatattgaaatattcactgacctcagcagccgattcagcaaaagtcagctggatattataattcatagcttgaagaaatgtgacatctccctgcaattcttcttgcctttctcacttggcaaggaagatggaagtggggacagaggagatggcccctttcgcttaggtggccatgggccttcctttccactaaaaggaattaccgaacagcaaaaagaaggtcttgagatagtgaaaatggtgatgatatctttagaaggtgaagatgggttggatgaaatttattcattcagtgagagtctgagaaaactgtgcgtcttcaagaaaattgagaggcattccattcactggccctgccgactgaccattggctccaatttgtctataaggattgcagcctataaatcgattctacaggagagagttaaaaagacttggacagttgtggatgcaaaaaccctaaaaaaagaagatatacaaaaagaaacagtttattgcttaaatgatgatgatgaaactgaagttttaaaagaggatattattcaagggttccgctatggaagtgatatagttcctttctctaaagtggatgaggaacaaatgaaatataaatcggaggggaagtgcttctctgttttgggattttgtaaatcttctcaggttcagagaagattcttcatgggaaatcaagttctaaaggtctttgcagcaagagatgatgaggcagctgcagttgcactttcctccctgattcatgctttggatgacttagacatggtggccatagttcgatatgcttatgacaaaagagctaatcctcaagtcggcgtggcttttcctcatatcaagcataactatgagtgtttagtgtatgtgcagctgcctttcatggaagacttgcggcaatacatgttttcatccttgaaaaacagtaagaaatatgctcccaccgaggcacagttgaatgctgttgatgctttgattgactccatgagcttsgcaaagaaagatgagaagacagacacccttgaagacttgtttccaaccaccaaaatcccaaatcctcgatttcagagattatttcagtgtctgctgcacagagctttacatccccgggagcctctacccccarttcagcagcatatttggaatatgctgaatcctcccgctgaggtgacaacraaaagtcagattcctctctctaaaataaagaccctttttcctctgattgaagccaagaaaaaggatcaagtgactkctcaggaaattttccaagacaaccatgaagatggacctacagctaaaaaattaaagactgagcaagggggagcccacttcagcgtctccagtctggctgaaggcagtgtcacctctgttggaagtgtgaatcctgctgaaaacttccgtgttctagtgaaacagaagaaggccagctttgaggaagcgagtaaccagctcataaatcacatcgaacagtttttggatactaatgaaacaccgtattttatgaagagcatagactgcatccgagccttccgggaagaagccattaagttttcagaagagcagcgctttaacaacttcctgaaagcccttcaagagaaagtggaaattaaacaattaaatcatttctgggaaattgttgtccaggatggaattactctgatcaccaaagaggaagcctctggaagttctgtcacagctgaggaagccaaaaagtttctggcccccaaagacaaaccaagtggagacacagcagctgtatttgaagaaggtggtgatgtggacgatttattggacatgatataggtcgtggatgtatggggaatctaagagagctgccatcgctgtgatgctgggagttctaacaaaacaagttggatgcggccattcaaggggagccaaaatctcaagaaattcccagcaggttacctgraggcggatcatctaattctctgtggaatgaatacacacatatatattacaagggataatttagaccccatacaagtttataaagagtcattgttawtttctggttggtgtattattttttctgtggtcttactgatctttgtatattacatacatgctttgaagtttctggaaagtagatcttttcttgacctagyatatcagtgacagttgcagcccttgtgatgtgattagtgtctcatgtggaaccatggcatggttattgatgagtttcttaaccctttccagagtcctcctttgcctgatcctccaacagctgtcacarcttgtgttgagcaagcagtagcatttgcttcctcccaacaagcagctgggttaggaaaaccatggttcctctttggtgtacagacttcttggtacccagtcacctctgtcttcagcaccctcataagtcgtsactaatacacagttttgtacatgtaacattaaaggcataaatgactca

SEQ ID NO: 84 - DNA, 2417 bp, Homo sapiens
  misc_feature (1)...(2417): n = A,T,C or G
ggcccagcacgcggccgctctggcccagggaagtccctgtccttaccttcagcaggagccggttccctgtgtgtgtgtccgctcgccctctgctccgtcctgcggctgcccactgccctcctacggtccaccatgnccctgctgcactccggccgcgtcctccccgggatcgccgccgccttccacccgggcctcgccgccgcggcctctgccagagccagctcctggtggacccatgtggaaatgggacctccagatcccattctgggagtcactgaagcctttaagagggacaccaatagcaaaaagatgaatctgggagttggtgcctaccgggatgataayggaaagccttacgtkctgcctagcgtccgcaaggcagaggcccagattgccgcaaaaaatttggacaaggaatacctgcccattgggggactggctgaattttgcaaggcatctgcagaactagccctgggtgagaacagcgaagtcttgaagagtggccggtttgtcactgtgcagaccatttctggaactggagccttaaggatcggagccagttttctgcaaagattttttaagttcagccgagatgtctttctgcccaaaccaacctggggaaaccacacacccatcttcagggatgctggcatgcagctacaaggttatcggtattatgaccccaagacttgcngttttgacttcacaggcgctgtggaggatatttcaaaaataccagagcagagtgttcttcttctgcatgcctgcgcccacaatcccacgggagtggacccgcgtccggaacagtggaaggaaatagcaacagtggtgaagaaaaggaatctctttgcgttctttgacatggcctaccaaggctttgccagtggtgatggtgataaggatgcctgggctgtgcgccacttcatcgaacagggcattaatgtttgtctctgccaatcatatgccaagaacatgggcttatatggtgagcgtgtaggagccttcactatggtctgcaaagatgcggatgaagccaaaagggtagagtcacagttgaagatcttgatccgtcccatgtattccaaccctcccctcaatggggcccggattgctgctgccattctgaacaccccagatttgcgaaaacaatggctgcaagaagtgaaagkcatggctgaccgcatcattggcatgcggaytcaactggtctccaacctcaagaaggagggttccacccacaattggcaacacatcaccgaccaaattggcatgttctgtttcacagggctaaagcctgaacaggtggagcggctgatcaaggagttctccatctacatgacaaaagatggccgcatctctgtggcaggggtcacctccagcaacgtgggctaccttgcccatgccattcaccaggtcaccaagtaatgtccctggtgcgaggaaacagagacaacctttctgtcttcagcctctgctattgagagcttcacacagacaatgagagagggtggatggtggtgagtggatcatttctttcagccacagtgtgtaacactcagcatttgaatgtttctcagaaaagaacatgtagtgacacagggcagaggcatccatggctggcgtctggaatattaaaccaaactctccycggtccttttttctccaacttttctcaaagagtttacatgtgcaagaaagtcatcgcaccaaaaaacctgtcaattatgccattgcaatatttcagaagctttaactgaagtgtcaggttcctcgtgagaaacagcacacgttagaggctttgagagaaggcctagttctgtcatgagtagtcggcctcgtgtctgtcctcccatcttggaacaaccttatcaacaggccgcactgcagaaatgatgttttatgaaaaccaatgaggctgctgccactccagmaagggaaataatgcagtttcctgtcttatttaagaraaagagaaggctctcttttctcccttgtcattgccgttcttttccttacacgcaaagattttttaactattgcagattttcatcccattctactgcttgattgaccatcaactccatcctatcgagatttatttaagaatgaagaacataattttctgctgatgcygtaccctcacccttttcagcaaagaatagtggagagtaggaaactgtactttatctcggcatcctcttgaatgatagtgcaagtttctccagttgggatgttgtctctgcccggttggacctcctccctttgttgaatgtggtgtgcagcctctcatctcacactgtgagtccagcggcgcagggtggtaccaggaaagaggatattcaaccaccatctgctctaaccatgtagacttattgcggcctggtttctctgttacaataaaattactgtagacccaa

SEQ ID NO: 85 - DNA, 2465 bp, Homo sapiens
  misc_feature (1)...(2465): n = A,T,C or G
ggcccagcacgcggccgctctggcccagggaagtccctgtccttaccttcagcaggagccggttccctgtgtgtgtgtccgctcgccctctgctccgtcctgcggctgcccactgccctcctacggtccaccatgnccctgctgcactccggccgcgtcctccccgggatcgccgccgccttccacccgggcctcgccgccgcggcctctgccagagccagctcctggtggacccatgtggaaatgggacctccagatcccattctgggagtcactgaagcctttaagagggacaccaatagcaaaaagatgaatctgggagttggtgcctaccgggatgataayggaaagccttacgtkctgcctagcgtccgcaaggcagaggcccagattgccgcaaaaaatttggacaaggaatacctgcccattgggggactggctgaattttgcaaggcatctgcagaactagccctgggtgagaacagcgaagtcttgaagagtggccggtttgtcactgtgcagaccatttctggaactggagccttaaggatcggagccagttttctgcaaagattttttaagttcagccgagatgtctttctgcccaaaccaacctggggaaaccacacacccatcttcagggatgctggcatgcagctacaaggttatcggtattatgaccccaagacttgcngttttgacttcacaggcgctgtggaggatatttcaaaaataccagagcagagtgttcttcttctgcatgcctgcgcccacaatcccacgggagtggacccgcgtccggaacagtggaaggaaatagcaacagtggtgaagaaaaggaatctctttgcgttctttgacatggcctaccaaggctttgccagtggtgatggtgataaggatgcctgggctgtgcgccacttcatcgaacagggcattaatgtttgtctctgccaatcatatgccaagaacatgggcttatatggtgagcgtgtaggagccttcactatggtctgcaaagatgcggatgaagccaaaagggtagagtcacagttgaagatcttgatccgtcccatgtattccaaccctcccctcaatggggcccggattgctgctgccattctgaacaccccagatttgcgaaaacaatggctgcaagaagtgaaagkcatggctgaccgcatcattggcatgcggaytcaactggtctccaacctcaagaaggagggttccacccacaattggcaacacatcaccgaccaaattggcatgttctgtttcacagggctaaagcctgaacaggtggagcggctgatcaaggagttctccatctacatgacaaaagatggccgcatctctgtggcaggggtcacctccagcaacgtgggctaccttgcccatgccattcaccaggtcaccaagtaatgtccctggtgcgaggaaacagagacaacctttctgtcttcagcctctgctattgagagcttcacacagacaatgagagagggtggatggtggtgagtggatcatttctttcagccacagtgtgtaacactcagcatttgaatgtttctcagaaaagaacatgtagtgacacagggcagaggcatccatggctggcgtctggaatattaaaccaaactctccycggtccttttttctccaacttttctcaaagagtttacatgtgcaagaaagtcatcgcaccaaaaaacctgtcaattatgccattgcaatatttcagaagctttaactgaagtgtcaggttcctcgtgagaaacagcacacgttagaggctttgagagaaggcctagttctgtcatgagtagtcggcctcgtgtctgtcctcccatcttggaacaaccttatcaacaggccgcactgcagaaatgatgttttatgaaaaccaatgaggctgctgccactccagmaagggaaataatgcagtttcctgtcttatttaagaraaagagaaggctctcttttctcccttgtcattgccgttcttttccttacacgcaaagattttttaactattgcagattttcatcccattctactgcttgattgaccatcaactccatcctatcgagatttatttaagaatgaagaacataattttctgctgatgcygtaccctcacccttttcagcaaagaatagtggagagtaggaaactgtactttatctcggcatcctcttgaatgatagtgcaagtttctccagttgggatgttgtctctgcccggttggacctcctccctttgttgaatgtggtgtgcagcctctcatctcacactgtgagtccagcggcgcagggtggtaccaggaaagaggatattctaggctttgcgtgctgctagctgggttcaggcttcacccactggaaagaaccaccatctgctctaaccatgtagacttattgcggcctggtttctctgttacaataaaattactgtagacccaa

SEQ ID NO: 86 - DNA, 2122 bp, Homo sapiens
gcagcctgaggcagagctcgggggctgtcggtggggaccttgcaggagggcaccccaagcccgcccggcccgcccaacccagcccctgcgcgcagcccgggccgagtaggaccccgcgcgcccctcgcyatggcggcgccctcgcggctcctgatccgcgggggtcgcgtggtcaacgatgacttctcggaggtggccgacgtgctggtggaggacggcgtggtgcgggcactcgggcacgacctgctgcctcccgggggcgctcctgcggggctgcgggtcctcgacgccgccggcaagctcgtcctgcccggaggcatcgacacacacasgcacatgcagttycccttcatgggctcgcggtccatcgacgacttccaccagggcaccaaggctgctctctcaggaggcaccaccatgattattgatttcgccattcctcagaaaggtggctccctcattgaggccttcgagacctggcgaagctgggctgatcccaaagtttgctgcgactacagccttcatgtggcagtgacgtggtggagtgaccaggttaaagaagaaatgaaaatccttgtgcaagataaaggtgttaactctttcaagatgtttatggcctataaagatctgtacatggtgacagacctggagctgtacgaagccttctctyggtgcaaggaaattggagcaattgcccaggtccatgcggaaaatggagacttaattgcagagggagcaaagaagatgttggctctggggataacaggccctgagggccacgagctgtgccgcccagaggcrgtggaggcagaggccacgctgagagccatcaccatagccagcgctgtgaactgtcctctctacattgtgcatgtgatgagcaagtctgcagcyaaggtgatagcggatgcaaggagagatgggaaggtggtctatggtgaacccatagcagccagtcttggcacagatggcactcactactggaataaagaatggcaccatgcagcccaccatgtcatgggtccacctttgcgaccagacccctcaacacccgacttcctcatgwatctgttggctaatgatgatctaaccacaacagggactgataactgcactttcaacacctgccrgaaagctcttgggaaggatgattttaccaagatccccaatggggtgaatggtgttgaagaycggatgtccgtaataygggaaaaaggcgtgcatagtggtaaaatggatgaaaacagatttgtggcagttaccagcacaaatgcagccaaaatttttaatctctatccaagaaaaggaagaatagctgtaggatcagatgctgacattgttatttgggacccaaaaggcacaaggactatctcagcaaaaactcatcatcaggctgttaacttcaacattttcgagggcatggtttgccacrgggtgccccttgtgactatttcaagaggcaaagtggtatatgaagccggagtgttcagtgtcacrgcaggagatgggaagtttattcctcgaaaaccatttgctgaatatatttacaaacgaataaagcagcgagaccggacttgcacacctacccctgtggagcgtgcaccctataagggagaagtcgccacactgaaatccagagtgacaaaagaagatgccacagcagggaccaggaaacaggcccacccctgaagtgtgtgccatcggtaaaaaaatcagaggaaaggaggctgccattcccttcacagccaaacattgtcaacccatggagaagcaggccttattcaactccctaggatcctttagaaaaaattcaccactataggcttctttgattttctttcagaagcaattgctgtctttctcactgtgtttttgttgctgcataagattgaaggtataaatttatattattgtgatggaaaggctgtgtggaaattcattgatgatactttaaaatgtcatctttgcttgtactagatttcttacttagaatttttaaaaatcattttcttgtttaaatagtttctttttttaaaaaaatggttacattagttttaaaatagctctgtgattttactttttattgtaattaataaacattgagatcttcattttatacctt

SEQ ID NO: 87 - DNA, 3687 bp, Homo sapiens
atggcactgcctgcgtgtgcagtccgggagttcgagccgccgcggcaaccggagcgaggagcgcccgtccgcaccacctgtccccgccggcattccagagtagaggccgaattggcagcgagccggcccgggtcggtcgccgcctcagttcgcgcgggccctcctaggggtgtgtctcacggattccacacccggccgctcctggacaagccccgaaaggcgtcttcttccctggcgggagccgcgtgcgccccgcttttcgcgctgctgtcccgggggcgccgcaggcggatgcacgttctcaggcgacgctgggactgggctccctctgccgggccctgctcactcggggcctggccgccctgggccactcgctgaaccacgtgctccgtgcgatcttctccaaagaatttcggccccatggccagcgtcgggaacatggatgagaaatccaacaagctgctgctagctttggtgatgctcttcctatttgccgtgatcgtcctccaatacgtgtgccccggcacagaatgccagctcctccgcctgcaggcgttcagctccccggtgccggacccgtaccgctcggaggatgagagctccgccaggttcgtgccccgctacaatttcacccgcggcgacctcctgcgcaaggtagacttcgacatcaagggcgatgacctgatcgtgttcctgcacatccagaagaccgggggcaccactttcggccgccacttggtgcgtaacatccagctggagcagccgtgcgagtgccgcgtgggtcagaagaaatgcacttgccaccggccgggtaagcgggaaacctggctcttctccaggttctccacgggctggagctgcgggttgcacgccgactggaccgagctcaccagctgtgtgccctccgtggtggacggcaagcgcgacgccaggctgagaccgtccaggtggaggatttttcagattytagatgcagcaaggttttctattctttctgtgggtatagtaaggataaacggggttctccaaacactaacgcaggcgccaactctccgtcatccacaaagacccggaacacatctaagagtgggaagaacttccactacatcaccatcctccgagacccagtgtcccggtacttgagtgagtggaggcatgtccagagaggggcaacatggaaagcatccctgcatgtctgcgatggaaggcctccaacctccgaagagctgcccagctgctacactggcgatgactggtctggctgccccctcaaagagtttatggactgtccctacaatctagccaacaaccgccaggtgcgcatgctctccgacctgaccctggtaggctgctacaacctctctgtcatgcctgaaaagcaaagaaacaaggtccttctggaaagtgccaagtcaaatctgaagcacatggcgttcttcggcctcactgagtttcagcggaagacccaatatctgtttgagaaaaccttcaacatgaactttatttcgccatttacccagtataataccactagggcctctagtgtagagatcaatgaggaaattcaaaagcgtattgagggactgaattttctggatatggagttgtacagctatgccaaagacctttttttgcagaggtatcagtttatgaggcagaaagagcatcaggaggccaggcgaaagcgtcaggaacaacgcaaatttctgaagggaaggctccttcagacccatttccagagccagggtcagggccagagccagaatccgaatcagaatcagagtcagaacccaaatccgaatgccaatcagaacctgactcagaatctgatgcagaatctgactcagagtttgagccagaaggagaaccgggaaagcccgaagcagaactcaggcaaggagcagaatgataacaccagcaatggcaccaacgactacataggcagtgtagagaaatggcgttaaatggctcaaaaaggcctgtacatacttctcccaaagcgccactgaaaagatggcatagcttaaaagatgaaagtgtccaaacacatcctgcttccttcattggggaagttttaaaaaaaagtttagatgttgcctttacagttgcctttcaattcagtgttatactgtgtgtaggtaaaacaaatctcaatatggaattaaattgtctttttggggttggactaaatatgaaatccgaaagccaaaccagactcaccagaaattgctgtttagatattttaagaagttcttaaattagttatggagacaaagtgaaaacataaaatgtgaccatttaacttatggctaagaaatggactttaaattattcatgatacactgttaaaacccaatcttggaatcaaatattttttccaggggtgagaataagtataaacataaagcaactaaaatgaaacataaaaccttttattttcttctgattttaacaaggaatctatttaaatagaataacaactgatggtgaatcttaccgagctgtagaaaataaaaaattcctctccaaacatgggtagttttatgtcaaaatattggcttttcaagaacaggactcatatcttgatatttaagagatgtttaaaaytttaaactttttctaccttctactgtttaaaggttttacacagggtgtatctcacattaaacaaaacacctttttttcaaaatgaaataccaatgtaaagatctaatttccaggcgctttcagggcactgtaatttcaacaatactggaatcattttggcgctgcttctcattcattttaaggcttctctgaattgtgctcattccaaattaacccatgtatagaatctttcttcatcatctaaatggtgtgttgctgaagttattgtggtatataatcctggattaaagtcaggactttctttctatagaattattttatcaatatttgtgtagtgaggtcctaatcaagaaacttgaacaggataatgtgtctaaaaatattgctgaagttattcttgatcagatagaatttaacctaaaatgtgaactcttacttactttttgtacatctctattgtaatgtttccagttgggccaactatttctagccctttagttctttttcatgttgacagatttgtagacaattacaaaagccaaaaaaggataaaataagcattaggaaggctagccagttattcaatagcaccttgataatgtgggcaaacccttctacaaagtttttgttttgaaaagagcaaaagtaaaaagtgttctgtagtgaggttacatatcaggaacatatgagttgagcagagtaatttggtagtgtaagtcgatgcaaaaatacttctatggtayctattacaagctgaccaagataaaaagaagtatgtaacccactgtgctgtcaagcatcatgattccgggcagttttcattttactrtggattttgctatacttatgcaaggacttacactaacctcctggctgtaaatcaaacaaggtgactgaaagtggcatttatgttttcacaagggacatgcttagaagtgtgaccataaagtcacatcttgtacaatctgctcatgtgtttcatctgtagtaatatagccacaaactggacaagaagctgggtatttgggtttaaaatagattttcttgactctgagcttgtatcagtatttctagcttttg

SEQ ID NO: 88 - DNA, 3661 bp, Homo sapiens
atggcactgcctgcgtgtgcagtccgggagttcgagccgccgcggcaaccggagcgaggagcgcccgtccgcaccacctgtccccgccggcattccagagtagaggccgaattggcagcgagccggcccgggtcggtcgccgcctcagttcgcgcgggccctcctaggggtgtgtctcacggattccacacccggccgctcctggacaagccccgaaaggcgtcttcttccctggcgggagccgcgtgcgccccgcttttcgcgctgctgtcccgggggcgccgcaggcggatgcacgttctcaggcgacgctgggactgggctccctctgccgggccctgctcactcggggcctggccgccctgggccactcgctgaaccacgtgctccgtgcgatcttctccaaagaatttcggccccatggccagcgtcgggaacatggatgagaaatccaacaagctgctgctagctttggtgatgctcttcctatttgccgtgatcgtcctccaatacgtgtgccccggcacagaatgccagctcctccgcctgcaggcgttcagctccccggtgccggacccgtaccgctcggaggatgagagctccgccaggttcgtgccccgctacaatttcacccgcggcgacctcctgcgcaaggtagacttcgacatcaagggcgatgacctgatcgtgttcctgcacatccagaagaccgggggcaccactttcggccgccacttggtgcgtaacatccagctggagcagccgtgcgagtgccgcgtgggtcagaagaaatgcacttgccaccggccgggtaagcgggaaacctggctcttctccaggttctccacgggctggagctgcgggttgcacgccgactggaccgagctcaccagctgtgtgccctccgtggtggacggcaagcgcgacgccaggctgagaccgtccaggtggaggatttttcagattytagatgcagcaagtaaggataaacggggttctccaaacactaacgcaggcgccaactctccgtcatccacaaagacccggaacacatctaagagtgggaagaacttccactacatcaccatcctccgagacccagtgtcccggtacttgagtgagtggaggcatgtccagagaggggcaacatggaaagcatccctgcatgtctgcgatggaaggcctccaacctccgaagagctgcccagctgctacactggcgatgactggtctggctgccccctcaaagagtttatggactgtccctacaatctagccaacaaccgccaggtgcgcatgctctccgacctgaccctggtaggctgctacaacctctctgtcatgcctgaaaagcaaagaaacaaggtccttctggaaagtgccaagtcaaatctgaagcacatggcgttcttcggcctcactgagtttcagcggaagacccaatatctgtttgagaaaaccttcaacatgaactttatttcgccatttacccagtataataccactagggcctctagtgtagagatcaatgaggaaattcaaaagcgtattgagggactgaattttctggatatggagttgtacagctatgccaaagacctttttttgcagaggtatcagtttatgaggcagaaagagcatcaggaggccaggcgaaagcgtcaggaacaacgcaaatttctgaagggaaggctccttcagacccatttccagagccagggtcagggccagagccagaatccgaatcagaatcagagtcagaacccaaatccgaatgccaatcagaacctgactcagaatctgatgcagaatctgactcagagtttgagccagaaggagaaccgggaaagcccgaagcagaactcaggcaaggagcagaatgataacaccagcaatggcaccaacgactacataggcagtgtagagaaatggcgttaaatggctcaaaaaggcctgtacatacttctcccaaagcgccactgaaaagatggcatagcttaaaagatgaaagtgtccaaacacatcctgcttccttcattggggaagttttaaaaaaaagtttagatgttgcctttacagttgcctttcaattcagtgttatactgtgtgtaggtaaaacaaatctcaatatggaattaaattgtctttttggggttggactaaatatgaaatccgaaagccaaaccagactcaccagaaattgctgtttagatattttaagaagttcttaaattagttatggagacaaagtgaaaacataaaatgtgaccatttaacttatggctaagaaatggactttaaattattcatgatacactgttaaaacccaatcttggaatcaaatattttttccaggggtgagaataagtataaacataaagcaactaaaatgaaacataaaaccttttattttcttctgattttaacaaggaatctatttaaatagaataacaactgatggtgaatcttaccgagctgtagaaaataaaaaattcctctccaaacatgggtagttttatgtcaaaatattggcttttcaagaacaggactcatatcttgatatttaagagatgtttaaaaytttaaactttttctaccttctactgtttaaaggttttacacagggtgtatctcacattaaacaaaacacctttttttcaaaatgaaataccaatgtaaagatctaatttccaggcgctttcagggcactgtaatttcaacaatactggaatcattttggcgctgcttctcattcattttaaggcttctctgaattgtgctcattccaaattaacccatgtatagaatctttcttcatcatctaaatggtgtgttgctgaagttattgtggtatataatcctggattaaagtcaggactttctttctatagaattattttatcaatatttgtgtagtgaggtcctaatcaagaaacttgaacaggataatgtgtctaaaaatattgctgaagttattcttgatcagatagaatttaacctaaaatgtgaactcttacttactttttgtacatctctattgtaatgtttccagttgggccaactatttctagccctttagttctttttcatgttgacagatttgtagacaattacaaaagccaaaaaaggataaaataagcattaggaaggctagccagttattcaatagcaccttgataatgtgggcaaacccttctacaaagtttttgttttgaaaagagcaaaagtaaaaagtgttctgtagtgaggttacatatcaggaacatatgagttgagcagagtaatttggtagtgtaagtcgatgcaaaaatacttctatggtayctattacaagctgaccaagataaaaagaagtatgtaacccactgtgctgtcaagcatcatgattccgggcagttttcattttactrtggattttgctatacttatgcaaggacttacactaacctcctggctgtaaatcaaacaaggtgactgaaagtggcatttatgttttcacaagggacatgcttagaagtgtgaccataaagtcacatcttgtacaatctgctcatgtgtttcatctgtagtaatatagccacaaactggacaagaagctgggtatttgggtttaaaatagattttcttgactctgagcttgtatcagtatttctagcttttg

SEQ ID NO: 89 - DNA, 1704 bp, Homo sapiens
ctccatttccaaaatgtcgctttctaacaagctgacattggacaaaccagacgtcaaagggcagcgggtcattatgagagtggacttcaatgttcctgtgtagaataaccagataacaaacaaccagaggattaaggctactgtcttaagcatcaaattctgcttggacaatggagccaagtcagtagtccttatgagccacctaggccagcctgatggtgtccctatgcctgacaatactccttagagccatttgctgtagaattcaaatctctgctgggcaaggatgttctgttcttgaaagactgtgtaggcccagaagtggagaaagcctgtgccaacccagctgctgggtctgtcatcctgctggagaacctccactttcatgtggaagaagaagggaagggaaaactctgggaacaaggttaaagtgagcccgccaaaatagaagctttccgagcttcactttccaagctagggaatgtgcatgtcaatggtgcttttggcactgctcacagagcccacagctccatggtaggagtcagtctgccacagaaggctggtggttttttgatgaagaaggagctgaactactttgtgaaggtcttggagagcccatagcgacccttcctggccattctgggtggagctaaatttgcagacaagatccacctgatcaataatatgctggacaaagtcaatgagatgattattggtggtggaacggcttttaccttccttaaggtgctcaacaacatggagactggcacttctctgtttgatgaagagggagccaagattgtcaaagacctaatgtcccaagctgagaagaatggtgtgaagattaccttgcctattgactttgtcactgctgagaaatttgatgagaatgccaagactggccaagccactgtggcttctggcatacctgctggctgaatgggcttgractgtggtcctgaaagcagcaagaagtatgctgagactgtcacttgggctaagcagattgtgtggaatggtcctgtggggggtatttgaatgggaagcttttgcccagggaaccaaagccctcatggatgaggtggtgaaagccacttctaggggctgcattaccatcataggtggtggaaacactgccacttgctgtgccaaatggaacacagaggataaaatcagacatgtgagcactacgggtggtgccagtttagagctcctggacagtaaagtccttcctggggtggatgctctcggcaatatttagtacttttctgccttttagttcctgtgcacagcccctaagtcaacttagcattttctgcatctccacttggcattagctaaaaccttccatgtcaagattcagctagtggccaagagatgcagtgccaggaacccttaaacagttgcacagcatctcagctcatctttactgcaccctggatttgcctacattcttcaagatcccatttgaatttcttagtgactaaaccattgtgcattctagaatgcatatatgcatattttgcctgttaaaaaaaaagtgagctgtgttagcttagttctcttttgatgtagcttatcctgattagctttgtcactgtttcactactcagcgtggaaacaagatgaaattccatttgtaggtagggagacgaaattgatgatccattaaatagacaataaaagtgtccattgaaaccatga

SEQ ID NO: 90 - DNA, 1302 bp, Homo sapiens
ctcccccatcacacacaccaggccctgccaggayaaggcagctcctggaagctccaccaggacccacgtccaccaggcatctcgaacccttggcccccatggaccccctgaggcgctccccctctccctgcctgtcctcgcagccctccagccccagcaccccaccctgcgagatgcttggtcctgtgggcattgaggctgtgctggaccagctgaagatcaaggctatgaagatggggtttgagttcaacatcatggtggtggggcaaagcgggctgggcaagtccacgatggtgaacacgctgttcaagtccaaagtgtggaagtcaaacccaccrggcttgggggtgcccacaccccagacgctgcagctgcattcactgacccatgtcatagaggagaagggtgtgaagctgaagctgacggtgacggacacgcccggcttcggggaccagatcaacaatgacaactgctgggaccccatcctgggctacatcaacgagcaatacgagcagtacctgcaggaggagatcctcatcacccgccagcgccacatcccagacacccgggtrcactgctgcgtgtactttgtaccacccactgggcactgcctgcggcccctggacattgagttcctgcagcggctgtgccggactgtgaatgtggtgcccgtgattgccagggccgacagcctgaccatggaggagygagaggccttcaggcgcaggatccagcrgaacctgaggacccactgcatcgacgtctacccccagatgtgctttgacgaggacatcaatgacaaaatcctcaacagcaagttacgggaccgaatcccttttgccgtggtaggggctgaccaagagcacctggtgaacgggaggtgtgtcctgggccggaagaccaagtggggcatcattgaagtggagaacatggcgcactgtgaatttcctctcctgagagacctgcttatccgctcccacctccaagacctgaaggacataacccacaacatccactatgagaactaccgcgtcatcagactcaatgaaagccacctgctgccccgcgggcccggctgggtgaacctggccccggcctccccaggacagctgaccaccccccggaccttcaaggtctgcaggggggcccatgacgattctgatgatgagttctgaccaccggcggatcccggggctgctgggcttcctgagtccccagcggctctcaacacacacctatgtaccagagcatctattaaatgtgagccttgctttttatgaaaagctgtgctttgaaaacaaa

SEQ ID NO: 91 - DNA, 3474 bp, Homo sapiens
aggaagcagacctgcgacgggaccgaggaatggaggggtggtcgggtgtgtggatggcagagtgacagctagggagaagccggatgtggaaggggaggaactgtgtggtatgcccaggcccctgggcccagccctggcttggcagcccttgctccctgctgagggccctgcctttccttcccctgaaacagctcccggagccctgcctgttccctgtccatccaggccagcagctgaaggagcctcacctgcctcccttctctgagtagcacggatttgaggagaagcagcgaagatgtccagcgagcctccccctccttatcctgggggccccacagccccacttctggaagagaaaagtggagccccgcccaccccaggccgttcctccccagctgtgatgcagccccctccaggcatgccactgccccctgcggacattggccccccaccctatgagccgccgggtcacccaatgccccagcctggcttcatcccaccacacatgagtgcagatggcacctacatgcctccgggtttctaccctcctccaggcccccacccacccatgggctactaccccccagggccctacacgccagggccctaccctggccctgggggccacacagccacagtcctggtcccttcaggrgctgccaccacggtgacagtgctgcagggagagatctttgagggagcgcctgtgcagacggtgtgtccccactgccagcaggccatcaccaccaagatctcctacgagattggcttgatgaatttcgtgctgggtttcttctgttgcttcatgggatgtgatctgggctgctgcctgatcccctgcctcatcaatgacttcaaggatgtgacgcacacatgccccagctgcaaagcctacatctacacgtacaagcgcctgtgctaacggagctgggactcgggactcccccgcctgtcagtctggccccctgtgctttgctccctgygctcagtggtcactttcccgctcccacttggggctgggagcygtgccaccatcccctagaagtcctgtcctcttcaccctgccctacctgagccgctgactcttctggcaaaaattctgttgggatttaaggccaagggtcagtgggtggcagggggctgrcaatgagcttgtgtgttgttggtctgcttggtgtgtgtgatcgggaagataagctgggaggggtctcctgctggggtcctgatgcctctgtttccaaacaaggtacaggttcagtccagactctttccccctgggaccaacagcagccagagcagttagccagttagtccccaggcctgtggccacaggcgtttctgacctgctgggccgagaatgggtaagttgtctggagtcaggtgggcccacgtaggacagggtcacaaagcctgggtttgtttctgggtactttgcgcctctggggtgctagaggtggggcatggtggctggaagtaaaactgccaactctggccctcagaactctcaggtatagaagcccaggatgtctaataccctgtcccagtgcccgagagctgcctggtgtcaggtagagaggacactgtacctgggtgaatgatcagaccctggtagctaagaaggaacttgtccctttgagtcagtgtgcagaccccctttcaggccatgcctctgtgaaccctgtattgctggggccggaaggagcccctgagcctagccccttcccgtctgccctgtgtcctcactgcgtgtgggtatgacctctgcctggtggctggtgtatcccaactgggcaagagatggcagagggtcccccttgtgggtgcgcttggatgtgcagagccttctccatggattttcttccctgtaagtgccgggcccctcaccccagctgacaggctgttgctgwgcctgctcacacctgctcctgcaggcacactgggctagggacgaggaaggagcagccacaagtggtagaactgccttggtggacaccagcctcgccctgtctttatttcctgaatggtttgtgaacttgctcacctggaccactgtatcctgccactgtccttcctggtctcgcactgccactgcatggcctcctgtcactgtgaatcgtggcccagtctcagtttgtagtttctcattaaattggccctttcactcccccgccctgggcctctgctctcttgcctggcttccttcttttttgagggaaagagggtggggctgcaggcagtctactggcaggacgggaggctgagtcctcagggtctcacaccctcagtgctgatgccatgccaactgcctgggacaacaccaacacgtaaggacctaattaaaccaaaccagagtcgggtgtagaccagccctgggatttccagctgtgactgggccagggcacacgttggtctcggcagtggctgtaaggtcaccttccttcctctgatgctggtttcaaccatctatatatggcatccacgcatgggatctgcaagctggagccctcctacccgcaggcttgagcacagcatcatccagccctggggaggcgcacccttaagcaasacagactgggctgaggctgacaggcagaagactaacagagcgcagtctgcacacgcaggttctgggcgmcctctggccctggccatctctgcactaactcatctgaattatgaaggtggcagtcttggtcagtagtttaaagagtttccctactttttaaccctttttgaaataaaacttttacaggtagtagattcctattaataaaattatttaagttcatgtttctcttttagagaatgaattgtttaaatacaaatatgtgcttttttaaaacccttatttttaaatatatatatatwttttaaaaaaaccttttaagtaggaaacctctaaggtatttctgagctaaaaaatagcagtgctggatacactttaaagatctttgcaagacggttagagtgactttgctttggagactagaggtgctggagagtagacccagagcaggaggtggctgctgggagccatgatggacgatgtccactccccacacagacataacatgcccttgcttctgagggactctcctatggggaggtggcttgacccacccggtgccaggaggcagggaaggaggtagcttgcaaagcccactttattgagtgctggagcatttacacagcgyggaggaggagataagctggggctgagcaaaccgcacccaaggggttagagggattctgggtgagagggatgagctcccaaggcctctgaggcttccacccacacccaccctcactcccagggtccaagagaggcccagaagttgtacagcagcatccagcaaggccccctcgcacagcttggacttacaggccactcacctccaacaggggagatagtcacccatgtactgcaaaaacagggactaccggaagcagcctagggcccagaagtgtggaagc

SEQ ID NO: 92 - DNA, 3263 bp, Homo sapiens
aagtgcgactgccagctgccgaggcgttcggtcctgctgttgcggccgctgccccagggctgcggggacggagaagcagcgaagatgtccagcgagcctccccctccttatcctgggggccccacagccccacttctggaagagaaaagtggagccccgcccaccccaggccgttcctccccagctgtgatgcagccccctccaggcatgccactgccccctgcggacattggccccccaccctatgagccgccgggtcacccaatgccccagcctggcttcatcccaccacacatgagtgcagatggcacctacatgcctccgggtttctaccctcctccaggcccccacccacccatgggctactaccccccagggccctacacgccagggccctaccctggccctgggggccacacagccacagtcctggtcccttcaggrgctgccaccacggtgacagtgctgcagggagagatctttgagggagcgcctgtgcagacggtgtgtccccactgccagcaggccatcaccaccaagatctcctacgagattggcttgatgaatttcgtgctgggtttcttctgttgcttcatgggatgtgatctgggctgctgcctgatcccctgcctcatcaatgacttcaaggatgtgacgcacacatgccccagctgcaaagcctacatctacacgtacaagcgcctgtgctaacggagctgggactcgggactcccccgcctgtcagtctggccccctgtgctttgctccctgygctcagtggtcactttcccgctcccacttggggctgggagcygtgccaccatcccctagaagtcctgtcctcttcaccctgccctacctgagccgctgactcttctggcaaaaattctgttgggatttaaggccaagggtcagtgggtggcagggggctgrcaatgagcttgtgtgttgttggtctgcttggtgtgtgtgatcgggaagataagctgggaggggtctcctgctggggtcctgatgcctctgtttccaaacaaggtacaggttcagtccagactctttccccctgggaccaacagcagccagagcagttagccagttagtccccaggcctgtggccacaggcgtttctgacctgctgggccgagaatgggtaagttgtctggagtcaggtgggcccacgtaggacagggtcacaaagcctgggtttgtttctgggtactttgcgcctctggggtgctagaggtggggcatggtggctggaagtaaaactgccaactctggccctcagaactctcaggtatagaagcccaggatgtctaataccctgtcccagtgcccgagagctgcctggtgtcaggtagagaggacactgtacctgggtgaatgatcagaccctggtagctaagaaggaacttgtccctttgagtcagtgtgcagaccccctttcaggccatgcctctgtgaaccctgtattgctggggccggaaggagcccctgagcctagccccttcccgtctgccctgtgtcctcactgcgtgtgggtatgacctctgcctggtggctggtgtatcccaactgggcaagagatggcagagggtcccccttgtgggtgcgcttggatgtgcagagccttctccatggattttcttccctgtaagtgccgggcccctcaccccagctgacaggctgttgctgwgcctgctcacacctgctcctgcaggcacactgggctagggacgaggaaggagcagccacaagtggtagaactgccttggtggacaccagcctcgccctgtctttatttcctgaatggtttgtgaacttgctcacctggaccactgtatcctgccactgtccttcctggtctcgcactgccactgcatggcctcctgtcactgtgaatcgtggcccagtctcagtttgtagtttctcattaaattggccctttcactcccccgccctgggcctctgctctcttgcctggcttccttcttttttgagggaaagagggtggggctgcaggcagtctactggcaggacgggaggctgagtcctcagggtctcacaccctcagtgctgatgccatgccaactgcctgggacaacaccaacacgtaaggacctaattaaaccaaaccagagtcgggtgtagaccagccctgggatttccagctgtgactgggccagggcacacgttggtctcggcagtggctgtaaggtcaccttccttcctctgatgctggtttcaaccatctatatatggcatccacgcatgggatctgcaagctggagccctcctacccgcaggcttgagcacagcatcatccagccctggggaggcgcacccttaagcaasacagactgggctgaggctgacaggcagaagactaacagagcgcagtctgcacacgcaggttctgggcgmcctctggccctggccatctctgcactaactcatctgaattatgaaggtggcagtcttggtcagtagtttaaagagtttccctactttttaaccctttttgaaataaaacttttacaggtagtagattcctattaataaaattatttaagttcatgtttctcttttagagaatgaattgtttaaatacaaatatgtgcttttttaaaacccttatttttaaatatatatatatwttttaaaaaaaccttttaagtaggaaacctctaaggtatttctgagctaaaaaatagcagtgctggatacactttaaagatctttgcaagacggttagagtgactttgctttggagactagaggtgctggagagtagacccagagcaggaggtggctgctgggagccatgatggacgatgtccactccccacacagacataacatgcccttgcttctgagggactctcctatggggaggtggcttgacccacccggtgccaggaggcagggaaggaggtagcttgcaaagcccactttattgagtgctggagcatttacacagcgyggaggaggagataagctggggctgagcaaaccgcacccaaggggttagagggattctgggtgagagggatgagctcccaaggcctctgaggcttccacccacacccaccctcactcccagggtccaagagaggcccagaagttgtacagcagcatccagcaaggccccctcgcacagcttggacttacaggccactcacctccaacaggggagatagtcacccatgtactgcaaaaacagggactaccggaagcagcctagggcccagaagtgtggaagc

SEQ ID NO: 93 - DNA, 3717 bp, Homo sapiens
ggcccactccaatgggcggcgccggggcgacttgctgttcccggcggcccgtgcgtcggcggtggttgggtggtaagatggcggctgtgagtctgcggctcggcgacttggtgtgggggaaactcggccgatatcctccttggccaggaaagattgttaatccaccaaaggacttgaagaaacctcgcggaaagaaatgcttctttgtgaaattttttggaacagaagatcatgcctggatcaaagtggaacagctgaagccatatcatgctcataaagaggaaatgataaaaattaacaagggtaaacgattccagcaagcggtagatgctgtcgaagagttcctcaggagagccaaagggaaagaccagacgtcatcccacrattcttctgatgacaagaatcgacgtaattccagtgaggaragaagtaggccaaactcaggtgatgagaagcgcaaacttagcctgtctgaagggaaggtgaagaagaacatgggagaaggaaagaagagggtgtcttcaggctcttcagagagaggctccaaatcccctctgaaaagagcccaagagcaaagtccccggaagcggggtcggcccccaaaggatgagaaggatctcaccatcccggagtctagtaccgtgaaggggatgatggccggaccgatggccgcgtttaaatggcagccaaccgcaagcgagcctgttaaagatgcagatcctcatttccatcatttcctgctaagccaaacagagaaggaaactggctccacctccatccaggcagctgacagcacagccgtgaatggcagcatcacacccacagacaaaaagataggatttttgggccttggtctcatgggaagtggaatcgtctccaacttgctaaaaatgggtcacacagtgactgtctggaaccgcactgcagagaaatgtgatttgttcatccaggagggggcccgtctgggaagaacccccgctgaagtcgtctcaacctgcgacatcactttcgcctgcgtgtcggatcccaaggcggccaaggacctggtgctgggccccagtggtgtgctgcaagggatccgccctgggaagtgctacgtggacatgtcaacagtggacgctgacaccgtcactgagctggcccaggtgattgtgtccaggggggggcgctttctggaagcccccgtctcagggaatcagcagctgtctaatgacgggatgttggtgatcttagcggctggagacaggggcttatatgaggactgcagcagctgcttccaggcgatggggaagacctccttcttcctaggtgaagtgggcaatgcagccaagatgatgctgatcgtgaacatggtccaagggagcttcatggccactattgccgaggggctgaccctggcccasgtgacaggccagtcccagcagacactcttggacatcctcaatcagggacagttggccagcatcttcctggaccagaagtgccaaaatatcctgcaaggaaactttaagcctgatttctacctgaaatacattcagaaggatctccgcttagccattgcgctgggtgatgcggtcaaccatccgactcccatggcagctgcagcaaatgaggtgtacaaaagagccaaggcgctggaccagtctgacaacgatatgtccgccgtgtaccgagcctacatacactaagctgtcgacaccccgccctcacccctccaatcccccctctgaccccctcttcctcacatggggtcgggggcctgggagttcattctggaccagcccacctatctccatttccttttatacagactttgagacttgccatcagcacagcacacagcagcacccttcccctgaggccggtggggaggggacaagtgtcagcaggattggcgtgtgggaaagctcttgagctgggcactggccccccggacgaggtggctgtgtgttcacacacacacacacacacacacacacacacacacacacaggctctcgccccaggatagaagctgcccagaaactgctgcctggctttttttcttccgagcttgtcttatctcaaaccccttccagtcaaggaactagaatcagcaacgagagttggaagccttcccacagcttcccccagagcgaagaggctgtagtcatgtccccatcccccactggattccctacaaggagaggccttgggcccagatgagccagtacagactccagacagaggggcccttggggccctccaacctcaggtgatgagctgagaaagatgttcacgtctaagcgtccagtgtgcacccagcgctccatagacgcctttgtgaactgaaaagagactggcagagtcccgagaagatggggccctggctttccagggagtgcagcaagcagccggcctgcaggtgagcatggaggcccggccctcaccgcctcgaagccatgccccagatgccactgccacagcgggcgctcgctcctccctaggctgttttagtatttggatttgcattccatcccttgggagggagtcctcagggccactagtgatgagccaagaggagtgggggttgggggcgctcctttctgtttccgttaggccacagactcttcacctggctctgaagagccactcttacctcggtcccctcccagtggtcccaccttctccaccctgccctgccaagtcccctgcatgcccaccgctctccatcctccctcctctccctcttcctcccgtggagacagtatttctttctgtctgtccctttggcccagacccagcctgaccaacgatgagcatttcttaggctcagctcttgatacggaaacgagtgtcttcactccagccagcatcatggtcttcggtgcttcccgggcccggggtctgtcgggagggaagagaactgggcctgacctacctgaactgactggccctccgaggtgggtctgggacatcctagaggccctacatttgtccttggataggggaccggggggggcttggaatgttgcaaaaaaaaaagttacccaagggatgtcagttttttatccctctgcatgggttggattttccaaaatcataatttgcagaaggaaggccagcatttaygatgcaatatgtaattatatatagggtggccacactagggcggggtccttcccccctcacagctttggcccctttcagagattagaaactgggttagaggattgcagaagacgagtggggggagggcagggaagatgcctgtcgggtttttagcacagttcatttcactgggattttgaagcatttctgtctgaacacaaagcctgttctagtcctggcggaacacactgggggtgggggcgggggaagatgcggtaatgaaaccggttagtcaattttgtcttaatattgttgacaattctgtaaagttcctttttatgaatatttctgtttaagctatttcacctttcttttgaaatccttcccttttaaggagaaaatgtgacacttgtgaaaaagcttgtaagaaagcccctcccttttttctttaaacctttaaatgacaaatctaggtaattaaggttgtgaatttttwtttttgctttgtttttaatgaacatttgtctttcagaataggattgtgtgataatgtttaaatggcaaaaacaaaacatgattttgtgcaattaacaaagctactgcaagaaaaataaaacacttcttggt

SEQ ID NO: 94 - DNA, 3344 bp, Homo sapiens
ggcccactccaatgggcggcgccggggcgacttgctgttcccggcggcccgtgcgtcggcggtggttgggtggtaagatggcggctgtgagtctgcggctcggcgacttggtgtgggggaaactcggccgatatcctccttggccaggaaagattgttaatccaccaaaggacttgaagaaacctcgcggaaagaaatgcttctttgtgaaattttttggaacagaagatcatgcctggatcaaagtggaacagctgaagccatatcatgctcataaagaggaaatgataaaaattaacaagggtaaacgattccagcaagcggtagatgctgtcgaagagttcctcaggagagccaaagggaaagaccagacgtcatcccacrattcttctgatgacaagaatcgacgtaattccagtgaggaragaagtaggccaaactcaggtgatgagaagcgcaaacttagcctgtctgaagggaaggtgaagaagaacatgggagaaggaaagaagagggtgtcttcaggctcttcagagagaggctccaaatcccctctgaaaagagcccaagagcaaagtccccggaagcggggtcggcccccaaaggatgagaaggatctcaccatcccggagtctagtaccgtgaaggggatgatggccggaccgatggccgcgtttaaatggcagccaaccgcaagcgagcctgttaaagatgcagatcctcatttccatcatttcctgctaagccaaacagagaaggaaactggctccacctccatccaggcagctgacagcacagccgtgaatggcagcatcacacccacagacaaaaagataggatttttgggccttggtctcatgggaagtggaatcgtctccaacttgctaaaaatgggtcacacagtgactgtctggaaccgcactgcagagaaatgtgatttgttcatccaggagggggcccgtctgggaagaacccccgctgaagtcgtctcaacctgcgacatcactttcgcctgcgtgtcggatcccaaggcggccaaggacctggtgctgggccccagtggtgtgctgcaagggatccgccctgggaagtgctacgtggacatgtcaacagtggacgctgacaccgtcactgagctggcccaggtgattgtgtccaggggggggcgctttctggaagcccccgtctcagggaatcagcagctgtctaatgacgggatgttggtgatcttagcggctggagacaggggcttatatgaggactgcagcagctgcttccaggcgatggggaagacctccttcttcctaggtgaagtgggcaatgcagccaagatgatgctgatcgtgaacatggtccaagggagcttcatggccactattgccgaggggctgaccctggcccasgtgacaggccagtcccagcagacactcttggacatcctcaatcagggacagttggccagcatcttcctggaccagaagtgccaaaatatcctgcaaggaaactttaagcctgatttctacctgaaatacattcagaaggatctccgcttagccattgcgctgggtgatgcggtcaaccatccgactcccatggcagctgcagcaaatgaggtgtacaaaagagccaaggcgctggaccagtctgacaacgatatgtccgccgtgtaccgagcctacatacactaagctgtcgacaccccgccctcacccctccaatcccccctctgaccccctcttcctcacatggggtcgggggcctgggagttcattctggaccagcccacctatctccatttccttttatacagactttgagacttgccatcagcacagcacacagcagcacccttcccctgaggccggtggggaggggacaagtgtcagcaggattggcgtgtgggaaagctcttgagctgggcactggccccccggacgaggtggctgtgtgttcacacacacacacacacacacacacacacacacacacacaggctctcgccccaggatagaagctgcccagaaactgctgcctggctttttttcttccgagcttgtcttatctcaaaccccttccagtcaaggaactagaatcagcaacgagagttggaagccttcccacagcttcccccagagcgaagaggctgtagtcatgtccccatcccccactggattccctacaaggagaggccttgggcccagatgagccagtacagactccagacagaggggcccttggggccctccaacctcaggtgatgagctgagaaagatgttcacgtctaagcgtccagtgtgcacccagcgctccatagacgcctttgtgaactgaaaagagactggcagagtcccgagaagatggggccctggctttccagggagtgcagcaagcagccggcctgcagacccagcctgaccaacgatgagcatttcttaggctcagctcttgatacggaaacgagtgtcttcactccagccagcatcatggtcttcggtgcttcccgggcccggggtctgtcgggagggaagagaactgggcctgacctacctgaactgactggccctccgaggtgggtctgggacatcctagaggccctacatttgtccttggataggggaccggggggggcttggaatgttgcaaaaaaaaaagttacccaagggatgtcagttttttatccctctgcatgggttggattttccaaaatcataatttgcagaaggaaggccagcatttaygatgcaatatgtaattatatatagggtggccacactagggcggggtccttcccccctcacagctttggcccctttcagagattagaaactgggttagaggattgcagaagacgagtggggggagggcagggaagatgcctgtcgggtttttagcacagttcatttcactgggattttgaagcatttctgtctgaacacaaagcctgttctagtcctggcggaacacactgggggtgggggcgggggaagatgcggtaatgaaaccggttagtcaattttgtcttaatattgttgacaattctgtaaagttcctttttatgaatatttctgtttaagctatttcacctttcttttgaaatccttcccttttaaggagaaaatgtgacacttgtgaaaaagcttgtaagaaagcccctcccttttttctttaaacctttaaatgacaaatctaggtaattaaggttgtgaatttttwtttttgctttgtttttaatgaacatttgtctttcagaataggattgtgtgataatgtttaaatggcaaaaacaaaacatgattttgtgcaattaacaaagctactgcaagaaaaataaaacacttcttggt

SEQ ID NO: 95 - DNA, 3949 bp, Homo sapiens
ggcccactccaatgggcggcgccggggcgacttgctgttcccggcggcccgtgcgtcggcggtggttgggtggtaagatggcggctgtgagtctgcggctcggcgacttggtgtgggggaaactcggccgatatcctccttggccaggaaagattgttaatccaccaaaggacttgaagaaacctcgcggaaagaaatgcttctttgtgaaattttttggaacagaagatcaatagacccagccccatttctctatcacaagccagcttagcagcctgtggtggcagtatttcaaggagatcgctggcctggagctgtggagccagagcttctggaagagggaatgttcttagaactccatggatttaaaaagaagatttggccgggcatggtgcctcaggcctgcaatcccagtactttgggaggccaagtgcctggatcaaagtggaacagctgaagccatatcatgctcataaagaggaaatgataaaaattaacaagggtaaacgattccagcaagcggtagatgctgtcgaagagttcctcaggagagccaaagggaaagaccagacgtcatcccacrattcttctgatgacaagaatcgacgtaattccagtgaggaragaagtaggccaaactcaggtgatgagaagcgcaaacttagcctgtctgaagggaaggtgaagaagaacatgggagaaggaaagaagagggtgtcttcaggctcttcagagagaggctccaaatcccctctgaaaagagcccaagagcaaagtccccggaagcggggtcggcccccaaaggatgagaaggatctcaccatcccggagtctagtaccgtgaaggggatgatggccggaccgatggccgcgtttaaatggcagccaaccgcaagcgagcctgttaaagatgcagatcctcatttccatcatttcctgctaagccaaacagagaagccagctgtctgttaccaggcaatcacgaagaagttgaaaatatgtgaagaggaaactggctccacctccatccaggcagctgacagcacagccgtgaatggcagcatcacacccacagacaaaaagataggatttttgggccttggtctcatgggaagtggaatcgtctccaacttgctaaaaatgggtcacacagtgactgtctggaaccgcactgcagagaaagagggggcccgtctgggaagaacccccgctgaagtcgtctcaacctgcgacatcactttcgcctgcgtgtcggatcccaaggcggccaaggacctggtgctgggccccagtggtgtgctgcaagggatccgccctgggaagtgctacgtggacatgtcaacagtggacgctgacaccgtcactgagctggcccaggtgattgtgtccaggggggggcgctttctggaagcccccgtctcagggaatcagcagctgtctaatgacgggatgttggtgatcttagcggctggagacaggggcttatatgaggactgcagcagctgcttccaggcgatggggaagacctccttcttcctaggtgaagtgggcaatgcagccaagatgatgctgatcgtgaacatggtccaagggagcttcatggccactattgccgaggggctgaccctggcccasgtgacaggccagtcccagcagacactcttggacatcctcaatcagggacagttggccagcatcttcctggaccagaagtgccaaaatatcctgcaaggaaactttaagcctgatttctacctgaaatacattcagaaggatctccgcttagccattgcgctgggtgatgcggtcaaccatccgactcccatggcagctgcagcaaatgaggtgtacaaaagagccaaggcgctggaccagtctgacaacgatatgtccgccgtgtaccgagcctacatacactaagctgtcgacaccccgccctcacccctccaatcccccctctgaccccctcttcctcacatggggtcgggggcctgggagttcattctggaccagcccacctatctccatttccttttatacagactttgagacttgccatcagcacagcacacagcagcacccttcccctgaggccggtggggaggggacaagtgtcagcaggattggcgtgtgggaaagctcttgagctgggcactggccccccggacgaggtggctgtgtgttcacacacacacacacacacacacacacacacacacacacaggctctcgccccaggatagaagctgcccagaaactgctgcctggctttttttcttccgagcttgtcttatctcaaaccccttccagtcaaggaactagaatcagcaacgagagttggaagccttcccacagcttcccccagagcgaagaggctgtagtcatgtccccatcccccactggattccctacaaggagaggccttgggcccagatgagccagtacagactccagacagaggggcccttggggccctccaacctcaggtgatgagctgagaaagatgttcacgtctaagcgtccagtgtgcacccagcgctccatagacgcctttgtgaactgaaaagagactggcagagtcccgagaagatggggccctggctttccagggagtgcagcaagcagccggcctgcaggtgagcatggaggcccggccctcaccgcctcgaagccatgccccagatgccactgccacagcgggcgctcgctcctccctaggctgttttagtatttggatttgcattccatcccttgggagggagtcctcagggccactagtgatgagccaagaggagtgggggttgggggcgctcctttctgtttccgttaggccacagactcttcacctggctctgaagagccactcttacctcggtcccctcccagtggtcccaccttctccaccctgccctgccaagtcccctgcatgcccaccgctctccatcctccctcctctccctcttcctcccgtggagacagtatttctttctgtctgtccctttggcccagacccagcctgaccaacgatgagcatttcttaggctcagctcttgatacggaaacgagtgtcttcactccagccagcatcatggtcttcggtgcttcccgggcccggggtctgtcgggagggaagagaactgggcctgacctacctgaactgactggccctccgaggtgggtctgggacatcctagaggccctacatttgtccttggataggggaccggggggggcttggaatgttgcaaaaaaaaaagttacccaagggatgtcagttttttatccctctgcatgggttggattttccaaaatcataatttgcagaaggaaggccagcatttaygatgcaatatgtaattatatatagggtggccacactagggcggggtccttcccccctcacagctttggcccctttcagagattagaaactgggttagaggattgcagaagacgagtggggggagggcagggaagatgcctgtcgggtttttagcacagttcatttcactgggattttgaagcatttctgtctgaacacaaagcctgttctagtcctggcggaacacactgggggtgggggcgggggaagatgcggtaatgaaaccggttagtcaattttgtcttaatattgttgacaattctgtaaagttcctttttatgaatatttctgtttaagctatttcacctttcttttgaaatccttcccttttaaggagaaaatgtgacacttgtgaaaaagcttgtaagaaagcccctcccttttttctttaaacctttaaatgacaaatctaggtaattaaggttgtgaatttttwtttttgctttgtttttaatgaacatttgtctttcagaataggattgtgtgataatgtttaaatggcaaaaacaaaacatgattttgtgcaattaacaaagctactgcaagaaaaataaaacacttcttggt

SEQ ID NO: 96 - DNA, 3377 bp, Homo sapiens
ggcccactccaatgggcggcgccggggcgacttgctgttcccggcggcccgtgcgtcggcggtggttgggtggtaagatggcggctgtgagtctgcggctcggcgacttggtgtgggggaaactcggccgatatcctccttggccaggaaagattgttaatccaccaaaggacttgaagaaacctcgcggaaagaaatgcttctttgtgaaattttttggaacagaagatcatgcctggatcaaagtggaacagctgaagccatatcatgctcataaagaggaaatgataaaaattaacaagggtaaacgattccagcaagcggtagatgctgtcgaagagttcctcaggagagccaaagggaaagaccagacgtcatcccacrattcttctgatgacaagaatcgacgtaattccagtgaggaragaagtaggccaaactcaggtgatgagaagcgcaaacttagcctgtctgaagggaaggtgaagaagaacatgggagaaggaaagaagagggtgtcttcaggctcttcagagagaggctccaaatcccctctgaaaagagcccaagagcaaagtccccggaagcggggtcggcccccaaaggatgagaaggatctcaccatcccggagtctagtaccgtgaaggggatgatggccggaccgatggccgcgtttaaatggcagccaaccgcaagcgagcctgttaaagatgcagatcctcatttccatcatttcctgctaagccaaacagagaagccagctgtctgttaccaggcaatcacgaagaagttgaaaatatgtgaagaggaaactggctccacctccatccaggcagctgacagcacagccgtgaatggcagcatcacacccacagacaaaaagataggatttttgggccttggtctcatgggaagtggaatcgtctccaacttgctaaaaatgggtcacacagtgactgtctggaaccgcactgcagagaaagagggggcccgtctgggaagaacccccgctgaagtcgtctcaacctgcgacatcactttcgcctgcgtgtcggatcccaaggcggccaaggacctggtgctgggccccagtggtgtgctgcaagggatccgccctgggaagtgctacgtggacatgtcaacagtggacgctgacaccgtcactgagctggcccaggtgattgtgtccaggggggggcgctttctggaagcccccgtctcagggaatcagcagctgtctaatgacgggatgttggtgatcttagcggctggagacaggggcttatatgaggactgcagcagctgcttccaggcgatggggaagacctccttcttcctaggtgaagtgggcaatgcagccaagatgatgctgatcgtgaacatggtccaagggagcttcatggccactattgccgaggggctgaccctggcccasgtgacaggccagtcccagcagacactcttggacatcctcaatcagggacagttggccagcatcttcctggaccagaagtgccaaaatatcctgcaaggaaactttaagcctgatttctacctgaaatacattcagaaggatctccgcttagccattgcgctgggtgatgcggtcaaccatccgactcccatggcagctgcagcaaatgaggtgtacaaaagagccaaggcgctggaccagtctgacaacgatatgtccgccgtgtaccgagcctacatacactaagctgtcgacaccccgccctcacccctccaatcccccctctgaccccctcttcctcacatggggtcgggggcctgggagttcattctggaccagcccacctatctccatttccttttatacagactttgagacttgccatcagcacagcacacagcagcacccttcccctgaggccggtggggaggggacaagtgtcagcaggattggcgtgtgggaaagctcttgagctgggcactggccccccggacgaggtggctgtgtgttcacacacacacacacacacacacacacacacacacacacaggctctcgccccaggatagaagctgcccagaaactgctgcctggctttttttcttccgagcttgtcttatctcaaaccccttccagtcaaggaactagaatcagcaacgagagttggaagccttcccacagcttcccccagagcgaagaggctgtagtcatgtccccatcccccactggattccctacaaggagaggccttgggcccagatgagccagtacagactccagacagaggggcccttggggccctccaacctcaggtgatgagctgagaaagatgttcacgtctaagcgtccagtgtgcacccagcgctccatagacgcctttgtgaactgaaaagagactggcagagtcccgagaagatggggccctggctttccagggagtgcagcaagcagccggcctgcagacccagcctgaccaacgatgagcatttcttaggctcagctcttgatacggaaacgagtgtcttcactccagccagcatcatggtcttcggtgcttcccgggcccggggtctgtcgggagggaagagaactgggcctgacctacctgaactgactggccctccgaggtgggtctgggacatcctagaggccctacatttgtccttggataggggaccggggggggcttggaatgttgcaaaaaaaaaagttacccaagggatgtcagttttttatccctctgcatgggttggattttccaaaatcataatttgcagaaggaaggccagcatttaygatgcaatatgtaattatatatagggtggccacactagggcggggtccttcccccctcacagctttggcccctttcagagattagaaactgggttagaggattgcagaagacgagtggggggagggcagggaagatgcctgtcgggtttttagcacagttcatttcactgggattttgaagcatttctgtctgaacacaaagcctgttctagtcctggcggaacacactgggggtgggggcgggggaagatgcggtaatgaaaccggttagtcaattttgtcttaatattgttgacaattctgtaaagttcctttttatgaatatttctgtttaagctatttcacctttcttttgaaatccttcccttttaaggagaaaatgtgacacttgtgaaaaagcttgtaagaaagcccctcccttttttctttaaacctttaaatgacaaatctaggtaattaaggttgtgaatttttwtttttgctttgtttttaatgaacatttgtctttcagaataggattgtgtgataatgtttaaatggcaaaaacaaaacatgattttgtgcaattaacaaagctactgcaagaaaaataaaacacttcttggt

SEQ ID NO: 97 - DNA, 3750 bp, Homo sapiens
ggcccactccaatgggcggcgccggggcgacttgctgttcccggcggcccgtgcgtcggcggtggttgggtggtaagatggcggctgtgagtctgcggctcggcgacttggtgtgggggaaactcggccgatatcctccttggccaggaaagattgttaatccaccaaaggacttgaagaaacctcgcggaaagaaatgcttctttgtgaaattttttggaacagaagatcatgcctggatcaaagtggaacagctgaagccatatcatgctcataaagaggaaatgataaaaattaacaagggtaaacgattccagcaagcggtagatgctgtcgaagagttcctcaggagagccaaagggaaagaccagacgtcatcccacrattcttctgatgacaagaatcgacgtaattccagtgaggaragaagtaggccaaactcaggtgatgagaagcgcaaacttagcctgtctgaagggaaggtgaagaagaacatgggagaaggaaagaagagggtgtcttcaggctcttcagagagaggctccaaatcccctctgaaaagagcccaagagcaaagtccccggaagcggggtcggcccccaaaggatgagaaggatctcaccatcccggagtctagtaccgtgaaggggatgatggccggaccgatggccgcgtttaaatggcagccaaccgcaagcgagcctgttaaagatgcagatcctcatttccatcatttcctgctaagccaaacagagaagccagctgtctgttaccaggcaatcacgaagaagttgaaaatatgtgaagaggaaactggctccacctccatccaggcagctgacagcacagccgtgaatggcagcatcacacccacagacaaaaagataggatttttgggccttggtctcatgggaagtggaatcgtctccaacttgctaaaaatgggtcacacagtgactgtctggaaccgcactgcagagaaagagggggcccgtctgggaagaacccccgctgaagtcgtctcaacctgcgacatcactttcgcctgcgtgtcggatcccaaggcggccaaggacctggtgctgggccccagtggtgtgctgcaagggatccgccctgggaagtgctacgtggacatgtcaacagtggacgctgacaccgtcactgagctggcccaggtgattgtgtccaggggggggcgctttctggaagcccccgtctcagggaatcagcagctgtctaatgacgggatgttggtgatcttagcggctggagacaggggcttatatgaggactgcagcagctgcttccaggcgatggggaagacctccttcttcctaggtgaagtgggcaatgcagccaagatgatgctgatcgtgaacatggtccaagggagcttcatggccactattgccgaggggctgaccctggcccasgtgacaggccagtcccagcagacactcttggacatcctcaatcagggacagttggccagcatcttcctggaccagaagtgccaaaatatcctgcaaggaaactttaagcctgatttctacctgaaatacattcagaaggatctccgcttagccattgcgctgggtgatgcggtcaaccatccgactcccatggcagctgcagcaaatgaggtgtacaaaagagccaaggcgctggaccagtctgacaacgatatgtccgccgtgtaccgagcctacatacactaagctgtcgacaccccgccctcacccctccaatcccccctctgaccccctcttcctcacatggggtcgggggcctgggagttcattctggaccagcccacctatctccatttccttttatacagactttgagacttgccatcagcacagcacacagcagcacccttcccctgaggccggtggggaggggacaagtgtcagcaggattggcgtgtgggaaagctcttgagctgggcactggccccccggacgaggtggctgtgtgttcacacacacacacacacacacacacacacacacacacacaggctctcgccccaggatagaagctgcccagaaactgctgcctggctttttttcttccgagcttgtcttatctcaaaccccttccagtcaaggaactagaatcagcaacgagagttggaagccttcccacagcttcccccagagcgaagaggctgtagtcatgtccccatcccccactggattccctacaaggagaggccttgggcccagatgagccagtacagactccagacagaggggcccttggggccctccaacctcaggtgatgagctgagaaagatgttcacgtctaagcgtccagtgtgcacccagcgctccatagacgcctttgtgaactgaaaagagactggcagagtcccgagaagatggggccctggctttccagggagtgcagcaagcagccggcctgcaggtgagcatggaggcccggccctcaccgcctcgaagccatgccccagatgccactgccacagcgggcgctcgctcctccctaggctgttttagtatttggatttgcattccatcccttgggagggagtcctcagggccactagtgatgagccaagaggagtgggggttgggggcgctcctttctgtttccgttaggccacagactcttcacctggctctgaagagccactcttacctcggtcccctcccagtggtcccaccttctccaccctgccctgccaagtcccctgcatgcccaccgctctccatcctccctcctctccctcttcctcccgtggagacagtatttctttctgtctgtccctttggcccagacccagcctgaccaacgatgagcatttcttaggctcagctcttgatacggaaacgagtgtcttcactccagccagcatcatggtcttcggtgcttcccgggcccggggtctgtcgggagggaagagaactgggcctgacctacctgaactgactggccctccgaggtgggtctgggacatcctagaggccctacatttgtccttggataggggaccggggggggcttggaatgttgcaaaaaaaaaagttacccaagggatgtcagttttttatccctctgcatgggttggattttccaaaatcataatttgcagaaggaaggccagcatttaygatgcaatatgtaattatatatagggtggccacactagggcggggtccttcccccctcacagctttggcccctttcagagattagaaactgggttagaggattgcagaagacgagtggggggagggcagggaagatgcctgtcgggtttttagcacagttcatttcactgggattttgaagcatttctgtctgaacacaaagcctgttctagtcctggcggaacacactgggggtgggggcgggggaagatgcggtaatgaaaccggttagtcaattttgtcttaatattgttgacaattctgtaaagttcctttttatgaatatttctgtttaagctatttcacctttcttttgaaatccttcccttttaaggagaaaatgtgacacttgtgaaaaagcttgtaagaaagcccctcccttttttctttaaacctttaaatgacaaatctaggtaattaaggttgtgaatttttwtttttgctttgtttttaatgaacatttgtctttcagaataggattgtgtgataatgtttaaatggcaaaaacaaaacatgattttgtgcaattaacaaagctactgcaagaaaaataaaacacttcttggt

SEQ ID NO: 98 - DNA, 1485 bp, Homo sapiens
ccgcctctcgccgccgcgcccccgcccgccggtctcctccctcctcctcctcccgtttgcccctcccccgccgctccggagcggagcctgcgagacggagaaactggggcagaagtgaagatggcggcggcagcttctcgctagtgacgcgcggtgcgggctcatctccttcccctccttcctcacctcccctagtccggaccccgtccgccgccgggaccagaccgtccycgtagcccgcagccagcagccgcccctctcctcccccggccgcccctctcccaacgcccgtctgccgctggccggcggcgcgcccctggtcccggccgcctgcctcgcactccgcgctgtcgccgggggagcgggtggcgtgtggattcgccctcctgcccgcccctccgggccgcggacacacgcccggcagggaggcggcggcggcccctgcgtatttgcttccctccatttggggactgggaggcggcggcggctgtgggttttggggaggggtagagggctggggggcgggcgagagcgggagggggccgccctcgagtggaggacgagaaggaaagcaccatgacgtccatccatttcgtggttcacccgctgccgggcaccgaggaccagctcaatgacaggttacgagaagtttctgagaagctgaacaaatataatttaaacagccacccccctttgaatgtattggaacaggctactattaaacagtgtgtggtgggaccaaatcatgctgcctttcttcttgaggatggtagagtttgcaggattggtttttcagtacagccagacagattggaattgggtaaacctgataataatgatgggtcaaagttgaacagcaactcgggggcagggaggacgtcaaggcctggtaggacaagcgactctccatggtttctctcaggttctgagactctaggcaggctggcaggcaacaccttagggtaagttgtggccagttgaaggcaccatcttacagatggtctgtatcatcttcctgtgagtgctctcagtctgaatgatcatcttcaatattctatctagtgatggagtgagaaaattctcctgaactctgggcaggaagttcatattgctcagggtgagccaccatgataaaaataactcacacaggctaattacaattaatctaggctcttgacctttaaaaaatgtatataatgtttacatatgtttataatgtcacgccatttatttcatttaaaattttaaatgattttatctttggtcctctcttacaacttattcttggtacaacttattctttgtactataacagcagagatgagtaattgggacagactagcctccaaagcataaacttatttatgatttggccctttacagtaaaagtctgctcatcccaggttttgcttgtcaatttatatactggcgtttgttcctgatcctatttatttatttctggcatccaactctggtagttctttc

SEQ ID NO: 99 - DNA, 11065 bp, Homo sapiens
ccgcctctcgccgccgcgcccccgcccgccggtctcctccctcctcctcctcccgtttgcccctcccccgccgctccggagcggagcctgcgagacggagaaactggggcagaagtgaagatggcggcggcagcttctcgctagtgacgcgcggtgcgggctcatctccttcccctccttcctcacctcccctagtccggaccccgtccgccgccgggaccagaccgtccycgtagcccgcagccagcagccgcccctctcctcccccggccgcccctctcccaacgcccgtctgccgctggccggcggcgcgcccctggtcccggccgcctgcctcgcactccgcgctgtcgccgggggagcgggtggcgtgtggattcgccctcctgcccgcccctccgggccgcggacacacgcccggcagggaggcggcggcggcccctgcgtatttgcttccctccatttggggactgggaggcggcggcggctgtgggttttggggaggggtagagggctggggggcgggcgagagcgggagggggccgccctcgagtggaggacgagaaggaaagcaccatgacgtccatccatttcgtggttcacccgctgccgggcaccgaggaccagctcaatgacaggttacgagaagtttctgagaagctgaacaaatataatttaaacagccacccccctttgaatgtattggaacaggctactattaaacagtgtgtggtgggaccaaatcatgctgcctttcttcttgaggatggtagagtttgcaggattggtttttcagtacagccagacagattggaattgggtaaacctgataataatgatgggtcaaagttgaacagcaactcgggggcagggaggacgtcaaggcctggtaggacaagcgactctccatggtttctctcaggttctgagactctaggcaggctggcaggcaacaccttaggaagccgctggagttctggagtgggtggaagtggtggaggatcctctggtaggtcatcagctggagctcgagattcccgccggcagactcgagttattcggacaggacgggatcgagggtctgggcttttgggcagtcagccccagccagttattccagcatctgtcattccagaggagctgatttcacaggcccaagttgttttacaaggcaaatccagaagtgtcattattcgagaacttcagagaacaaatcttgatgtgaaccttgctgtaaataatttacttagccgggatgatgaagatggagatgatggggatgatacagccagcgaatcttatttgcctggagaggatcttatgtctctccttgatgccgacattcattctgcccacccaagtgtcattattgatgcagatgccatgttttctgaagacattagctattttggttacccttcttttcgtcgttcatcactttccaggctaggctcatctcgagttctccttcttcccttagagagagactctgagctgttgcgtgaacgtgaatccgttttacgtttacgtgaacgaaggtggcttgatggagcctcatttgataatgaaaggggttctaccagcaaggaaggagagccaaacttggataagaagaatacacctgttcaaagtccagtatctctaggagaagatttgcagtggtggcctgataaggatggaacaaaattcatctgtattggggctctgtattctgaacttctggctgtcagcagtaaaggagaactttatcagtggaaatggagtgaatctgagccttacagaaatgcccagaatccttcattacatcatccacgagcaacatttttggggttaaccaatgaaaagatagtcctcctgtctgcaaatagcataagagcaactgtagctacagaaaataacaaggttgctacatgggtggatgaaactttaagttctgtggcttctaaattagagcacactgctcagacttactctgaacttcaaggagagcggatagtttctttacattgctgtgccctttacacctgcgctcagctggaaaacagtttatattggtggggtgtagttccttttagtcaaaggaagaaaatgttagagaaagctagagcaaaaaataaaaagcctaaatccagtgctggtatttcttcaatgccgaacatcactgttggtacccaggtatgcttgagaaataatcctctttatcatgctggagcagttgcattttcaattagtgctgggattcctaaagttggtgtcttaatggagtcagtttggaatatgaatgacagctgtagatttcaacttagatctcctgaaagcttgaaaaacatggaaaaagctagcaaaactactgaagctaagcctgaaagtaagcaggagccagtgaaaacagaaatgggtcctccaccatctccagcatccacgtgtagtgatgcatcctcaattgccagcagtgcatcaatgccatacaaacgacgacggtcaacccctgcaccaaaagaagaggaaaaggtgaatgaagagcagtggtctcttcgggaagtggtttttgtggaagatgtcaagaatgttcctgttggcaaggtgctaaaagtagatggtgcctatgttgctgtaaaatttccaggaacctccagtaatactaactgtcagaacagctctggtccagatgctgacccttcttctctcctgcaggattgtaggttacttagaattgatgaattgcaggttgtcaaaactggtggaacaccgaaggttcccgactgtttccaaaggactcctaaaaagctttgtatacctgaaaaaacagaaatattagcagtgaatgtagattccaaaggtgttcatgctgttctgaagactggaaattgggtacgatactgtatctttgatcttgctacaggaaaagcagaacaggaaaataattttcctacaagcagcattgctttccttggtcagaatgagaggaatgtagccattttcactgctggacaggaatctcccattattcttcgagatggaaatggtaccatctacccaatggccaaagattgcatgggaggaataagggatcccgattggctggatcttccacctattagtagtcttggaatgggtgtgcattctttaataaatcttcctgccaattcaacaatcaaaaagaaagctgctgttatcatcatggctgtagagaaacaaaccttaatgcaacacattctgcgctgtgactatgaggcctgtcgacaatatctaatgaatcttgagcaagcggttgttttagagcagaatctacagatgctgcagacattcatcagccacagatgtgatggaaatcgaaatattttgcatgcttgtgtatcagtttgctttccaaccagcaataaagaaactaaagaagaagaggaagcggagcgttctgaaagaaatacatttgcagaaaggctttctgctgttgaggccattgcaaatgcaatatcagttgtttcaagtaatggcccaggtaatcgggctggatcatcaagtagccgaagtttgagattacgggaaatgatgagacgttcgttgagagcagctggtttgggtagacatgaagctggagcttcatccagtgaccaccaggatccagtttcaccccccatagctccccctagttgggttcctgaccctcctgcgatggatcctgatggtgacattgattttatcctggcccccgctgtgggatctcttaccacagcagcaaccggtactggtcaaggaccaagcacctccactattccaggtccttccacagagccatctgtagtagaatccaaggatcgaaaggcraatgctcattttatattgaaattgttatgtgacagtgtggttctccagccctatctacgagaacttctttctgccaaggatgcaagagggatgaccccatttatgtcagctgtaagtggccgagcttatcctgctgcaattaccatcttagaaactgctcagaaaattgcaaaagctgaaatatcctcaagtgaaaaagaggaagatgtattcatgggaatggtttgcccatcaggtaccaaccctgatgactctcctttatatgttttatgttgtaatgacacttgcagttttacatggactggagcagagcacattaaccaggatatttttgagtgtcgaacttgtggcttgctggagtcactgtgttgttgtacggaatgtgcaagggtttgtcataaaggtcatgattgcaaactcaaacggacatcaccaacagcctactgtgattgttgggagaaatgtaaatgtaaaactcttattgctggacagaaatctgctcgtcttgatctactttatcgcctgctcactgctactaatctggttactctgccaaacagcaggggagagcacctcttactattcttagtacagacagtcgcaaggcagacggtggagcattgtcaatacaggccacctcgaatcagggaagatcgtaaccgaaaaacagccagtcctgaagattcagatatgccagatcatgatttrgagcctccaagatttgcccagcttgcattggagcgtgttctacaggactggaatgccttgaaatctatgattatgtttgggtcgcaggagaataaagaycctcttagtgccagcagtagaataggccatcttttgccagaagagcaagtatacctcaatcagcaaagtggcacaattcggctggactgtttcactcattgccttatagttaagtgtacagcagatattttgcttttagatactctactaggtacactagtgaaagaactccaaaacaaatatacacctggacgtagagaagaagctattgctgtgacaatgaggtttctacgttcagtggcaagagtttttgttattctgagtgtggaaatggcttcatccaaaaagaaaaacaactttattccacagccaattggaaaatgcaagcgtgtrttccaagcattgctaccttacgctgtggaagaattgtgcaacgtagcagagtcactgattgttcctgtcagaatggggattgctcgtccaactgcaccatttaccctggctagtactagcatagatgccatgcagggcagtgaagaattattttcagtggaaccactaccaccacgaccatcatctgatcagtctagcagctccagtcagtctcagtcatcctacatcatcaggaatccacagcagaggcgcatcagccagtcacagcccgttcggggcagagatgaagaacaggatgatattgtttcagcagatgtggaagaggttgaggtggtggagggtgtggctggagaagaggatcatcatgatgaacaggaagaacacggggaagaaaatgctgaggcagagggacaacatgatgagcatgatgaagacgggagtgatatggagctggacttgttagcagcagctgaaacagaaagtgatagtgaaagtaaccacagcaaccaagataatgctagtgggcgcagaagcgttgtcactgcagcaactgctggttcagaagcaggagcaagcagtgttcctgccttcttttctgaagatgattctcaatcgaatgactcaagtgattctgatagcagtagtagtcagagtgacgacatagaacaggagacctttatgcttgatgagccattagaaagaaccacaaatagctcccatgccaatggtgctgcccaagctccccgttcaatgcagtgggctgtccgcaacacccagcatcagcgagcagccagtacagccccttccagtacatctacaccagcaggcaattcagcgggtttgatttatattgatccttcaaacttacgccggagtggtaccatcagtacaagtgctgcagctgcagcagctgctttggaagctagcaacgccagcagttacctaacatctgcaagcagtttagccagggcttacagcattgtcattagacaaatctcggacttgatgggccttattcctaagtataatcacctagtatactctcagattccagcagctgtgaaattgacttaccaagatgcagtaaacttacagaactatgtagaagaaaagcttattcccacttggaactggatggtcagtattatggattctactgaagctcaattacgttatggttctgcattagcatctgctggtgatcctggacatccaaatcatcctcttcacgcttctcagaattcagcgagaagagagaggatgactgcgcgagaagaagctagcttacgaacacttgaaggcagacgacgtgccaccttgcttagcgcccgtcaaggaatgatgtctgcacgaggagacttcctaaattatgctctgtctctaatgcggtctcataaygatgagcattctgatgttcttccagttttggatgtttgctcattgaagcatgtggcatatgtttttcaagcacttatatactggattaaggcaatgaatcagcagacaacattggatacacctcaactagaacgcaaaaggacgcgagaactcttggaactgggtattgataatgaagattcagaacatgaaaatgatgatgacaccaatcaaagtgctactttgaatgataaggatgatgacyctcttcctgcagaaactggccaaaaccatccatttttccgacgttcagactccatgacattccttgggtgtatacccccaaatccatttgaagtgcctctggctgaagccatccccttggctgatcagccacatctgttgcagccaaatgctagaaaggaggatctttttggccgtccaagtcagggtctttattcttcatctgccagtagtgggaaatgtttaatggaggttacagtggatagaaactgcctagaggttcttccaacaaaaatgtcttatgctgccaatctgaaaaatgtaatgaacatgcaaaaccggcaaaaaaaagaaggggaagaacagcccgtgctgccagaagaaactgagagttcaaaaccagggccatctgctcatgatcttgctgcacaattaaaaagtagcttactagcagaaataggacttactgaaagtgaagggccacctctcacatctttcaggccacagtgtagctttatgggaatggttatttcccatgatatgctgctaggacgttggcgcctttctttagaactgttcggcagggtattcatggaagatgttggagcagaacctggatcaatcctaactgaattgggtggttttgaggtaaaagaatcaaaattccgcagagaaatggaaaaactgagaaaccagcagtcaagagatttgtcactagaggttgatcgggatcgagatcttctcattcagcagactatgaggcagcttaacaatcactttggtcgaagatgtgctactacaccaatggctgtacacagagtaaaagtcacatttaaggatgagccaggagagggcagtggtgtagcacgaagtttttatacagccattgcacaagcatttttatcaaatgaaaaattgccaaatctagagtgtatccaaaatgccaacaaaggcacccacacaagtttaatgcagagattaaggaaccgaggagagagagaccgggaaagggagagagaaagggaaatgaggaggagtagtggtttgcgagcaggttctcggagggaccgggatagagactttagaagacagctttccatcgacactaggccctttagaccagcctctgaagggaatcctagcgatgatcctgagcctttgccagcacatcggcaggcacttggagagaggctttatcctcgtgtacaagcaatgcaaccagcatttgcaagtaaaatcactggcatgttgttggaattatccccagctcagctgcttctccttctagcaagtgaggattctctgagagcaagagtggatgaggccatggaactcattattgcacatggacgggaaaatggagctgatagtatcctggatcttggattagtagactcctcagaaaaggtacaggaaaaccgaaagcgccatggctctagtcgaagtgtagtagatatggatttagatgatacagatgatggtgatgacaatgcccctttgttttaccaacctgggaaaagaggattttatactccaaggcctggcaagaacacagaagcaaggttgaattgtttcagaaacattggcaggattcttggactatgtctgttacagaatgaactmtgtcctatcacattgaatagacatgtaattaaagtattgcttggtagaaaagtsaattggcatgattttgctttttttgatcctgtaatgtatgagagtttgcggcaactaatcctcgcgtctcagagttcagatgctgatgctgttttctcagcaatggatttggcatttgcaattgacctgtgtaaagaagaaggtggaggacaggttgaactcattcctaatggtgtaaatataccagtcactccacagaatgtatatgagtatgtgcggaaatacgcagaacacagaatgttggtagttgcagaacagcccttacatgcaatgaggaaaggtctactagatgtgcttccaaaaaattcattagaagatttaacggcagaagattttaggcttttggtaaatggctgcggtgaaktcaatgtgcaaatgctgatcagttttacctctttcaatgatgaatcaggagaaaatgctgagaagcttctgcagttcaagcgttggttctggtcaatagtagagaagatgagcatgacagaacgacaagatcttgtttacttttggacatcaagcccatcactgccagccagtgaagaaggattccagcctatgccctcaatcacaataagaccaccagatgaccaacatcttcctactgcaaatacttgcatttctcgactttacgtcccactctattcctctaaacagattctcaaacagaaattgttactcgccattaagaccaagaattttggttttgtgtagagtataaaaagtgtgtattgctgtgtaatattactagcaaattttgtagatttttttccatttgtctataaaagtttatggaagttaatgctgtcatacccccctggtggtaccttaaagagataaaatgcagacattccttgctgagtttatagcttaaaggcctaaggagcactagcaacatttggctatattggtttgctagtcaccaacttctgggtctaaccccagccaaagatgacagcagaacaacataatttacactgtgatttatctttttgctgaggggraaaaaatgtaaatgttctgaaaattcactgctgcctttgtggaaactgtttcagcaaaggttcttgtatagagggaatagggaatttcaaaataaaaaattaagtatgttctgtgttttcattttaactttttttatggtgtttaatttgtggttggctgcaactgtgtatcatgtatatggaacttgtaaaaaagttctcgacattcagatcttaagagatgaaatcacttttacctataaaaaccacttttattgcggtttgactgcattgagctctaggatattaaatgatatcactaatattttgcatgtaatttgctcatttgagtgagggcactttttttgtacatatgatggggccaatgcacaatacttttatcacaatcaactttttctttgtatccctatttcaatgagcagtcagtctcaagaggttactgcacttcagttctaactagacatttgtactaaggtatttcagttatgtaaactcagcctgggcactttctgataactgtaaaatgttttataagatcatgattattgaagatacattttggaaaattttaaatgttcgtgagcagcttaactacttttgtatctagccttttttaagtatcttgttacatttacttttttaaataaagaaattacagaagaaatgtcaagtaatattgaagaaacaatagtttttatttatgtagttgtacatttttaaactaagggcaatacactgacatggttatgtgcataaaaattttgacttaaagaactggaagtttatatacacctggactataagaaacagaagaaaatcagtccacattttacagttagcagagaatcctaaatggcactggcctggccaccttttcattttacaaatgggggaagtgaagtgtgaccccttacttggcataggaagttaacttacacctaataactgacaggtttttgttttgatgacctattaattatgtagcctaggattaatatcccaaaattactctggtttaagtagctttattcagtggcataataacactgttttcttccttaagtcttcaatgaagtgacttaaaacagtcactttacatattaaaaaygaggagagcaattctctggaatctctcctttcagttcctttgtaggatttctggccttgaggatagtcttcatgttcaaaggcactatgcttttattatataacttccttcagaagactgaaccacatgatattctcagccctgttaacactaaaaatatttaaaactgaatgatagtagtgactcattgtattacttaaaacttatataacacgctgtattagatgtgtgtaaattagccaaaggttattttacaaagtgagacattggtttttatgtctaaatgctatttctgaataaatgaaatagtaattagatcaagagctgattagcatcaatgtgtttgaaagatataaaatttatacatcaccttaacctctgtatgcacatgatgggattgataaaatattaaatgagaacaaactagatatgattaggacatttgaaaccctaattgtgaatttatttttaatagttactgaaatgaaaatatttaaaataatgcacaatgtcttaagtcttcctaaatcaagattttggttaaaaaatacttctaataatagtaaaagattttttttttaagtaaatcataaaacggttctaaatgtaaaataaagacatgtaaaataaagttctcttttggtcttgtttagtgtttaaatctaacaattgaaaacaaatttaggaagagaag

SEQ ID NO: 100 - DNA, 11066 bp, Homo sapiens
ccgcctctcgccgccgcgcccccgcccgccggtctcctccctcctcctcctcccgtttgcccctcccccgccgctccggagcggagcctgcgagacggagaaactggggcagaagtgaagatggcggcggcagcttctcgctagtgacgcgcggtgcgggctcatctccttcccctccttcctcacctcccctagtccggaccccgtccgccgccgggaccagaccgtccycgtagcccgcagccagcagccgcccctctcctcccccggccgcccctctcccaacgcccgtctgccgctggccggcggcgcgcccctggtcccggccgcctgcctcgcactccgcgctgtcgccgggggagcgggtggcgtgtggattcgccctcctgcccgcccctccgggccgcggacacacgcccggcagggaggcggcggcggcccctgcgtatttgcttccctccatttggggactgggaggcggcggcggctgtgggttttggggaggggtagagggctggggggcgggcgagagcgggagggggccgccctcgagtggaggacgagaaggaaagcaccatgacgtccatccatttcgtggttcacccgctgccgggcaccgaggaccagctcaatgacaggttacgagaagtttctgagaagctgaacaaatataatttaaacagccacccccctttgaatgtattggaacaggctactattaaacagtgtgtggtgggaccaaatcatgctgcctttcttcttgaggatggtagagtttgcaggattggtttttcagtacagccagacagattggaattgggtaaacctgataataatgatgggtcaaagttgaacagcaactcgggggcagggaggacgtcaaggcctggtaggacaagcgactctccatggtttctctcaggttctgagactctaggcaggctggcaggcaacaccttaggaagccgctggagttctggagtgggtggaagtggtggaggatcctctggtaggtcatcagctggagctcgagattcccgccggcagactcgagttattcggacaggacgggatcgagggtctgggcttttgggcagtcagccccagccagttattccagcatctgtcattccagaggagctgatttcacaggcccaagttgttttacaaggcaaatccagaagtgtcattattcgagaacttcagagaacaaatcttgatgtgaaccttgctgtaaataatttacttagccgggatgatgaagatggagatgatggggatgatacagccagcgaatcttatttgcctggagaggatcttatgtctctccttgatgccgacattcattctgcccacccaagtgtcattattgatgcagatgccatgttttctgaagacattagctattttggttacccttcttttcgtcgttcatcactttccaggctaggctcatctcgagttctccttcttcccttagagagagactctgagctgttgcgtgaacgtgaatccgttttacgtttacgtgaacgaaggtggcttgatggagcctcatttgataatgaaaggggttctaccagcaaggaaggagagccaaacttggataagaagaatacacctgttcaaagtccagtatctctaggagaagatttgcagtggtggcctgataaggatggaacaaaattcatctgtattggggctctgtattctgaacttctggctgtcagcagtaaaggagaactttatcagtggaaatggagtgaatctgagccttacagaaatgcccagaatccttcattacatcatccacgagcaacatttttggggttaaccaatgaaaagatagtcctcctgtctgcaaatagcataagagcaactgtagctacagaaaataacaaggttgctacatgggtggatgaaactttaagttctgtggcttctaaattagagcacactgctcagacttactctgaacttcaaggagagcggatagtttctttacattgctgtgccctttacacctgcgctcagctggaaaacagtttatattggtggggtgtagttccttttagtcaaaggaagaaaatgttagagaaagctagagcaaaaaataaaaagcctaaatccagtgctggtatttcttcaatgccgaacatcactgttggtacccaggtatgcttgagaaataatcctctttatcatgctggagcagttgcattttcaattagtgctgggattcctaaagttggtgtcttaatggagtcagtttggaatatgaatgacagctgtagatttcaacttagatctcctgaaagcttgaaaaacatggaaaaagctagcaaaactactgaagctaagcctgaaagtaagcaggagccagtgaaaacagaaatgggtcctccaccatctccagcatccacgtgtagtgatgcatcctcaattgccagcagtgcatcaatgccatacaaacgacgacggtcaacccctgcaccaaaagaagaggaaaaggtgaatgaagagcagtggtctcttcgggaagtggtttttgtggaagatgtcaagaatgttcctgttggcaaggtgctaaaagtagatggtgcctatgttgctgtaaaatttccaggaacctccagtaatactaactgtcagaacagctctggtccagatgctgacccttcttctctcctgcaggattgtaggttacttagaattgatgaattgcaggttgtcaaaactggtggaacaccgaaggttcccgactgtttccaaaggactcctaaaaagctttgtatacctgaaaaaacagaaatattagcagtgaatgtagattccaaaggtgttcatgctgttctgaagactggaaattgggtacgatactgtatctttgatcttgctacaggaaaagcagaacaggaaaataattttcctacaagcagcattgctttccttggtcagaatgagaggaatgtagccattttcactgctggacaggaatctcccattattcttcgagatggaaatggtaccatctacccaatggccaaagattgcatgggaggaataagggatcccgattggctggatcttccacctattagtagtcttggaatgggtgtgcattctttaataaatcttcctgccaattcaacaatcaaaaagaaagctgctgttatcatcatggctgtagagaaacaaaccttaatgcaacacattctgcgctgtgactatgaggcctgtcgacaatatctaatgaatcttgagcaagcggttgttttagagcagaatctacagatgctgcagacattcatcagccacagatgtgatggaaatcgaaatattttgcatgcttgtgtatcagtttgctttccaaccagcaataaagaaactaaagaagaagaggaagcggagcgttctgaaagaaatacatttgcagaaaggctttctgctgttgaggccattgcaaatgcaatatcagttgtttcaagtaatggcccaggtaatcgggctggatcatcaagtagccgaagtttgagattacgggaaatgatgagacgttcgttgagagcagctggtttgggtagacatgaagctggagcttcatccagtgaccaccaggatccagtttcaccccccatagctccccctagttgggttcctgaccctcctgcgatggatcctgatggtgacattgattttatcctggcccccgctgtgggatctcttaccacagcagcaaccggtactggtcaaggaccaagcacctccactattccaggtccttccacagagccatctgtagtagaatccaaggatcgaaaggcraatgctcattttatattgaaattgttatgtgacagtgtggttctccagccctatctacgagaacttctttctgccaaggatgcaagagggatgaccccatttatgtcagctgtaagtggccgagcttatcctgctgcaattaccatcttagaaactgctcagaaaattgcaaaagctgaaatatcctcaagtgaaaaagaggaagatgtattcatgggaatggtttgcccatcaggtaccaaccctgatgactctcctttatatgttttatgttgtaatgacacttgcagttttacatggactggagcagagcacattaaccaggatatttttgagtgtcgaacttgtggcttgctggagtcactgtgttgttgtacggaatgtgcaagggtttgtcataaaggtcatgattgcaaactcaaacggacatcaccaacagcctactgtgattgttgggagaaatgtaaatgtaaaactcttattgctggacagaaatctgctcgtcttgatctactttatcgcctgctcactgctactaatctggttactctgccaaacagcgggagagcacctcttactattcttagtacagacagtcgcaaggcagacggtggagcattgtcaatacaggccacctcgaatcagggaagatcgtaaccgaaaaacagccagtcctgaagattcagatatgccagatcatgatttrgagcctccaagatttgcccagcttgcattggagcgtgttctacaggactggaatgccttgaaatctatgattatgtttgggtcgcaggagaataaagaycctcttagtgccagcagtagaataggccatcttttgccagaagagcaagtatacctcaatcagcaaagtggcacaattcggctggactgtttcactcattgccttatagttaagtgtacagcagatattttgcttttagatactctactaggtacactagtgaaagaactccaaaacaaatatacacctggacgtagagaagaagctattgctgtgacaatgaggtttctacgttcagtggcaagagtttttgttattctgagtgtggaaatggcttcatccaaaaagaaaaacaactttattccacagccaattggaaaatgcaagcgtgtrttccaagcattgctaccttacgctgtggaagaattgtgcaacgtagcagagtcactgattgttcctgtcagaatggggattgctcgtccaactgcaccatttaccctggctagtactagcatagatgccatgcagggcagtgaagaattattttcagtggaaccactaccaccacgaccatcatctgatcagtctagcagctccagtcagtctcagtcatcctacatcatcaggaatccacagcagaggcgcatcagccagtcacagcccgttcggggcagagatgaagaacaggatgatattgtttcagcagatgtggaagaggttgaggtggtggagggtgtggctggagaagaggatcatcatgatgaacaggaagaacacggggaagaaaatgctgaggcagagggacaacatgatgagcatgatgaagacgggagtgatatggagctggacttgttagcagcagctgaaacagaaagtgatagtgaaagtaaccacagcaaccaagataatgctagtgggcgcagaagcgttgtcactgcagcaactgctggttcagaagcaggagcaagcagtgttcctgccttcttttctgaagatgattctcaatcgaatgactcaagtgattctgatagcagtagtagtcagagtgacgacatagaacaggagacctttatgcttgatgagccattagaaagaaccacaaatagctcccatgccaatggtgctgcccaagctccccgttcaatgcagtgggctgtccgcaacacccagcatcagcgagcagccagtacagccccttccagtacatctacaccagcaggcaattcagcgggtttgatttatattgatccttcaaacttacgccggagtggtaccatcagtacaagtgctgcagctgcagcagctgctttggaagctagcaacgccagcagttacctaacatctgcaagcagtttagccagggcttacagcattgtcattagacaaatctcggacttgatgggccttattcctaagtataatcacctagtatactctcagattccagcagctgtgaaattgacttaccaagatgcagtaaacttacagaactatgtagaagaaaagcttattcccacttggaactggatggtcagtattatggattctactgaagctcaattacgttatggttctgcattagcatctgctggtgatcctggacatccaaatcatcctcttcacgcttctcagaattcagcgagaagagagaggatgactgcgcgagaagaagctagcttacgaacacttgaaggcagacgacgtgccaccttgcttagcgcccgtcaaggaatgatgtctgcacgaggagacttcctaaattatgctctgtctctaatgcggtctcataaygatgagcattctgatgttcttccagttttggatgtttgctcattgaagcatgtggcatatgtttttcaagcacttatatactggattaaggcaatgaatcagcagacaacattggatacacctcaactagaacgcaaaaggacgcgagaactcttggaactgggtattgataatgaagattcagaacatgaaaatgatgatgacaccaatcaaagtgctactttgaatgataaggatgatgacyctcttcctgcagaaactggccaaaaccatccatttttccgacgttcagactccatgacattccttgggtgtatacccccaaatccatttgaagtgcctctggctgaagccatccccttggctgatcagccacatctgttgcagccaaatgctagaaaggaggatctttttggccgtccaagtcagggtctttattcttcatctgccagtagtgggaaatgtttaatggaggttacagtggatagaaactgcctagaggttcttccaacaaaaatgtcttatgctgccaatctgaaaaatgtaatgaacatgcaaaaccggcaaaaaaaagaaggggaagaacagcccgtgctgccagaagaaactgagagttcaaaaccagggccatctgctcatgatcttgctgcacaattaaaaagtagcttactagcagaaataggacttactgaaagtgaagggccacctctcacatctttcaggccacagtgtagctttatgggaatggttatttcccatgatatgctgctaggacgttggcgcctttctttagaactgttcggcagggtattcatggaagatgttggagcagaacctggatcaatcctaactgaattgggtggttttgaggtaaaagaatcaaaattccgcagagaaatggaaaaactgagaaaccagcagtcaagagatttgtcactagaggttgatcgggatcgagatcttctcattcagcagactatgaggcagcttaacaatcactttggtcgaagatgtgctactacaccaatggctgtacacagagtaaaagtcacatttaaggatgagccaggagagggcagtggtgtagcacgaagtttttatacagccattgcacaagcatttttatcaaatgaaaaattgccaaatctagagtgtatccaaaatgccaacaaaggcacccacacaagtttaatgcagagattaaggaaccgaggagagagagaccgggaaagggagagagaaagggaaatgaggaggagtagtggtttgcgagcaggttctcggagggaccgggatagagactttagaagacagctttccatcgacactaggccctttagaccagcctctgaagggaatcctagcgatgatcctgagcctttgccagcacatcggcaggcacttggagagaggctttatcctcgtgtacaagcaatgcaaccagcatttgcaagtaaaatcactggcatgttgttggaattatccccagctcagctgcttctccttctagcaagtgaggattctctgagagcaagagtggatgaggccatggaactcattattgcacatggacgggaaaatggagctgatagtatcctggatcttggattagtagactcctcagaaaaggtacagcaggaaaaccgaaagcgccatggctctagtcgaagtgtagtagatatggatttagatgatacagatgatggtgatgacaatgcccctttgttttaccaacctgggaaaagaggattttatactccaaggcctggcaagaacacagaagcaaggttgaattgtttcagaaacattggcaggattcttggactatgtctgttacagaatgaactmtgtcctatcacattgaatagacatgtaattaaagtattgcttggtagaaaagtsaattggcatgattttgctttttttgatcctgtaatgtatgagagtttgcggcaactaatcctcgcgtctcagagttcagatgctgatgctgttttctcagcaatggatttggcatttgcaattgacctgtgtaaagaagaaggtggaggacaggttgaactcattcctaatggtgtaaatataccagtcactccacagaatgtatatgagtatgtgcggaaatacgcagaacacagaatgttggtagttgcagaacagcccttacatgcaatgaggaaaggtctactagatgtgcttccaaaaaattcattagaagatttaacggcagaagattttaggcttttggtaaatggctgcggtgaaktcaatgtgcaaatgctgatcagttttacctctttcaatgatgaatcaggagaaaatgctgagaagcttctgcagttcaagcgttggttctggtcaatagtagagaagatgagcatgacagaacgacaagatcttgtttacttttggacatcaagcccatcactgccagccagtgaagaaggattccagcctatgccctcaatcacaataagaccaccagatgaccaacatcttcctactgcaaatacttgcatttctcgactttacgtcccactctattcctctaaacagattctcaaacagaaattgttactcgccattaagaccaagaattttggttttgtgtagagtataaaaagtgtgtattgctgtgtaatattactagcaaattttgtagatttttttccatttgtctataaaagtttatggaagttaatgctgtcatacccccctggtggtaccttaaagagataaaatgcagacattccttgctgagtttatagcttaaaggcctaaggagcactagcaacatttggctatattggtttgctagtcaccaacttctgggtctaaccccagccaaagatgacagcagaacaacataatttacactgtgatttatctttttgctgaggggraaaaaatgtaaatgttctgaaaattcactgctgcctttgtggaaactgtttcagcaaaggttcttgtatagagggaatagggaatttcaaaataaaaaattaagtatgttctgtgttttcattttaactttttttatggtgtttaatttgtggttggctgcaactgtgtatcatgtatatggaacttgtaaaaaagttctcgacattcagatcttaagagatgaaatcacttttacctataaaaaccacttttattgcggtttgactgcattgagctctaggatattaaatgatatcactaatattttgcatgtaatttgctcatttgagtgagggcactttttttgtacatatgatggggccaatgcacaatacttttatcacaatcaactttttctttgtatccctatttcaatgagcagtcagtctcaagaggttactgcacttcagttctaactagacatttgtactaaggtatttcagttatgtaaactcagcctgggcactttctgataactgtaaaatgttttataagatcatgattattgaagatacattttggaaaattttaaatgttcgtgagcagcttaactacttttgtatctagccttttttaagtatcttgttacatttacttttttaaataaagaaattacagaagaaatgtcaagtaatattgaagaaacaatagtttttatttatgtagttgtacatttttaaactaagggcaatacactgacatggttatgtgcataaaaattttgacttaaagaactggaagtttatatacacctggactataagaaacagaagaaaatcagtccacattttacagttagcagagaatcctaaatggcactggcctggccaccttttcattttacaaatgggggaagtgaagtgtgaccccttacttggcataggaagttaacttacacctaataactgacaggtttttgttttgatgacctattaattatgtagcctaggattaatatcccaaaattactctggtttaagtagctttattcagtggcataataacactgttttcttccttaagtcttcaatgaagtgacttaaaacagtcactttacatattaaaaaygaggagagcaattctctggaatctctcctttcagttcctttgtaggatttctggccttgaggatagtcttcatgttcaaaggcactatgcttttattatataacttccttcagaagactgaaccacatgatattctcagccctgttaacactaaaaatatttaaaactgaatgatagtagtgactcattgtattacttaaaacttatataacacgctgtattagatgtgtgtaaattagccaaaggttattttacaaagtgagacattggtttttatgtctaaatgctatttctgaataaatgaaatagtaattagatcaagagctgattagcatcaatgtgtttgaaagatataaaatttatacatcaccttaacctctgtatgcacatgatgggattgataaaatattaaatgagaacaaactagatatgattaggacatttgaaaccctaattgtgaatttatttttaatagttactgaaatgaaaatatttaaaataatgcacaatgtcttaagtcttcctaaatcaagattttggttaaaaaatacttctaataatagtaaaagattttttttttaagtaaatcataaaacggttctaaatgtaaaataaagacatgtaaaataaagttctcttttggtcttgtttagtgtttaaatctaacaattgaaaacaaatttaggaagagaag

SEQ ID NO: 101 - DNA, 11068 bp, Homo sapiens
ccgcctctcgccgccgcgcccccgcccgccggtctcctccctcctcctcctcccgtttgcccctcccccgccgctccggagcggagcctgcgagacggagaaactggggcagaagtgaagatggcggcggcagcttctcgctagtgacgcgcggtgcgggctcatctccttcccctccttcctcacctcccctagtccggaccccgtccgccgccgggaccagaccgtccycgtagcccgcagccagcagccgcccctctcctcccccggccgcccctctcccaacgcccgtctgccgctggccggcggcgcgcccctggtcccggccgcctgcctcgcactccgcgctgtcgccgggggagcgggtggcgtgtggattcgccctcctgcccgcccctccgggccgcggacacacgcccggcagggaggcggcggcggcccctgcgtatttgcttccctccatttggggactgggaggcggcggcggctgtgggttttggggaggggtagagggctggggggcgggcgagagcgggagggggccgccctcgagtggaggacgagaaggaaagcaccatgacgtccatccatttcgtggttcacccgctgccgggcaccgaggaccagctcaatgacaggttacgagaagtttctgagaagctgaacaaatataatttaaacagccacccccctttgaatgtattggaacaggctactattaaacagtgtgtggtgggaccaaatcatgctgcctttcttcttgaggatggtagagtttgcaggattggtttttcagtacagccagacagattggaattgggtaaacctgataataatgatgggtcaaagttgaacagcaactcgggggcagggaggacgtcaaggcctggtaggacaagcgactctccatggtttctctcaggttctgagactctaggcaggctggcaggcaacaccttaggaagccgctggagttctggagtgggtggaagtggtggaggatcctctggtaggtcatcagctggagctcgagattcccgccggcagactcgagttattcggacaggacgggatcgagggtctgggcttttgggcagtcagccccagccagttattccagcatctgtcattccagaggagctgatttcacaggcccaagttgttttacaaggcaaatccagaagtgtcattattcgagaacttcagagaacaaatcttgatgtgaaccttgctgtaaataatttacttagccgggatgatgaagatggagatgatggggatgatacagccagcgaatcttatttgcctggagaggatcttatgtctctccttgatgccgacattcattctgcccacccaagtgtcattattgatgcagatgccatgttttctgaagacattagctattttggttacccttcttttcgtcgttcatcactttccaggctaggctcatctcgagttctccttcttcccttagagagagactctgagctgttgcgtgaacgtgaatccgttttacgtttacgtgaacgaaggtggcttgatggagcctcatttgataatgaaaggggttctaccagcaaggaaggagagccaaacttggataagaagaatacacctgttcaaagtccagtatctctaggagaagatttgcagtggtggcctgataaggatggaacaaaattcatctgtattggggctctgtattctgaacttctggctgtcagcagtaaaggagaactttatcagtggaaatggagtgaatctgagccttacagaaatgcccagaatccttcattacatcatccacgagcaacatttttggggttaaccaatgaaaagatagtcctcctgtctgcaaatagcataagagcaactgtagctacagaaaataacaaggttgctacatgggtggatgaaactttaagttctgtggcttctaaattagagcacactgctcagacttactctgaacttcaaggagagcggatagtttctttacattgctgtgccctttacacctgcgctcagctggaaaacagtttatattggtggggtgtagttccttttagtcaaaggaagaaaatgttagagaaagctagagcaaaaaataaaaagcctaaatccagtgctggtatttcttcaatgccgaacatcactgttggtacccaggtatgcttgagaaataatcctctttatcatgctggagcagttgcattttcaattagtgctgggattcctaaagttggtgtcttaatggagtcagtttggaatatgaatgacagctgtagatttcaacttagatctcctgaaagcttgaaaaacatggaaaaagctagcaaaactactgaagctaagcctgaaagtaagcaggagccagtgaaaacagaaatgggtcctccaccatctccagcatccacgtgtagtgatgcatcctcaattgccagcagtgcatcaatgccatacaaacgacgacggtcaacccctgcaccaaaagaagaggaaaaggtgaatgaagagcagtggtctcttcgggaagtggtttttgtggaagatgtcaagaatgttcctgttggcaaggtgctaaaagtagatggtgcctatgttgctgtaaaatttccaggaacctccagtaatactaactgtcagaacagctctggtccagatgctgacccttcttctctcctgcaggattgtaggttacttagaattgatgaattgcaggttgtcaaaactggtggaacaccgaaggttcccgactgtttccaaaggactcctaaaaagctttgtatacctgaaaaaacagaaatattagcagtgaatgtagattccaaaggtgttcatgctgttctgaagactggaaattgggtacgatactgtatctttgatcttgctacaggaaaagcagaacaggaaaataattttcctacaagcagcattgctttccttggtcagaatgagaggaatgtagccattttcactgctggacaggaatctcccattattcttcgagatggaaatggtaccatctacccaatggccaaagattgcatgggaggaataagggatcccgattggctggatcttccacctattagtagtcttggaatgggtgtgcattctttaataaatcttcctgccaattcaacaatcaaaaagaaagctgctgttatcatcatggctgtagagaaacaaaccttaatgcaacacattctgcgctgtgactatgaggcctgtcgacaatatctaatgaatcttgagcaagcggttgttttagagcagaatctacagatgctgcagacattcatcagccacagatgtgatggaaatcgaaatattttgcatgcttgtgtatcagtttgctttccaaccagcaataaagaaactaaagaagaagaggaagcggagcgttctgaaagaaatacatttgcagaaaggctttctgctgttgaggccattgcaaatgcaatatcagttgtttcaagtaatggcccaggtaatcgggctggatcatcaagtagccgaagtttgagattacgggaaatgatgagacgttcgttgagagcagctggtttgggtagacatgaagctggagcttcatccagtgaccaccaggatccagtttcaccccccatagctccccctagttgggttcctgaccctcctgcgatggatcctgatggtgacattgattttatcctggcccccgctgtgggatctcttaccacagcagcaaccggtactggtcaaggaccaagcacctccactattccaggtccttccacagagccatctgtagtagaatccaaggatcgaaaggcraatgctcattttatattgaaattgttatgtgacagtgtggttctccagccctatctacgagaacttctttctgccaaggatgcaagagggatgaccccatttatgtcagctgtaagtggccgagcttatcctgctgcaattaccatcttagaaactgctcagaaaattgcaaaagctgaaatatcctcaagtgaaaaagaggaagatgtattcatgggaatggtttgcccatcaggtaccaaccctgatgactctcctttatatgttttatgttgtaatgacacttgcagttttacatggactggagcagagcacattaaccaggatatttttgagtgtcgaacttgtggcttgctggagtcactgtgttgttgtacggaatgtgcaagggtttgtcataaaggtcatgattgcaaactcaaacggacatcaccaacagcctactgtgattgttgggagaaatgtaaatgtaaaactcttattgctggacagaaatctgctcgtcttgatctactttatcgcctgctcactgctactaatctggttactctgccaaacagcaggggagagcacctcttactattcttagtacagacagtcgcaaggcagacggtggagcattgtcaatacaggccacctcgaatcagggaagatcgtaaccgaaaaacagccagtcctgaagattcagatatgccagatcatgatttrgagcctccaagatttgcccagcttgcattggagcgtgttctacaggactggaatgccttgaaatctatgattatgtttgggtcgcaggagaataaagaycctcttagtgccagcagtagaataggccatcttttgccagaagagcaagtatacctcaatcagcaaagtggcacaattcggctggactgtttcactcattgccttatagttaagtgtacagcagatattttgcttttagatactctactaggtacactagtgaaagaactccaaaacaaatatacacctggacgtagagaagaagctattgctgtgacaatgaggtttctacgttcagtggcaagagtttttgttattctgagtgtggaaatggcttcatccaaaaagaaaaacaactttattccacagccaattggaaaatgcaagcgtgtrttccaagcattgctaccttacgctgtggaagaattgtgcaacgtagcagagtcactgattgttcctgtcagaatggggattgctcgtccaactgcaccatttaccctggctagtactagcatagatgccatgcagggcagtgaagaattattttcagtggaaccactaccaccacgaccatcatctgatcagtctagcagctccagtcagtctcagtcatcctacatcatcaggaatccacagcagaggcgcatcagccagtcacagcccgttcggggcagagatgaagaacaggatgatattgtttcagcagatgtggaagaggttgaggtggtggagggtgtggctggagaagaggatcatcatgatgaacaggaagaacacggggaagaaaatgctgaggcagagggacaacatgatgagcatgatgaagacgggagtgatatggagctggacttgttagcagcagctgaaacagaaagtgatagtgaaagtaaccacagcaaccaagataatgctagtgggcgcagaagcgttgtcactgcagcaactgctggttcagaagcaggagcaagcagtgttcctgccttcttttctgaagatgattctcaatcgaatgactcaagtgattctgatagcagtagtagtcagagtgacgacatagaacaggagacctttatgcttgatgagccattagaaagaaccacaaatagctcccatgccaatggtgctgcccaagctccccgttcaatgcagtgggctgtccgcaacacccagcatcagcgagcagccagtacagccccttccagtacatctacaccagcaggcaattcagcgggtttgatttatattgatccttcaaacttacgccggagtggtaccatcagtacaagtgctgcagctgcagcagctgctttggaagctagcaacgccagcagttacctaacatctgcaagcagtttagccagggcttacagcattgtcattagacaaatctcggacttgatgggccttattcctaagtataatcacctagtatactctcagattccagcagctgtgaaattgacttaccaagatgcagtaaacttacagaactatgtagaagaaaagcttattcccacttggaactggatggtcagtattatggattctactgaagctcaattacgttatggttctgcattagcatctgctggtgatcctggacatccaaatcatcctcttcacgcttctcagaattcagcgagaagagagaggatgactgcgcgagaagaagctagcttacgaacacttgaaggcagacgacgtgccaccttgcttagcgcccgtcaaggaatgatgtctgcacgaggagacttcctaaattatgctctgtctctaatgcggtctcataaygatgagcattctgatgttcttccagttttggatgtttgctcattgaagcatgtggcatatgtttttcaagcacttatatactggattaaggcaatgaatcagcagacaacattggatacacctcaactagaacgcaaaaggacgcgagaactcttggaactgggtattgataatgaagattcagaacatgaaaatgatgatgacaccaatcaaagtgctactttgaatgataaggatgatgacyctcttcctgcagaaactggccaaaaccatccatttttccgacgttcagactccatgacattccttgggtgtatacccccaaatccatttgaagtgcctctggctgaagccatccccttggctgatcagccacatctgttgcagccaaatgctagaaaggaggatctttttggccgtccaagtcagggtctttattcttcatctgccagtagtgggaaatgtttaatggaggttacagtggatagaaactgcctagaggttcttccaacaaaaatgtcttatgctgccaatctgaaaaatgtaatgaacatgcaaaaccggcaaaaaaaagaaggggaagaacagcccgtgctgccagaagaaactgagagttcaaaaccagggccatctgctcatgatcttgctgcacaattaaaaagtagcttactagcagaaataggacttactgaaagtgaagggccacctctcacatctttcaggccacagtgtagctttatgggaatggttatttcccatgatatgctgctaggacgttggcgcctttctttagaactgttcggcagggtattcatggaagatgttggagcagaacctggatcaatcctaactgaattgggtggttttgaggtaaaagaatcaaaattccgcagagaaatggaaaaactgagaaaccagcagtcaagagatttgtcactagaggttgatcgggatcgagatcttctcattcagcagactatgaggcagcttaacaatcactttggtcgaagatgtgctactacaccaatggctgtacacagagtaaaagtcacatttaaggatgagccaggagagggcagtggtgtagcacgaagtttttatacagccattgcacaagcatttttatcaaatgaaaaattgccaaatctagagtgtatccaaaatgccaacaaaggcacccacacaagtttaatgcagagattaaggaaccgaggagagagagaccgggaaagggagagagaaagggaaatgaggaggagtagtggtttgcgagcaggttctcggagggaccgggatagagactttagaagacagctttccatcgacactaggccctttagaccagcctctgaagggaatcctagcgatgatcctgagcctttgccagcacatcggcaggcacttggagagaggctttatcctcgtgtacaagcaatgcaaccagcatttgcaagtaaaatcactggcatgttgttggaattatccccagctcagctgcttctccttctagcaagtgaggattctctgagagcaagagtggatgaggccatggaactcattattgcacatggacgggaaaatggagctgatagtatcctggatcttggattagtagactcctcagaaaaggtacagcaggaaaaccgaaagcgccatggctctagtcgaagtgtagtagatatggatttagatgatacagatgatggtgatgacaatgcccctttgttttaccaacctgggaaaagaggattttatactccaaggcctggcaagaacacagaagcaaggttgaattgtttcagaaacattggcaggattcttggactatgtctgttacagaatgaactmtgtcctatcacattgaatagacatgtaattaaagtattgcttggtagaaaagtsaattggcatgattttgctttttttgatcctgtaatgtatgagagtttgcggcaactaatcctcgcgtctcagagttcagatgctgatgctgttttctcagcaatggatttggcatttgcaattgacctgtgtaaagaagaaggtggaggacaggttgaactcattcctaatggtgtaaatataccagtcactccacagaatgtatatgagtatgtgcggaaatacgcagaacacagaatgttggtagttgcagaacagcccttacatgcaatgaggaaaggtctactagatgtgcttccaaaaaattcattagaagatttaacggcagaagattttaggcttttggtaaatggctgcggtgaaktcaatgtgcaaatgctgatcagttttacctctttcaatgatgaatcaggagaaaatgctgagaagcttctgcagttcaagcgttggttctggtcaatagtagagaagatgagcatgacagaacgacaagatcttgtttacttttggacatcaagcccatcactgccagccagtgaagaaggattccagcctatgccctcaatcacaataagaccaccagatgaccaacatcttcctactgcaaatacttgcatttctcgactttacgtcccactctattcctctaaacagattctcaaacagaaattgttactcgccattaagaccaagaattttggttttgtgtagagtataaaaagtgtgtattgctgtgtaatattactagcaaattttgtagatttttttccatttgtctataaaagtttatggaagttaatgctgtcatacccccctggtggtaccttaaagagataaaatgcagacattccttgctgagtttatagcttaaaggcctaaggagcactagcaacatttggctatattggtttgctagtcaccaacttctgggtctaaccccagccaaagatgacagcagaacaacataatttacactgtgatttatctttttgctgaggggraaaaaatgtaaatgttctgaaaattcactgctgcctttgtggaaactgtttcagcaaaggttcttgtatagagggaatagggaatttcaaaataaaaaattaagtatgttctgtgttttcattttaactttttttatggtgtttaatttgtggttggctgcaactgtgtatcatgtatatggaacttgtaaaaaagttctcgacattcagatcttaagagatgaaatcacttttacctataaaaaccacttttattgcggtttgactgcattgagctctaggatattaaatgatatcactaatattttgcatgtaatttgctcatttgagtgagggcactttttttgtacatatgatggggccaatgcacaatacttttatcacaatcaactttttctttgtatccctatttcaatgagcagtcagtctcaagaggttactgcacttcagttctaactagacatttgtactaaggtatttcagttatgtaaactcagcctgggcactttctgataactgtaaaatgttttataagatcatgattattgaagatacattttggaaaattttaaatgttcgtgagcagcttaactacttttgtatctagccttttttaagtatcttgttacatttacttttttaaataaagaaattacagaagaaatgtcaagtaatattgaagaaacaatagtttttatttatgtagttgtacatttttaaactaagggcaatacactgacatggttatgtgcataaaaattttgacttaaagaactggaagtttatatacacctggactataagaaacagaagaaaatcagtccacattttacagttagcagagaatcctaaatggcactggcctggccaccttttcattttacaaatgggggaagtgaagtgtgaccccttacttggcataggaagttaacttacacctaataactgacaggtttttgttttgatgacctattaattatgtagcctaggattaatatcccaaaattactctggtttaagtagctttattcagtggcataataacactgttttcttccttaagtcttcaatgaagtgacttaaaacagtcactttacatattaaaaaygaggagagcaattctctggaatctctcctttcagttcctttgtaggatttctggccttgaggatagtcttcatgttcaaaggcactatgcttttattatataacttccttcagaagactgaaccacatgatattctcagccctgttaacactaaaaatatttaaaactgaatgatagtagtgactcattgtattacttaaaacttatataacacgctgtattagatgtgtgtaaattagccaaaggttattttacaaagtgagacattggtttttatgtctaaatgctatttctgaataaatgaaatagtaattagatcaagagctgattagcatcaatgtgtttgaaagatataaaatttatacatcaccttaacctctgtatgcacatgatgggattgataaaatattaaatgagaacaaactagatatgattaggacatttgaaaccctaattgtgaatttatttttaatagttactgaaatgaaaatatttaaaataatgcacaatgtcttaagtcttcctaaatcaagattttggttaaaaaatacttctaataatagtaaaagattttttttttaagtaaatcataaaacggttctaaatgtaaaataaagacatgtaaaataaagttctcttttggtcttgtttagtgtttaaatctaacaattgaaaacaaatttaggaagagaag

SEQ ID NO: 102 - DNA, 1138 bp, Homo sapiens
attacgggtggcggcggtcggggcaaggctcagcgttmtggcgagcggtctccgcgccgcggtccgcagcctttgcagccaggccacctctgttaacgaacgcatcgaaaacaagcgccsgaccgcgctgctgggagggggccaacgccgtattgacgcgcagcacaagcgagattttacagtttttggaggcagtctgtcaggagcacatgcccaaaagatctgcaaaatcatggaccaggccataacggtgggggctccagtgattgggctgaatgactctgggggagcayrgatccaaraaggagtggagtctttggctggctatgcagacatctttctgaggaatgttacggcatccggagtcatccctcagatttctctgatcatggrcccatgtgctggtggggccgwctactccccagccctaacagacttcacgttcatggtaaaggacacctcctacctgttcatcactggccctgatgttgtgaagtctgtcaccaatgaggatgttacccaggaggagctcggtggtgccaagacccacaccaccatgtcaggtgtggcccacagagcttttgaaaatgatgttgatgccttgtgtaatctccgggatttcttcaactacctgcccctgagcagtcaggacccggctcccgtccgtgagtgccacgatcccagtgaccgtctggttcctgagcttgacacaattgtccctttggaatcaaccaaagcctacaacatggtggacatcatacactctgttgttgatgagcgtgaattttttgagatcatgcccaattatgccaagaacatcattgttggttttgcaagaatgaatgggaggactgttggaattgttggcaaccaacctaaggtggcctcaggatgcttggatattaattcatctgtgaaaggggctcgttttgtcagattctgtgatgcattcaatattccactcatcacttttgttgatgtccctggctttctacctggtaagtttttgacagagtgggggctaggagagttgcctttcccagtaaggtgcccactttatttggagatcttcttgcagaactccccgaggacttgtgacttctccatgtattctgggtgtccagaagatagggctgtg

SEQ ID NO: 103 - DNA, 2212 bp, Homo sapiens
gtactyaggtgcgccggtaggggacgcgccggcacagcaaaaatggcggcggcattacgggtggcggcggtcggggcaaggctcagcgttmtggcgagcggtctccgcgccgcggtccgcagcctttgcagccaggccacctctgttaacgaacgcatcgaaaacaagcgccsgaccgcgctgctgggagggggccaacgccgtattgacgcgcagcacaagcgaggaaagctaacagccagggagaggatcagtctcttgctggaccctggcagctttgttgagagcgacatgtttgtggaacacagatgtgcagattttggaatggctgctgataagaataagtttcctggagacagcgtggtcactggacgaggccgaatcaatggaagattggtttatgtcttcagtcaggattttacagtttttggaggcagtctgtcaggagcacatgcccaaaagatctgcaaaatcatggaccaggccataacggtgggggctccagtgattgggctgaatgactctgggggagcayrgatccaaraaggagtggagtctttggctggctatgcagacatctttctgaggaatgttacggcatccggagtcatccctcagatttctctgatcatggrcccatgtgctggtggggccgwctactccccagccctaacagacttcacgttcatggtaaaggacacctcctacctgttcatcactggccctgatgttgtgaagtctgtcaccaatgaggatgttacccaggaggagctcggtggtgccaagacccacaccaccatgtcaggtgtggcccacagagcttttgaaaatgatgttgatgccttgtgtaatctccgggatttcttcaactacctgcccctgagcagtcaggacccggctcccgtccgtgagtgccacgatcccagtgaccgtctggttcctgagcttgacacaattgtccctttggaatcaaccaaagcctacaacatggtggacatcatacactctgttgttgatgagcgtgaattttttgagatcatgcccaattatgccaagaacatcattgttggttttgcaagaatgaatgggaggactgttggaattgttggcaaccaacctaaggtggcctcaggatgcttggatattaattcatctgtgaaaggggctcgttttgtcagattctgtgatgcattcaatattccactcatcacttttgttgatgtccctggctttctacctggcacagcacaggaatacgggggcatcatccggcatggtgccaagcttctctacgcatttgctgaggcaactgtacccaaagtcayagtcatcaccaggaaggcctrtggaggtgcctrtgatgtcatgagctctaagcacctttgtggtgataccaactatgcctggcccaccgcagagattgcagtcatgggagcaaagggcrctgtggagatcatcttcaaagggcatgagaatgtggaagctgctcaggcagagtacatcgagaagtttgccaaccctttccctgcagyagtgygagggtttgtggatgacatcatccaaccttcttccacacgtgccygaatctgctgtgaccyggatgtcttggccagcaagaaggtacaacgtccttgragaaaacatgcaratattccattgtaaacaaatcaaaggaaaagaaaccaagaactgaattactgtctgcccattcacatcccattcctgccttttgcaatcatgaaacctgggaatccaaatagttggataacttagaataactaagtttattaaattctagaaagatctcttttgtgccttactgtaaaattatttacttttttaaacattttaagttgtattttttgagcataaattcgatttttttaggtggaaatctgaaaaatcaatacaactagaaagaaaaatagtacacagtgttatcatctagagctgatttttatttcacacctctgggtattgttctttttcctctcgagttagtttttttatccataggtgagatatatagtaagtttttaaggcaaagtatttcttaggcttaagtttccttattttaaaaatagggtaatatgccctatctatctcctaattcctccatgaattgaggattaaatgtgatgtttgcaattgtggtatatgtgtttagcagtacagatgctcaataaggcatagcaccctatgttgactcagg

SEQ ID NO: 104 - DNA, 3488 bp, Homo sapiens
cggcggcggcggcggcggcggcggcggcggcggcggcggccgggagaggcccctccttcacgccttgtttctctccctcgctcgcagtcgagccgagccggcggacccgcctgggctccgaccctgcccaggccatggccggcaacgtgaagaagagctctggggccgggggcggcagcggctccgggggctcgggttcgggtggcctgattgggctcatgaaggacgcttccagccgcaccaccaccaccaccaccacctcagcccccacccgccggggacggtggacaagaagatggtggagaagtgctggaagctcatggacaaggtggtgcggttgtgtcagaacccaaagctggcgctaaagaatagcccaccttatatcttagacctgctaccagatacctaccagcatctccgtactatcttgtcaagatatgaggggaagatggagacacttggagaaaatgagtattttagggtgtttatggagaatttgatgaagaaaactaagcaaaccataagcctcttcaaggagggaaaagaaagaatgtatgaggagaattctcagcctaggcgaaacctaaccaaactgtccctcatcttcagccacatgctggcagaactaaaaggaatctttccaagyggactctttcagggagacacatttcggattactaaagcagatgctgcggaattttggagaaaagcttttggggaaaagacaatagtcccttggaagagctttcgacaggctctacatgaagtgcatcccatcagttctgggctggaggccatggctctgaaatccactattgatctgacctgcaatgattatatttcggtttttgaatttgacatctttacccgactctttcagccctggtcctctttgctcaggaattggaacagccttgctgtaactcatcctggctacatggcttttttgacgtatgacgaagtgaaagctcggctccagaaattcattcacaaacctggcagttatatcttccggctgagctgtactcgtctgggtcagtgggctattgggtatgttactgctgatgggaacattctccagacaatccctcacaataaacctctcttccaagcactgattgatggcttcagggaaggcttctatttgtttcctgatggacgaaatcagaatcctgatctgactggcttatgtgaaccaactccccaagaccatatcaaagtgacccaggaacaatatgaattatactgtgagatgggctccacattccaactatgtaaaatatgtgctgaaaatgataaggatgtaaagattgagccctgtggacacctcatgtgcacatcctgtcttacatcctggcaggaatcagaaggtcagggctgtcctttctgccgatgtgaaattaaaggtactgaacccatcgtggtagatccgtttgatcctagagggagtggcagcctgttgaggcaaggagcagagggagctccctccccmaattatgatgatgatgatgatgaacgagctgatgatactctcttcatgatgaaggaattggctggtgccaaggtggaacggccgccttctccattctccatggccccacaagcttcccttcccccrgtgccaccacgacttgaccttctgccgcagcgagtatgtgttccctcaagtgcttctgctcttggaactgcttctaaggctgcttctggctcccttcataaagacaaaccattgccagtacctcccacacttcgagatcttccaccaccaccgcctccagaccggccatattctgttggagcagaatcccgacctcaaagacgccccttgccttgtacaccaggcgactgtccctccagagacaaactgccccctgtcccctctagccgccttggagactcatggctgccccggccaatccccaaagtaccagtatctgccccaagttccagtgatccctggacaggaagagaattaaccaaccggcactcacttccattttcattgccctcacaaatggagcccagaccagatgtgcctaggctcggaagcacgttcagtctggatacctccatgagtatgaatagcagcccattagtaggtccagagtgtgaccaccccaaaatcaaaccttcctcatctgccaatgccatttattctctggctgccagacctcttcctgtgccaaaactgccacctggggagcaatgtgagggtgaagaggacacagagtacatgactccctcttccaggcctctacggcctttggatacatcccagagttcacgagcatgtgattgcgaccagcagattgatagctgtacgtatgaagcaatgtataatattcagtcccaggcgccatctatcaccgagagcagcacctttggtgaagggaatttggccgcagcccatgccaacactggtcccgaggagtcagaaaatgaggatgatgggtatgatgtcccaaagccacctgtgcyggccgtgctggcccgccgaactctctcagatatctctaatgccagctcctcctttggctggttgtctctggatggtgatcctacaacaaatgtcactgaaggttcccaagttcccgagaggcctccaaaaccattcccgcggagaatcaactctgaacggaaagctggcagctgtcagcaaggtagtggtcctgccgcctcwgctgccaccgcctcacctcagctctccagtgagatcgagaacctyatgagtcaggggtactcctaccaggacatccagaaagctttggtcattgcccagaacaacatcgagatggccaaaaacatcctccgggaatttgtttccatttcttctcctgcccatrtagctacctagcacaccatctccctgctgcaggtttagaggaccagtgagttgggagttattactcaagtggcacctagaagggcaggagttcctttggtgacttcacagtgaagtcttgccctctctgtgggatatcacatcagtggttccaagatttcaaagtggtgaaatgaaaatggagcagctagtatgttttattattttatgggtcttgagtgcatttgaaggtgtccttcagttcccacgtagagagagtgtggattatattacatgataacctacctggggaacagtccagaaagctatagaacaagtattttgctggaaatcctaattgaggacttaagacttcctgggttaaggatgtggccgtgtgtgtgtgtgtctgcctgtggttgtatgtgtccttgtgattataagattaacctgctgtgtgtgttaattccaggcagggaattagcacaaaaggtttaggaaggaatctttttttaaagacttccatctactgtggtattatacccaagcctagtgtgtattacaacttcaacactcccctttggcttatattaccatgtgcatagctaaagtcttctatttttagaacaccttctgtctgttctttccccatcaactccttcctcat

SEQ ID NO: 105 - DNA, 965 bp, Homo sapiens
gaaaaagctggagcaaccaagcagggcctacaagccgaggagggctgtttaaaggcgcaggggccattttaccctccaggttggccctgctcaggaccaggaggaaacacctccagcccgcgacctcctcccacagggggaaaaggaaagcaggaggaccacagaagctttggcaccgaggatccccgcagtcttcacccgcggagattccggctgaaggagctgtccagcgactacaccgctaagcgcagggagcccaagcctccgcaccggattccggagcmcaagctccaccgcgcatgcgcacacgccccagacccaggctcaggcaagccgactgagaattttctgaccgcagtgcaccatgggaaggtaactctgaagtttccataattcctgggctccagaaagaagaaaaggcggccgtggagagacgaagacttcatgtgctgaaagctctgaagaagctaaggattgagsctgatgaggccccagttgttgctgtgctgggctcaggcggaggactgcgggctcacattgcctgccttggggtcctgagtgagatgaaagaacagggcctgttggatgccgtcacgtacctcgcaggggtctctggatccacttgggcaatatcttctctctacaccaatgatggtgacatggaagctctcgaggctgacctgaaacatcgatttacccgacaggagtgggacttggctaagagcctacagaaaaccatccaagcagygaggtctgagaattactctctgaccgacttctgggcctacatgkttrtctctaagcaaaccrgagaactgcyggagtctcatttgtccaatatgaagaagcccgtggaagaagggacactaccctacccratatttgcagccattgacaatgacctgcaaccttcctggcaggaggcaagagcaccaggtaagcaaacatttagagggagggagagg

SEQ ID NO: 106 - DNA, 2944 bp, Homo sapiens
cacggatgaaaatagctccgggtgagctctggaacagctgaaaaagctggagcaaccaagcagggcctacaagccgaggagggctgtttaaaggcgcaggggccattttaccctccaggttggccctgctcaggaccaggaggaaacacctccagcccgcgacctcctcccacagggggaaaaggaaagcaggaggaccacagaagctttggcaccgaggatccccgcagtcttcacccgcggagattccggctgaaggagctgtccagcgactacaccgctaagcgcagggagcccaagcctccgcaccggattccggagcmcaagctccaccgcgcatgcgcacacgccccagacccaggctcagagtttcactcttgttgcccagactggagtgcaatggcatgatctctgctcactggcacctccacctcctgagttcaagtgattctcctccctcagcctcctgagtagctgggattacaggcgcccgccatcatgcccaggaggactgagaattttctgaccgcagtgcaccatgggaagctctgaagtttccataattcctgggctccagaaagaagaaaaggcggccgtggagagacgaagacttcatgtgctgaaagctctgaagaagctaaggattgagsctgatgaggccccagttgttgctgtgctgggctcaggcggaggactgcgggctcacattgcctgccttggggtcctgagtgagatgaaagaacagggcctgttggatgccgtcacgtacctcgcaggggtctctggatccacttgggcaatatcttctctctacaccaatgatggtgacatggaagctctcgaggctgacctgaaacatcgatttacccgacaggagtgggacttggctaagagcctacagaaaaccatccaagcagygaggtctgagaattactctctgaccgacttctgggcctacatgkttrtctctaagcaaaccrgagaactgcyggagtctcatttgtccaatatgaagaagcccgtggaagaagggacactaccctacccratatttgcagccattgacaatgacctgcaaccttcctggcaggaggcaagagcaccagagacctggttcgagttcacccctcaccacgctggcttcyctgcactgggggcctttgtttccataacccacttcggaagcaaattcaagaagggaagactggtcagaactcaccctgagagagacctgactttcctgagaggtttatggggaagtgctcttggtaacactgaagtcattagggaatacatttttgaccagttaaggaatctgaccctgaaaggtttatggagaagggctgttgctaatgctaaaagcattggacaccttatttttgcccgattactgaggctgcaagaaagttcacaaggggaacatcctcccccagaagatgaaggcggtgagcctgaacacacctggctgactgagatgctcgagaaytggaccaggacctccctggaaaagcaggagcagccccatgaggaccccgaaaggaaaggctcactcagtaacttgatggattttgtgaagaaaacaggcatttgcgcttcaaagtgggaatgggggaccmctcacaacttcctgtacaaacacgagtttgactcttttcatcagcaagaggaaccattcccagaggtactgtcttagtctgctcaggctgctgtgacaaaatcccacagactgggtgacttaaacgacagacatttattttctcacagttctcaaggctggaagtccaaaatcaagttgtctgtgggacttgctttcgctttgcactgtggactcaccctgaattctttcttgtatgagatccaagaaccctttcttggggtctggatcgggacccctttccagtaactgatgaaggctccaggtggcatccgggacaagataatgagcagccggaagcacctccacctggtggatgctggtttagccatcaacactcccttcccactcgtgctgcccccgacgcgggaggttcacctcatcctctccttcgacttcagtgccggagatcctttcgagaccatccrggctaccactgaytactgccgccgccacaagatcccctttccccaagtagaagaggctgagctggatttgtggtccaaggcccccgccagctgctacatcctgaaaggagaaactggaccagtggtgatgcattttcccytgttcaacatagatgcctgtggaggtgatattgaggcatggagtgacacatacgacacattcaagcttgctgacacctacactctagatgtggtggtgctactcttggcattagccaagaagaatgtcagggaaaacaagaagaagatccttagagagttgatgaacgtggccgggctctactacccgaaggatagtgcccgaagttgctgcttggcatagatgagcctcagcttccagggcactgtgggcctgttgrtctactagggccctgawgtccacctggccttcctgttcttcactcccttcagccacacgcttcatggccttgagttcaccttggctgtcctaacarggccaatcaccagtgaccagctagactgtgattttgatagcgtcattcagaagaaggygtccaaggagctgaagrtggtgaaatttgtcctgcaggtcccycgggagatcctggagctggagcatgagtgtctgacaatcagaagcatcatgtycaatgtccagatggccagaatgaatgtgatagttcagaccaatgccttccactgctcctttatgactgcacttctagccagtagctctgcacaagttagctctgtagaagtaagaacttgggcttaaatcatgggctatctctccacagccaagtggagctctgagaatacaacaagtgctcaataaatgcttgctgattgactgatggattag

SEQ ID NO: 107 - DNA, 2665 bp, Homo sapiens
cacggatgaaaatagctccgggtgagctctggaacagctgaaaaagctggagcaaccaagcagggcctacaagccgaggagggctgtttaaaggcgcaggggccattttaccctccaggttggccctgctcaggaccaggaggaaacacctccagcccgcgacctcctcccacagggggaaaaggaaagcaggaggaccacagaagctttggcaccgaggatccccgcagtcttcacccgcggagattccggctgaaggagctgtccagcgactacaccgctaagcgcagggagcccaagcctccgcaccggattccggagcmcaagctccaccgcgcatgcgcacacgccccagacccaggctcagagtttcactcttgttgcccagactggagtgcaatggcatgatctctgctcactggcacctccacctcctgagttcaagtgattctcctccctcagcctcctgagtagctgggattacaggcgcccgccatcatgcccaggaggactgagaattttctgaccgcagtgcaccatgggaagctctgaagtttccataattcctgggctccagaaagaagaaaaggcggccgtggagagacgaagacttcatgtgctgaaagctctgaagaagctaaggattgagsctgatgaggccccagttgttgctgtgctgggctcaggcggaggactgcgggctcacattgcctgccttggggtcctgagtgagatgaaagaacagggcctgttggatgccgtcacgtacctcgcaggggtctctggatccacttgggcaatatcttctctctacaccaatgatggtgacatggaagctctcgaggctgacctgaaacatcgatttacccgacaggagtgggacttggctaagagcctacagaaaaccatccaagcagygaggtctgagaattactctctgaccgacttctgggcctacatgkttrtctctaagcaaaccrgagaactgcyggagtctcatttgtccaatatgaagaagcccgtggaagaagggacactaccctacccratatttgcagccattgacaatgacctgcaaccttcctggcaggaggcaagagcaccagagacctggttcgagttcacccctcaccacgctggcttcyctgcactgggggcctttgtttccataacccacttcggaagcaaattcaagaagggaagactggtcagaactcaccctgagagagacctgactttcctgagaggtttatggggaagtgctcttggtaacactgaagtcattagggaatacatttttgaccagttaaggaatctgaccctgaaaggtttatggagaagggctgttgctaatgctaaaagcattggacaccttatttttgcccgattactgaggctgcaagaaagttcacaaggggaacatcctcccccagaagatgaaggcggtgagcctgaacacacctggctgactgagatgctcgagaaytggaccaggacctccctggaaaagcaggagcagccccatgaggaccccgaaaggaaaggctcactcagtaacttgatggattttgtgaagaaaacaggcatttgcgcttcaaagtgggaatgggggaccmctcacaacttcctgtacaaacacggtggcatccgggacaagataatgagcagccggaagcacctccacctggtggatgctggtttagccatcaacactcccttcccactcgtgctgcccccgacgcgggaggttcacctcatcctctccttcgacttcagtgccggagatcctttcgagaccatccrggctaccactgaytactgccgccgccacaagatcccctttccccaagtagaagaggctgagctggatttgtggtccaaggcccccgccagctgctacatcctgaaaggagaaactggaccagtggtgatgcattttcccytgttcaacatagatgcctgtggaggtgatattgaggcatggagtgacacatacgacacattcaagcttgctgacacctacactctagatgtggtggtgctactcttggcattagccaagaagaatgtcagggaaaacaagaagaagatccttagagagttgatgaacgtggccgggctctactacccgaaggatagtgcccgaagttgctgcttggcatagatgagcctcagcttccagggcactgtgggcctgttgrtctactagggccctgawgtccacctggccttcctgttcttcactcccttcagccacacgcttcatggccttgagttcaccttggctgtcctaacarggccaatcaccagtgaccagctagactgtgattttgatagcgtcattcagaagaaggygtccaaggagctgaagrtggtgaaatttgtcctgcaggtcccycgggagatcctggagctggagcatgagtgtctgacaatcagaagcatcatgtycaatgtccagatggccagaatgaatgtgatagttcagaccaatgccttccactgctcctttatgactgcacttctagccagtagctctgcacaagttagctctgtagaagtaagaacttgggcttaaatcatgggctatctctccacagccaagtggagctctgagaatacaacaagtgctcaataaatgcttgctgattgactgatggattag

SEQ ID NO: 108 - DNA, 2526 bp, Homo sapiens
cacggatgaaaatagctccgggtgagctctggaacagctgaaaaagctggagcaaccaagcagggcctacaagccgaggagggctgtttaaaggcgcaggggccattttaccctccaggttggccctgctcaggaccaggaggaaacacctccagcccgcgacctcctcccacagggggaaaaggaaagcaggaggaccacagaagctttggcaccgaggatccccgcagtcttcacccgcggagattccggctgaaggagctgtccagcgactacaccgctaagcgcagggagcccaagcctccgcaccggattccggagcmcaagctccaccgcgcatgcgcacacgccccagacccaggctcaggaggactgagaattttctgaccgcagtgcaccatgggaagctctgaagtttccataattcctgggctccagaaagaagaaaaggcggccgtggagagacgaagacttcatgtgctgaaagctctgaagaagctaaggattgagsctgatgaggccccagttgttgctgtgctgggctcaggcggaggactgcgggctcacattgcctgccttggggtcctgagtgagatgaaagaacagggcctgttggatgccgtcacgtacctcgcaggggtctctggatccacttgggcaatatcttctctctacaccaatgatggtgacatggaagctctcgaggctgacctgaaacatcgatttacccgacaggagtgggacttggctaagagcctacagaaaaccatccaagcagygaggtctgagaattactctctgaccgacttctgggcctacatgkttrtctctaagcaaaccrgagaactgcyggagtctcatttgtccaatatgaagaagcccgtggaagaagggacactaccctacccratatttgcagccattgacaatgacctgcaaccttcctggcaggaggcaagagcaccagagacctggttcgagttcacccctcaccacgctggcttcyctgcactgggggcctttgtttccataacccacttcggaagcaaattcaagaagggaagactggtcagaactcaccctgagagagacctgactttcctgagaggtttatggggaagtgctcttggtaacactgaagtcattagggaatacatttttgaccagttaaggaatctgaccctgaaaggtttatggagaagggctgttgctaatgctaaaagcattggacaccttatttttgcccgattactgaggctgcaagaaagttcacaaggggaacatcctcccccagaagatgaaggcggtgagcctgaacacacctggctgactgagatgctcgagaaytggaccaggacctccctggaaaagcaggagcagccccatgaggaccccgaaaggaaaggctcactcagtaacttgatggattttgtgaagaaaacaggcatttgcgcttcaaagtgggaatgggggaccmctcacaacttcctgtacaaacacggtggcatccgggacaagataatgagcagccggaagcacctccacctggtggatgctggtttagccatcaacactcccttcccactcgtgctgcccccgacgcgggaggttcacctcatcctctccttcgacttcagtgccggagatcctttcgagaccatccrggctaccactgaytactgccgccgccacaagatcccctttccccaagtagaagaggctgagctggatttgtggtccaaggcccccgccagctgctacatcctgaaaggagaaactggaccagtggtgatgcattttcccytgttcaacatagatgcctgtggaggtgatattgaggcatggagtgacacatacgacacattcaagcttgctgacacctacactctagatgtggtggtgctactcttggcattagccaagaagaatgtcagggaaaacaagaagaagatccttagagagttgatgaacgtggccgggctctactacccgaaggatagtgcccgaagttgctgcttggcatagatgagcctcagcttccagggcactgtgggcctgttgrtctactagggccctgawgtccacctggccttcctgttcttcactcccttcagccacacgcttcatggccttgagttcaccttggctgtcctaacarggccaatcaccagtgaccagctagactgtgattttgatagcgtcattcagaagaaggygtccaaggagctgaagrtggtgaaatttgtcctgcaggtcccycgggagatcctggagctggagcatgagtgtctgacaatcagaagcatcatgtycaatgtccagatggccagaatgaatgtgatagttcagaccaatgccttccactgctcctttatgactgcacttctagccagtagctctgcacaagttagctctgtagaagtaagaacttgggcttaaatcatgggctatctctccacagccaagtggagctctgagaatacaacaagtgctcaataaatgcttgctgattgactgatggattag

SEQ ID NO: 109 - DNA, 1450 bp, Homo sapiens
ccgtgatctcggctcactgcaacctccgcctcctgggttcaarcgattctcctgcctcagcctccggagtaactgggagtacaggcatgcgccaccacgcctggctgatttttgtctttttagtaggggcggggtttcaccatgttggccaggctggtctcaaactcctgacctcaggtgatccacccacctctgtctcccaaagtgctgggattacaggagtgtgccactgcgcctgaccagctttataaagtttatagggacagtgtcaccactttacagaagagggactgaggctctgaggaggaagttccttgccagggtccgagtgtcgccaccctgagaactccagcacccacctccctactctccctcatggcgtctcccccacctttccacagccagaagttgccaggtgaatacttccggtacaagggcgtccccttcccygtcggcctgtactcgctcgagagcatcagcttggcggagaacacccaagatgtgcgggacgacgacatctttatcatcacctaccccaagtcaggcacgacctggatgatcgagatcatctgcttaatcctgaaggaaggggatccatcctggatccgctccgtgcccatctgggagcgggcaccctggtgtgagaccattgtgggtgcyttcagcctcccggaccagtacagcccccgcctcatgagctcccatcttcccatccagatcttcaccaaggccttcttcagctccaaggccaaggtgatctacatgggccgcaacccccgggacgttgtggtctccctctatcattactccaagatcgccgggcagttaaaggacccgggcacacccgaccagttcctgagggacttcctcaaaggcgaagtgcagtttggctcctggttcgaccacattaagggctggcttcggatgaagggcaaagacaacttcctatttatcacctacgaggagytgcagcaggacttacagggctccgtggagcgcatctgtgggttcctgggccgtccgctgggcaaggaggcactgggctccrtcgtggcacactcaaccttcagcgccatgaaggccaacaccatgtccaactacacgctgctgcctcccagcctgctggaccaccgtcgcggggccttcctccggaaaggggtctgyggcgactggaagaaccacttcacggtggcccagagcgaagccttcgatcgtgcctaccgcaagcagatgsgggggatgccgaccttcccctgggatgaagacccggaggaggayggcagcccagatcctgagcccagccctgagcctgagcccaagcccagccttgagcccaacaccagcctggagcgtgagcccagacycaactccagccccagccccagccccggccaggcctctgagaccccgcacccacgaccctcataataaacacgtcgattctgtccag

SEQ ID NO: 110 - DNA, 1208 bp, Homo sapiens
aggtggcagacgctgtcgctgygcacacctggcctctgtgccgcctgctccctgctcgtcctcccctccccaccctcacccacctgccatggacgggcccgcygagccccagatcccgggcttgtgggacacctatgaagatgacatctcggaaatcagccagaagttgccaggtgaatacttccggtacaagggcgtccccttcccygtcggcctgtactcgctcgagagcatcagcttggcggagaacacccaagatgtgcgggacgacgacatctttatcatcacctaccccaagtcaggcacgacctggatgatcgagatcatctgcttaatcctgaaggaaggggatccatcctggatccgctccgtgcccatctgggagcgggcaccctggtgtgagaccattgtgggtgcyttcagcctcccggaccagtacagcccccgcctcatgagctcccatcttcccatccagatcttcaccaaggccttcttcagctccaaggccaaggtgatctacatgggccgcaacccccgggacgttgtggtctccctctatcattactccaagatcgccgggcagttaaaggacccgggcacacccgaccagttcctgagggacttcctcaaaggcgaagtgcagtttggctcctggttcgaccacattaagggctggcttcggatgaagggcaaagacaacttcctatttatcacctacgaggagytgcagcaggacttacagggctccgtggagcgcatctgtgggttcctgggccgtccgctgggcaaggaggcactgggctccrtcgtggcacactcaaccttcagcgccatgaaggccaacaccatgtccaactacacgctgctgcctcccagcctgctggaccaccgtcgcggggccttcctccggaaaggggtctgyggcgactggaagaaccacttcacggtggcccagagcgaagccttcgatcgtgcctaccgcaagcagatgsgggggatgccgaccttcccctgggatgaagacccggaggaggayggcagcccagatcctgagcccagccctgagcctgagcccaagcccagccttgagcccaacaccagcctggagcgtgagcccagacycaactccagccccagccccagccccggccaggcctctgagaccccgcacccacgaccctcataataaacacgtcgattctgtccag

SEQ ID NO: 111 - DNA, 1898 bp, Homo sapiens
ccccgcccgcgtggccccagcgcggctgggagccgaggaccagccccctacctccttccgaatcctgccctttcgcacatcccaccccaagccaacccgaggagtgtttgccgctatgagatcacctgctcccccagcccaacaacaaaattaaataacaccacgggagaggagagagggagggggaggagggaggaagggacaagagagaagagagactgaaacagggagaagaggcaggagaggaggaggtggggagagcacgaagctggaggccgacactgagggagggcgggaggaggtgaagaaggagagaggggagaagaggcaggagctggaaaggagagagggaggaggaggaggagatgcgggatggagacctggagttaggtggcttgggagagcttaatgaaaagagaacggagaggaggtgtgggttaggaaccaagaggtagccctgggggcagcagaaggctgagaggagtaggaagatcaggagctagagggagactggagggttccgggaaaagagcagaggaaagaggaaagacacagagagacgggagagagaagaagagtgggtttgaagggcggatctcagtccctggctgctttggcatttggggaactgggactccctgtggggaggagaggaaagctggaagtcctggagggacagggtcccagaaggaggggacagaggagctgagagaggggggcagggcgttgggcaggggtccctcggaggcctcctggggatgggggctgcagctcgtctgagcgcccctcgagcgctggtactctgggctgcactgggggcagcasctmacatcggaccagcacctgaccccgaggactggtggagctacaaggataatctccagggaaacttcgtgccagggcctcctttctggggcctggtgaatgcagcgtggagtctgtgtgctgtggggaagcggcagagccccgtggatgtggagstgaagagggttctttatgacccctttctgcccccattaaggctcagcactggaggagagaagctccggggaaccttgtacaacaccggccgacatgtctccttcctgcctgcaccccgacctgtggtcaatgtgtctggaggtcccctcctttacagccaccgactcagtgaactgcggctgctgtttggagctcgcgacggagccggctcggaacatcagatcaaccaccagggcttctctgctgaggtgcagctcattcacttcaaccaggaactctacgggaatttcagcgctgcctcccgcggccccaatggcctggccattctcagcctctttgtcaacgttgccagtacctctaacccattcctcagtcgcctccttaaccgcgacaccatcactcgcatctcctacaagaatgatgcctactttcttcaagacctgagcctggagctcctgttccctgaatccttcggcttcatcacctatcagggctctctcagcaccccgccctgctccgagactgtcacctggatcctcattgaccgggccctcaatatcacctcccttcagatgcactccctgagactcctgagccagaatcctccatctcagatcttccagagcctcagcggtaacagccggcccctgcagcccttggcccacagggcactgaggggcaacagggacccccggcaccccgagaggcgctgccgaggccccaactaccgcctgcatgcccagtgcttctcgacctrgtacattctggttccccgctcgcagacttccgacgtggatggtgtcccccatggtcgctgagactccccttcgaggattgcacccgcccgtcctaagcctccccacaaggcgaggggagttacccctaaaacaaagctattaaagggacagaatacttcc

SEQ ID NO: 112 - DNA, 1923 bp, Homo sapiens
ccccgcccgcgtggccccagcgcggctgggagccgaggaccagccccctacctccttccgaatcctgccctttcgcacatcccaccccaagccaacccgaggagtgtttgccgctatgagatcacctgctcccccagcccaacaacaaaattaaataacaccacgggagaggagagagggagggggaggagggaggaagggacaagagagaagagagactgaaacagggagaagaggcaggagaggaggaggtggggagagcacgaagctggaggccgacactgagggagggcgggaggaggtgaagaaggagagaggggagaagaggcaggagctggaaaggagagagggaggaggaggaggagatgcgggatggagacctggagttaggtggcttgggagagcttaatgaaaagagaacggagaggaggtgtgggttaggaaccaagaggtagccctgggggcagcagaaggctgagaggagtaggaagatcaggagctagagggagactggagggttccgggaaaagagcagaggaaagaggaaagacacagagagacgggagagagaagaagagtgggtttgaagggcggatctcagtccctggctgctttggcatttggggaactgggactccctgtggggaggagaggaaagctggaagtcctggagggacagggtcccagaaggaggggacagaggagctgagagaggggggcagggcgttgggcaggggtccctcggaggcctcctggggatgggggctgcagctcgtctgagcgcccctcgagcgctggtactctgggctgcactgggggcagcasctmacatcggaccagcacctgaccccgaggactggtggagctacaaggataatctccagggaaacttcgtgccagggcctcctttctggggcctggtgaatgcagcgtggagtctgtgtgctgtggggaagcggcagagccccgtggatgtggagstgaagagggttctttatgacccctttctgcccccattaaggctcagcactggaggagagaagctccggggaaccttgtacaacaccggccgacatgtctccttcctgcctgcaccccgacctgtggtcaatgtgtctggaggtcccctcctttacagccaccgactcagtgaactgcggctgctgtttggagctcgcgacggagccggctcggaacatcagatcaaccaccagggcttctctgctgaggtgcagctcattcacttcaaccaggaactctacgggaatttcagcgctgcctcccgcggccccaatggcctggccattctcagcctctttgtcaacgttgccagtacctctaacccattcctcagtcgcctccttaaccgcgacaccatcactcgcatctcctacaagaatgatgcctactttcttcaagacctgagcctggagctcctgttccctgaatccttcggcttcatcacctatcagggctctctcagcaccccgccctgctccgagactgtcacctggatcctcattgaccgggccctcaatatcacctcccttcagatgcactccctgagactcctgagccagaatcctccatctcagatcttccagagcctcagcggtaacagccggcccctgcagcccttggcccacagggcactgaggggcaacagggacccccggcaccccgagaggcgctgccgaggccccaactaccgcctgcatgtggatggtgtcccccatggtcgctgagactccccttcgaggattgcacccgcccgtcctaagcctccccacaaggcgaggggagttacccctaaaacaaagctattaaagggacagaatacttcctgttttctcagtggtctgattctaggcgcggtggggaaacatttgggtattaaagaacagacttcttccggaaaccaat

SEQ ID NO: 113 - DNA, 1893 bp, Homo sapiens
ccccgcccgcgtggccccagcgcggctgggagccgaggaccagccccctacctccttccgaatcctgccctttcgcacatcccaccccaagccaacccgaggagtgtttgccgctatgagatcacctgctcccccagcccaacaacaaaattaaataacaccacgggagaggagagagggagggggaggagggaggaagggacaagagagaagagagactgaaacagggagaagaggcaggagaggaggaggtggggagagcacgaagctggaggccgacactgagggagggcgggaggaggtgaagaaggagagaggggagaagaggcaggagctggaaaggagagagggaggaggaggaggagatgcgggatggagacctggagttaggtggcttgggagagcttaatgaaaagagaacggagaggaggtgtgggttaggaaccaagaggtagccctgggggcagcagaaggctgagaggagtaggaagatcaggagctagagggagactggagggttccgggaaaagagcagaggaaagaggaaagacacagagagacgggagagagaagaagagtgggtttgaagggcggatctcagtccctggctgctttggcatttggggaactgggactccctgtggggaggagaggaaagctggaagtcctggagggacagggtcccagaaggaggggacagaggagctgagagaggggggcagggcgttgggcaggggtccctcggaggcctcctggggatgggggctgcagctcgtctgagcgcccctcgagcgctggtactctgggctgcactgggggcagcasctmacatcggaccagcacctgaccccgaggactggtggagctacaaggataatctccagggaaacttcgtgccagcgtggagtctgtgtgctgtggggaagcggcagagccccgtggatgtggagstgaagagggttctttatgacccctttctgcccccattaaggctcagcactggaggagagaagctccggggaaccttgtacaacaccggccgacatgtctccttcctgcctgcaccccgacctgtggtcaatgtgtctggaggtcccctcctttacagccaccgactcagtgaactgcggctgctgtttggagctcgcgacggagccggctcggaacatcagatcaaccaccagggcttctctgctgaggtgcagctcattcacttcaaccaggaactctacgggaatttcagcgctgcctcccgcggccccaatggcctggccattctcagcctctttgtcaacgttgccagtacctctaacccattcctcagtcgcctccttaaccgcgacaccatcactcgcatctcctacaagaatgatgcctactttcttcaagacctgagcctggagctcctgttccctgaatccttcggcttcatcacctatcagggctctctcagcaccccgccctgctccgagactgtcacctggatcctcattgaccgggccctcaatatcacctcccttcagatgcactccctgagactcctgagccagaatcctccatctcagatcttccagagcctcagcggtaacagccggcccctgcagcccttggcccacagggcactgaggggcaacagggacccccggcaccccgagaggcgctgccgaggccccaactaccgcctgcatgtggatggtgtcccccatggtcgctgagactccccttcgaggattgcacccgcccgtcctaagcctccccacaaggcgaggggagttacccctaaaacaaagctattaaagggacagaatacttcctgttttctcagtggtctgattctaggcgcggtggggaaacatttgggtattaaagaacagacttcttccggaaaccaat

SEQ ID NO: 114 - DNA, 2964 bp, Homo sapiens
gacgactgactagccgggcgataacggcagagagcatagagcgcaggaacaagcgcaacgtccaagagggaagggccagcacgtcgggggcctctctggccctacccaggccgtgttctcgatagctttccggaagaaagggatctgggagcgagatgcgtgtagctagcacgatgcgtcgcgcggtgacgctctggcccgacrccgacggcctctcagtggctcccggaggacccggcgggcccagtgttggagagctgaaggtcaggccaggacagtgagacctgactccttgctcctaccagcctactatggcttaagacccagggccagggtcccgttgatgtaacagagcagaggaccagcagatgaatggacaccttgaagcagaggagcagcaggaccagaggccagaccaggagctgaccgggagctggggccacgggcctaggagcaccctggtcagggctaaggccatggccccgcccccaccgccactggctgccagcaccccgctcctccatggcgagtttggctcctacccagcccgaggcccacgctttgccctcacccttacatcgcaggccctgcacatacagcggctgcgccccaaacctgaagccaggccccggggtggcctggtcccgttggccgaggtctcaggctgctgcaccctgcgaagccgcagcccctcagactcagcggcctacttctgcatctacacctaccctcggggccggcgcggrgcccggcgcagagccactcgcaccttccgggcagatggggccgccacctacgaagagaaccgtgccgaggcccagcgctgggccactgccctcacctgtctgctccgaggactgccactgcccggggatggggagatcacccctgacctgctacctcggccgccccggttgcttctattggtcaatccctttgggggtcggggcctggcctggcagtggtgtaagaaccacgtgcttcccatgatctctgaagctgggctgtccttcaacctcatccagacagaacgacagaaccacgcccgggagctggtccaggggctgagcctgagtgagtgggatggcatcgtcacggtctcgggagacgggctgctccatgaggtgctgaacgggctcctagatcgccctgactgggaggaagctgtgaagatgcctgtgggcatcctcccctgcggctcgggcaacgcgctggccggagcagtgaaccagcacgggggatttgagccagccctgggcctcgacctgttgctcaactgctcactgttgctgtgccggggtggtggccacccactggacctgctctccgtgacgctggcctcgggctcccgctgtttctccttcctgtctgtggcctggggcttcgtgtcagatgtggatatccagagcgagcgcttcagggccttgggcagtgcccgcttcacactgggcacggtgctgggcctcgccacactgcacacctaccgcggacgcctctcctacctccccgccactgtggaacctgcctcgcccacccctgcccatagcctgcctcgtgccaagtcggagctgaccctaaccccagacccagccccgcccatggcccactcacccctgcatcgttctgtgtctgacctgcctcttcccctgccccagcctgccctggcctctcctggctcgccagaacccctgcccatcctgtccctcaacggtgggggcccagagctggctggggactggggtggggctggggatgctccgctgtccccggacccactgctgtcttcacctcctggctctcccaaggcagctctacactcacccgtctccgaaggggcccccgtaattcccccatyctctgggctcccacttcccacccctgatgcccgggtaggggcctccacctgcggcccgcccgaccacctgctgcctccgctrggcaccccgctgcccccagactgggtgacgctggagggggactttgtgctcatgttggccatctcgcccagccacctaggcgctgacctggtggcagctccgcatgcgcgcttcgacgacggcctggtgcacctgtgctgggtgcgtagcggcatctcgcgggctgcgctgctgcgccttttcttggccatggagcgtggtagccacttcagcctgggctgtccgcagctgggctacgccgcggcccgtgccttccgcctagagccgctcacaccacgcggcgtgctcacagtggacggggagcaggtggagtatgggccgctacaggcacagatgcaccctggcatcggtacactgctcactgggcctcctggctgcccggggcgggagccctgaaactaaacaagcttggtacccgccgggggcggggcctacattccaatggggcggagcctgagctagggggtgtggcctggctgctagagttgtggtggcaggggccctggccccgtctcaggattgcgctcgctttcatgggaccagacgtgatgctggaaggtgggcgtcgtcacggttaaagagaaatgggctcgtcccgagggtagtgcctgatcaatgagggcggggcctggcgtctgatctggggccgcccttacggggcagggctcagtcctgacgcttgccacctgctcctacccggccaggatggctgagggcggagtctattttacgcgtcgcccaatgacaggacctggaatktactggctggggtaggcctcagtgagtcggccggtcagggcccgcagcctcgccccatccactccggtgcctccatttagctggccaatcagcccaggaggggcaggttccccggggccggcgctaggatttgcactaatgttcctctccccgcgggtgggggcggggaaattcatatcccctgttcgtctcatgcgcgtcctccgtccccaatctaaaaagcaattgaaaaggtctatgcaataaaggcagtcgcttcattcctctc

SEQ ID NO: 115 - DNA, 3125 bp, Homo sapiens
ggcccttccctgacctagaaagagggagacagagtttcataggggaggcaaaatggagactccgtggcttgggggtggggggaatggaggcccaaagggtaggaaggagacctagaaagaggggtgagatggagacccagggagaagtagtggcaaagaaagatggtgagatggggccttgcaaggctataaccaaattcaaatcctggctctgctagttactaatggggtgattgggcaagtcatttaacctctctgtgatcttgggaaaatcacttaacttctttgggccttactctccttatggacaaaaaggggatgacaacaggcctggcacacagggtgtttttcaggattatgaaagttaataaaactgctgaggtcaatattttgcacataataagtgctcaataaaaattagccttcactcctattatagcatacatattgtgtgcaaccagatggactggctggggcagtgattaaaatgacttatctactcttccccccacccgccagggaggcccctgcctcttggttctcaggcacattgagcctggaagggcctcctgcagttgrctgtcaatgctgctcckcacttacctctcctccacagagctgaaggtcaggccaggacagtgagacctgactccttgctcctaccagcctactatggcttaagacccagggccagggtcccgttgatgtaacagagcagaggaccagcagatgaatggacaccttgaagcagaggagcagcaggaccagaggccagaccaggagctgaccgggagctggggccacgggcctaggagcaccctggtcagggctaaggccatggccccgcccccaccgccactggctgccagcaccccgctcctccatggcgagtttggctcctacccagcccgaggcccacgctttgccctcacccttacatcgcaggccctgcacatacagcggctgcgccccaaacctgaagccaggccccggggtggcctggtcccgttggccgaggtctcaggctgctgcaccctgcgaagccgcagcccctcagactcagcggcctacttctgcatctacacctaccctcggggccggcgcggrgcccggcgcagagccactcgcaccttccgggcagatggggccgccacctacgaagagaaccgtgccgaggcccagcgctgggccactgccctcacctgtctgctccgaggactgccactgcccggggatggggagatcacccctgacctgctacctcggccgccccggttgcttctattggtcaatccctttgggggtcggggcctggcctggcagtggtgtaagaaccacgtgcttcccatgatctctgaagctgggctgtccttcaacctcatccagacagaacgacagaaccacgcccgggagctggtccaggggctgagcctgagtgagtgggatggcatcgtcacggtctcgggagacgggctgctccatgaggtgctgaacgggctcctagatcgccctgactgggaggaagctgtgaagatgcctgtgggcatcctcccctgcggctcgggcaacgcgctggccggagcagtgaaccagcacgggggatttgagccagccctgggcctcgacctgttgctcaactgctcactgttgctgtgccggggtggtggccacccactggacctgctctccgtgacgctggcctcgggctcccgctgtttctccttcctgtctgtggcctggggcttcgtgtcagatgtggatatccagagcgagcgcttcagggccttgggcagtgcccgcttcacactgggcacggtgctgggcctcgccacactgcacacctaccgcggacgcctctcctacctccccgccactgtggaacctgcctcgcccacccctgcccatagcctgcctcgtgccaagtcggagctgaccctaaccccagacccagccccgcccatggcccactcacccctgcatcgttctgtgtctgacctgcctcttcccctgccccagcctgccctggcctctcctggctcgccagaacccctgcccatcctgtccctcaacggtgggggcccagagctggctggggactggggtggggctggggatgctccgctgtccccggacccactgctgtcttcacctcctggctctcccaaggcagctctacactcacccgtctccgaaggggcccccgtaattcccccatyctctgggctcccacttcccacccctgatgcccgggtaggggcctccacctgcggcccgcccgaccacctgctgcctccgctrggcaccccgctgcccccagactgggtgacgctggagggggactttgtgctcatgttggccatctcgcccagccacctaggcgctgacctggtggcagctccgcatgcgcgcttcgacgacggcctggtgcacctgtgctgggtgcgtagcggcatctcgcgggctgcgctgctgcgccttttcttggccatggagcgtggtagccacttcagcctgggctgtccgcagctgggctacgccgcggcccgtgccttccgcctagagccgctcacaccacgcggcgtgctcacagtggacggggagcaggtggagtatgggccgctacaggcacagatgcaccctggcatcggtacactgctcactgggcctcctggctgcccggggcgggagccctgaaactaaacaagcttggtacccgccgggggcggggcctacattccaatggggcggagcctgagctagggggtgtggcctggctgctagagttgtggtggcaggggccctggccccgtctcaggattgcgctcgctttcatgggaccagacgtgatgctggaaggtgggcgtcgtcacggttaaagagaaatgggctcgtcccgagggtagtgcctgatcaatgagggcggggcctggcgtctgatctggggccgcccttacggggggcaggttccccggggccggcgctaggatttgcactaatgttcctctccccgcgggtgggggcggggaaattcatatcccctgttcgtctcatgcgcgtcctccgtccccaatctaaaaagcaattgaaaaggtctatgcaataaaggcagtcgcttcattcctctc

SEQ ID NO: 116 - DNA, 1884 bp, Homo sapiens
ggcccttccctgacctagaaagagggagacagagtttcataggggaggcaaaatggagactccgtggcttgggggtggggggaatggaggcccaaagggtaggaaggagacctagaaagaggggtgagatggagacccagggagaagtagtggcaaagaaagatggtgagatggggccttgcaaggctataaccaaattcaaatcctggctctgctagttactaatggggtgattgggcaagtcatttaacctctctgtgatcttgggaaaatcacttaacttctttgggccttactctccttatggacaaaaaggggatgacaacaggcctggcacacagggtgtttttcaggattatgaaagttaataaaactgctgaggtcaatattttgcacataataagtgctcaataaaaattagccttcactcctattatagcatacatattgtgtgcaaccagatggactggctggggcagtgattaaaatgacttatctactcttccccccacccgccagggaggcccctgcctcttggttctcaggcacattgagcctggaagggcctcctgcagttgrctgtcaatgctgctcckcacttacctctcctccacagagctgaaggtcaggccaggacagtgagacctgactccttgctcctaccagcctactatggcttaagacccagggccagggtcccgttgatgtaacagagcagaggaccagcagatgaatggacaccttgaagcagaggagcagcaggaccagaggccagaccaggagctgaccgggagctggggccacgggcctaggagcaccctggtcagggctaaggccatggccccgcccccaccgccactggctgccagcaccccgctcctccatggcgagtttggctcctacccagcccgaggcccacgctttgccctcacccttacatcgcaggccctgcacatacagcggctgcgccccaaacctgaagccaggccccggggtggcctggtcccgttggccgaggtctcaggctgctgcaccctgcgaagccgcagcccctcagactcagcggcctacttctgcatctacacctaccctcggggccggcgcggrgcccggcgcagagccactcgcaccttccgggcagatggggccgccacctacgaagagaaccgtgccgaggcccagcgctgggccactgccctcacctgtctgctccgaggactgccactgcccggggatggggagatcacccctgacctgctacctcggccgccccggttgcttctattggtcaatccctttgggggtcggggcctggcctggcagtggtgtaagaaccacgtgcttcccatgatctctgaagctgggctgtccttcaacctcatccagacagaacgacagaaccacgcccgggagctggtccaggggctgagcctgagtgagtgggatggcatcgtcacggtctcgggagacgggctgctccatgaggtgctgaacgggctcctagatcgccctgactgggaggaagctgtgaagatgcctgtgggcatcctcccctgcggctcgggcaacgcgctggccggagcagtgaaccagcacgggggcccgcgggaggactcagactccagcacttccagcagcgcctgccctctatggacgacagcccggagctgcycacgggctgcagccagtatgccwgggagctgccctcttcttccacaacagctggctctggggttctcaagatttattcaggatcgtgttaacggaggcggtgggaggatagggtccctgacgtgccggggacacacacagagaaccctccccgcccccgcaagggaggggggaggctcgctttttcttaaaaatataaatgtatttatctgc

SEQ ID NO: 117 - DNA, 2812 bp, Homo sapiens
gacgactgactagccgggcgataacggcagagagcatagagcgcaggaacaagcgcaacgtccaagagggaagggccagcacgtcgggggcctctctggccctacccaggccgtgttctcgatagctttccggaagaaagggatctgggagcgagatgcgtgtagctagcacgatgcgtcgcgcggtgacgctctggcccgacrccgacggcctctcagtggctcccggaggacccggcgggcccagtgttggagagctgaaggtcaggccaggacagtgagacctgactccttgctcctaccagcctactatggcttaagacccagggccagggtcccgttgatgtaacagagcagaggaccagcagatgaatggacaccttgaagcagaggagcagcaggaccagaggccagaccaggagctgaccgggagctggggccacgggcctaggagcaccctggtcagggctaaggccatggccccgcccccaccgccactggctgccagcaccccgctcctccatggcgagtttggctcctacccagcccgaggcccacgctttgccctcacccttacatcgcaggccctgcacatacagcggctgcgccccaaacctgaagccaggccccggggtggcctggtcccgttggccgaggtctcaggctgctgcaccctgcgaagccgcagcccctcagactcagcggcctacttctgcatctacacctaccctcggggccggcgcggrgcccggcgcagagccactcgcaccttccgggcagatggggccgccacctacgaagagaaccgtgccgaggcccagcgctgggccactgccctcacctgtctgctccgaggactgccactgcccggggatggggagatcacccctgacctgctacctcggccgccccggttgcttctattggtcaatccctttgggggtcggggcctggcctggcagtggtgtaagaaccacgtgcttcccatgatctctgaagctgggctgtccttcaacctcatccagacagaacgacagaaccacgcccgggagctggtccaggggctgagcctgagtgagtgggatggcatcgtcacggtctcgggagacgggctgctccatgaggtgctgaacgggctcctagatcgccctgactgggaggaagctgtgaagatgcctgtgggcatcctcccctgcggctcgggcaacgcgctggccggagcagtgaaccagcacgggggatttgagccagccctgggcctcgacctgttgctcaactgctcactgttgctgtgccggggtggtggccacccactggacctgctctccgtgacgctggcctcgggctcccgctgtttctccttcctgtctgtggcctggggcttcgtgtcagatgtggatatccagagcgagcgcttcagggccttgggcagtgcccgcttcacactgggcacggtgctgggcctcgccacactgcacacctaccgcggacgcctctcctacctccccgccactgtggaacctgcctcgcccacccctgcccatagcctgcctcgtgccaagtcggagctgaccctaaccccagacccagccccgcccatggcccactcacccctgcatcgttctgtgtctgacctgcctcttcccctgccccagcctgccctggcctctcctggctcgccagaacccctgcccatcctgtccctcaacggtgggggcccagagctggctggggactggggtggggctggggatgctccgctgtccccggacccactgctgtcttcacctcctggctctcccaaggcagctctacactcacccgtctccgaaggggcccccgtaattcccccatyctctgggctcccacttcccacccctgatgcccgggtaggggcctccacctgcggcccgcccgaccacctgctgcctccgctrggcaccccgctgcccccagactgggtgacgctggagggggactttgtgctcatgttggccatctcgcccagccacctaggcgctgacctggtggcagctccgcatgcgcgcttcgacgacggcctggtgcacctgtgctgggtgcgtagcggcatctcgcgggctgcgctgctgcgccttttcttggccatggagcgtggtagccacttcagcctgggctgtccgcagctgggctacgccgcggcccgtgccttccgcctagagccgctcacaccacgcggcgtgctcacagtggacggggagcaggtggagtatgggccgctacaggcacagatgcaccctggcatcggtacactgctcactgggcctcctggctgcccggggcgggagattgcgctcgctttcatgggaccagacgtgatgctggaaggtgggcgtcgtcacggttaaagagaaatgggctcgtcccgagggtagtgcctgatcaatgagggcggggcctggcgtctgatctggggccgcccttacggggcagggctcagtcctgacgcttgccacctgctcctacccggccaggatggctgagggcggagtctattttacgcgtcgcccaatgacaggacctggaatktactggctggggtaggcctcagtgagtcggccggtcagggcccgcagcctcgccccatccactccggtgcctccatttagctggccaatcagcccaggaggggcaggttccccggggccggcgctaggatttgcactaatgttcctctccccgcgggtgggggcggggaaattcatatcccctgttcgtctcatgcgcgtcctccgtccccaatctaaaaagcaattgaaaaggtctatgcaat

SEQ ID NO: 118 - DNA, 2661 bp, Homo sapiens
ggaggaggcagaatccgggcagagggcagggagagggcctgtggggaagggacctcagtcctgctcccacccgctccctggagagcaggcggccagacacccagaggccagaccaggagctgaccgggagctggggccacgggcctaggagcaccctggtcagggctaaggccatggccccgcccccaccgccactggctgccagcaccccgctcctccatggcgagtttggctcctacccagcccgaggcccacgctttgccctcacccttacatcgcaggccctgcacatacagcggctgcgccccaaacctgaagccaggccccggggtggcctggtcccgttggccgaggtctcaggctgctgcaccctgcgaagccgcagcccctcagactcagcggcctacttctgcatctacacctaccctcggggccggcgcggrgcccggcgcagagccactcgcaccttccgggcagatggggccgccacctacgaagagaaccgtgccgaggcccagcgctgggccactgccctcacctgtctgctccgaggactgccactgcccggggatggggagatcacccctgacctgctacctcggccgccccggttgcttctattggtcaatccctttgggggtcggggcctggcctggcagtggtgtaagaaccacgtgcttcccatgatctctgaagctgggctgtccttcaacctcatccagacagaacgacagaaccacgcccgggagctggtccaggggctgagcctgagtgagtgggatggcatcgtcacggtctcgggagacgggctgctccatgaggtgctgaacgggctcctagatcgccctgactgggaggaagctgtgaagatgcctgtgggcatcctcccctgcggctcgggcaacgcgctggccggagcagtgaaccagcacgggggatttgagccagccctgggcctcgacctgttgctcaactgctcactgttgctgtgccggggtggtggccacccactggacctgctctccgtgacgctggcctcgggctcccgctgtttctccttcctgtctgtggcctggggcttcgtgtcagatgtggatatccagagcgagcgcttcagggccttgggcagtgcccgcttcacactgggcacggtgctgggcctcgccacactgcacacctaccgcggacgcctctcctacctccccgccactgtggaacctgcctcgcccacccctgcccatagcctgcctcgtgccaagtcggagctgaccctaaccccagacccagccccgcccatggcccactcacccctgcatcgttctgtgtctgacctgcctcttcccctgccccagcctgccctggcctctcctggctcgccagaacccctgcccatcctgtccctcaacggtgggggcccagagctggctggggactggggtggggctggggatgctccgctgtccccggacccactgctgtcttcacctcctggctctcccaaggcagctctacactcacccgtctccgaaggggcccccgtaattcccccatyctctgggctcccacttcccacccctgatgcccgggtaggggcctccacctgcggcccgcccgaccacctgctgcctccgctrggcaccccgctgcccccagactgggtgacgctggagggggactttgtgctcatgttggccatctcgcccagccacctaggcgctgacctggtggcagctccgcatgcgcgcttcgacgacggcctggtgcacctgtgctgggtgcgtagcggcatctcgcgggctgcgctgctgcgccttttcttggccatggagcgtggtagccacttcagcctgggctgtccgcagctgggctacgccgcggcccgtgccttccgcctagagccgctcacaccacgcggcgtgctcacagtggacggggagcaggtggagtatgggccgctacaggcacagatgcaccctggcatcggtacactgctcactgggcctcctggctgcccggggcgggagccctgaaactaaacaagcttggtacccgccgggggcggggcctacattccaatggggcggagcctgagctagggggtgtggcctggctgctagagttgtggtggcaggggccctggccccgtctcaggattgcgctcgctttcatgggaccagacgtgatgctggaaggtgggcgtcgtcacggttaaagagaaatgggctcgtcccgagggtagtgcctgatcaatgagggcggggcctggcgtctgatctggggccgcccttacggggcagggctcagtcctgacgcttgccacctgctcctacccggccaggatggctgagggcggagtctattttacgcgtcgcccaatgacaggacctggaatktactggctggggtaggcctcagtgagtcggccggtcagggcccgcagcctcgccccatccactccggtgcctccatttagctggccaatcagcccaggaggggcaggttccccggggccggcgctaggatttgcactaatgttcctctccccgcgggtgggggcggggaaattcatatcccctgttcgtctcatgcgcgtcctccgtccccaatctaaaaagcaattgaaaaggtctatgcaataaaggcagtcgcttcattcctctc

SEQ ID NO: 119 - DNA, 3065 bp, Homo sapiens
agctggagcccgcggagcccacggagcccacggagcccacggaggagcccacggaggagccccagcgtccgaacgggcagaccccctcgagccgcgaaggagcccgagaagcagccacgatgtgcggaatctttgcctacatgaactacagagtcccccggacgaggaaggagatcttcgaaaccctcatcaagggcctgcagcggctggagtacagaggctacgactcggcaggtgtggcgatcgatgggaataatcacgaagtcaaagaaagacacattcagctggtcaagaaaagggggaaagtcaaggctctcgatgaagaactttacaaacaagacagcatggacttaaaagtggagtttgagacacacttcggcattgcccacacgcgctgggccacccacggggtccccagtgctgtcaacagccaccctcagcgctcagacaaaggcaacgaatttgttgtcatccacaatgggatcatcacaaattacaaagatctgaggaaatttctggaaagcaaaggctacgagtttgagtcagaaacagatacagagaccatcgccaagctgattaaatatgtgttcgacaacagagaaactgaggacattacgttttcaacgttggtcgagagagtcattcagcagttggaaggtgcattcgcgctggttttcaagagtgtccactacccaggagaagccgttgccacacggagaggcagccccctgctcatcggagtccggagcaaatacaagctctccacagaacagatccctatcttatacaggacgtgcactctggagaatgtgaagaatatctgtaagacacggatgaagaggctggacagctccgcctgcctgcatgctgtgggcgacaaggccgtggaattcttctttgcttctgatgcaagcgctatcatagagcacaccaaccgggtcatcttcctggaggacgatgacatcgccgcagtggctgatgggaaactctccattcaccgggtcaagcgctcggcyagtgatgacccatctcgagccatccagaccttgcagatggaactgcagcaaatcatgaaaggcaggtgtaacttcagtgcgtttatgcagaaggagatcttcgaacagccagaatcmgttttcaatactatgagaggtcgggtgaattttgaaaccaacacagtgctcctgggtggcttgaaggaccacttgaaggagattcgacgatgccgacggctcatcgtgattggctgtggaaccagctaccacgctgccgtggctacgcggcaagttttggaggaactgactgagcttcctgtgatggttgaacttgctagtgattttctggacaggaacacacctgtgttcagggatgacgtttgctttttcatcagccagtcaggcgagaccgcggacaccctcctggcgctgcgctactgtaaggaccgcggcgctctcaccgtgggcgtcaccaacaccgtgggcagctccatctctcgcgagaccgactgcggcgtccacatcaacgcagggccggagrtcggcgtggccagcaccaaggcttataccagtcagttcatctctctggtgatgtttggtttgatgatgtctgaagaccgaatttcactacaaaacaggaggcaagagatcatcygtggcttgagatctttacctgagctgatcaaggaagtgctgtctctggaggagaagatccacgacttggccctggagctctacacgcagagatcgctgctggtgatggggcggggctacaactatgccacctgcctggaaggagccctgaaaattaaagagataacctacatgcactcagaaggcatcctggctggggagctgaagcacgggcccctggcactgattgacaagcagatgcccgtcatcatggtcattatgaaggatccttgcttcgccaaatgccagaacgccctgcagcaagtcacggcccgccagggtcgccccattatactgtgctccaaggacgatactgaaagttccaagtttgcgtataagacaatygagctgccccacactgtggactgcctccagggcatcctgagcgtgattccgctgcagctgctgtccttccacctggctgttctccgaggatatgacgttgacttccccagaaatctggccaagtctgtaactgtggaatgaggctgagaccgtgacaagaccatcaccacctttcatctgattccagacctgtcccaacagcagggatgctacatgggaagagaagtggacatcccacatgttctgcgtgctcctgtagagcttgacagcttccacgtgccttctacccaagtgcttttgcttacagcagatactgtttctctgtgtcctgaagtcgccagaggagaagggaatcattgtttacacatggggatcagagcagacttctccactactgtgcaatagagatacagctctcttcagagtaactgtgaaccttttataaccaacactagagttagttttaaaagacaagatatttataatgacgactgtatagcttttaagttatttttctagtatgtggctttctgtagccgtggtaacggccaaactgttcatcctagctacccatgctctgtgtccaggcttgctcctggcaggtggcattcatctcagatgtgagcacaaggcattggccctctggactcctttctccttttctttcctctctaggctgctcctgaatcctgttctctgacatcygtggagcccctcctgcatccacctatgcctcctataagtccarttgaaatctcagcctccttcaacattttcttctcgtgtgtggcccacatccctccacttctccaacttctgtttaatctgatcacgkctctttttaagccctggcagcattttggtccctgctccttgcccatagtaaaacagcttgaaatatcccatgcaagagagtagtttcaagtgggcaactctgctctctatttaaaagcgtgcacaatcaaaagtactatgcaattttaggacaataaagaacatacagtttttttgtgtgtgtttgcattttrttaa

SEQ ID NO: 120 - DNA, 3059 bp, Homo sapiens
agctggagcccgcggagcccacggagcccacggagcccacggaggagcccacggaggagccccagcgtccgaacgggcagaccccctcgagccgcgaaggagcccgagaagcagccacgatgtgcggaatctttgcctacatgaactacagagtcccccggacgaggaaggagatcttcgaaaccctcatcaagggcctgcagcggctggagtacagaggctacgactcggcaggtgtggcgatcgatgggaataatcacgaagtcaaagaaagacacattcagctggtcaagaaaagggggaaagtcaaggctctcgatgaagaactttacaaacaagacagcatggacttaaaagtggagtttgagacacacttcggcattgcccacacgcgctgggccacccacggggtccccagtgctgtcaacagccaccctcagcgctcagacaaaggcaacgaatttgttgtcatccacaatgggatcatcacaaattacaaagatctgaggaaatttctggaaagcaaaggctacgagtttgagtcagaaacagatacagagaccatcgccaagctgattaaatatgtgttcgacaacagagaaactgaggacattacgttttcaacgttggtcgagagagtcattcagcagttggaaggtgcattcgcgctggttttcaagagtgtccactacccaggagaagccgttgccacacggagaggcagccccctgctcatcggagtccggagcaaatacaagctctccacagaacagatccctatcttatacaggacgtgcactctggagaatgtgaagaatatctgtaagacacggatgaagaggctggacagctccgcctgcctgcatgctgtgggcgacaaggccgtggaattcttctttgcttctgatgcaagcgctatcatagagcacaccaaccgggtcatcttcctggaggacgatgacatcgccgcagtggctgatgggaaactctccattcaccgggtcaagcgctcggcyagtgatgacccatctcgagccatccagaccttgcagatggaactgcagcaaatcatgaaaggtaacttcagtgcgtttatgcagaaggagatcttcgaacagccagaatcmgttttcaatactatgagaggtcgggtgaattttgaaaccaacacagtgctcctgggtggcttgaaggaccacttgaaggagattcgacgatgccgacggctcatcgtgattggctgtggaaccagctaccacgctgccgtggctacgcggcaagttttggaggaactgactgagcttcctgtgatggttgaacttgctagtgattttctggacaggaacacacctgtgttcagggatgacgtttgctttttcatcagccagtcaggcgagaccgcggacaccctcctggcgctgcgctactgtaaggaccgcggcgctctcaccgtgggcgtcaccaacaccgtgggcagctccatctctcgcgagaccgactgcggcgtccacatcaacgcagggccggagrtcggcgtggccagcaccaaggcttataccagtcagttcatctctctggtgatgtttggtttgatgatgtctgaagaccgaatttcactacaaaacaggaggcaagagatcatcygtggcttgagatctttacctgagctgatcaaggaagtgctgtctctggaggagaagatccacgacttggccctggagctctacacgcagagatcgctgctggtgatggggcggggctacaactatgccacctgcctggaaggagccctgaaaattaaagagataacctacatgcactcagaaggcatcctggctggggagctgaagcacgggcccctggcactgattgacaagcagatgcccgtcatcatggtcattatgaaggatccttgcttcgccaaatgccagaacgccctgcagcaagtcacggcccgccagggtcgccccattatactgtgctccaaggacgatactgaaagttccaagtttgcgtataagacaatygagctgccccacactgtggactgcctccagggcatcctgagcgtgattccgctgcagctgctgtccttccacctggctgttctccgaggatatgacgttgacttccccagaaatctggccaagtctgtaactgtggaatgaggctgagaccgtgacaagaccatcaccacctttcatctgattccagacctgtcccaacagcagggatgctacatgggaagagaagtggacatcccacatgttctgcgtgctcctgtagagcttgacagcttccacgtgccttctacccaagtgcttttgcttacagcagatactgtttctctgtgtcctgaagtcgccagaggagaagggaatcattgtttacacatggggatcagagcagacttctccactactgtgcaatagagatacagctctcttcagagtaactgtgaaccttttataaccaacactagagttagttttaaaagacaagatatttataatgacgactgtatagcttttaagttatttttctagtatgtggctttctgtagccgtggtaacggccaaactgttcatcctagctacccatgctctgtgtccaggcttgctcctggcaggtggcattcatctcagatgtgagcacaaggcattggccctctggactcctttctccttttctttcctctctaggctgctcctgaatcctgttctctgacatcygtggagcccctcctgcatccacctatgcctcctataagtccarttgaaatctcagcctccttcaacattttcttctcgtgtgtggcccacatccctccacttctccaacttctgtttaatctgatcacgkctctttttaagccctggcagcattttggtccctgctccttgcccatagtaaaacagcttgaaatatcccatgcaagagagtagtttcaagtgggcaactctgctctctatttaaaagcgtgcacaatcaaaagtactatgcaattttaggacaataaagaacatacagtttttttgtgtgtgtttgcattttrttaa

SEQ ID NO: 121 - DNA, 601 bp, Homo sapiens
tgctcttcctctcctgggccgtcctctgagcagcagacggggctaagcrttccccagctcgccttcacacacagcccgtgccaccacacygacggtaccatgaaggacgaggtagctctactggctgctgtcaccctcctgggagtcctgctgcaagcctacttctccctgcaggtgatctcggcgcgcagggccttccgcgtgtcgccgccgctcaccaccggcccacccgagttcgagcgcgtctaccgagcccagggcggcggccctgtgcggcctggtctacctgttcgcgcgcctccgctacttccagggctacgcgcgctccgcgcagctcaggctggcaccgctgtacgcgagcgcgcgcgccctctggctgctggtggcgctggctgcgctcggcctgctcgcccacttcctcccggccgcgctgcgcgccgcgctcctcggacggctccggacgctgctgccgtgggcctgagaccaaggcccccgggccgacggagccgggaaagaagagccggagcctccagctgccccggggaggggcgctcgcttccgcatcctagtctctatcattaaagttctagtgaccgagacc

SEQ ID NO: 122 - DNA, 672 bp, Homo sapiens
tgctcttcctctcctgggccgtcctctgagcagcagacggggctaagcrttccccagctcgccttcacacacagcccgtgccaccacacygacggtaccatgaaggacgaggtagctctactggctgctgtcaccctcctgggagtcctgctgcaagcctacttctccctgcaggtgatctcggcgcgcagggccttccgcgtgtcgccgccgctcaccaccggcccacccgagttcgagcgcgtctaccgagcccaggtgaactgcagcgagtacttcccgctgttcctcgccacgctctgggtcgccggcatcttctttcatgaaggggcggcggccctgtgcggcctggtctacctgttcgcgcgcctccgctacttccagggctacgcgcgctccgcgcagctcaggctggcaccgctgtacgcgagcgcgcgcgccctctggctgctggtggcgctggctgcgctcggcctgctcgcccacttcctcccggccgcgctgcgcgccgcgctcctcggacggctccggacgctgctgccgtgggcctgagaccaaggcccccgggccgacggagccgggaaagaagagccggagcctccagctgccccggggaggggcgctcgcttccgcatcctagtctctatcattaaagttctagtgaccgagacc

SEQ ID NO: 123 - DNA, 2379 bp, Homo sapiens
cccctgccgccgccgccgccgccttccgacccctgcgccccggccccggtcccccgggccatgcagcctcggccccgcgggcgcccgccgcgcacccgaggagatgaggctccgcaatggcaccttcctgacgctgctgctcttctgcctgtgcgccttcctctcgctgtcctggtacgcggcactcagcggccagaaaggcgacgttgtggacgtttaccagcgggagttcctggcgctgcgcgatcggttgcacgcagctgagcaggagagcctcaagcgctccaaggagctcaacctggtgctggacgagatcaagagggccgtgtcagaaaggcaggcgctgcgagacggagacggcaatcgcacctggggccgcctaacagaggacccccgattgaagccgtggaacggctcacaccggcacgtgctgcacctgcccaccgtcttccatcacytgccacacctgctggccaaggagagcagtctgcagcccgcggtgcgcgtgggccagggccgcaccggagtgtcggtggtgatgggcatcccgagcgtgcggcgcgaggtgcactcgtacctgactgacactctgcactcgctcatctccgagctgagcccgcaggagaaggaggactcggtcatcgtggtgctgatcgccgagactgactcacagtacacttcggcagtgacagagaacatcaaggccttgttccccacggagatccattctgggctcctggaggtcatctcaccctccccccacttctaccctgacttctcccgcctccgagagtcctttggggaccccaaggagagagtcaggtggaggaccaaacagaacctcgattactgcttcctcatgatgtacgcgcastccaaaggcatctactacgtgcagctggaggatgacatcgtggccaagcccaactacctgagcaccatgaagaactytgcactgcagcagccttcagaggactggatgatcctggagttctcccagctgggcttcattggtaagatgttcaagtcgctggacctgagcctgattgtagagttcattctcatgttctaccgggacaagcccatcgactggctcctggaccatattctgtgggtgaaagtctgcaacccygagaaggatgcgaagcactgtgaccggcagaaagccaacctgcggatccgcttcaaaccgtccctcttccagcacgtgggcactcactcctcgctggctggcaagatccagaaactgaaggacaaagactttggaaagcaggcgctgcggaaggagcatgtgaacccgccagcagaggtgagcacgagcctgaagacataccagcacttcaccctggagaaagcctacctgcgcgaggacttcttctgggccttcacccctgccgcgggggacttcatccgcttccgcttcttccaacctctaagactggagcggttcttcttccgcagtgggaacatcgagcacccggaggacaagctcttcaacacgtctgtggaggtgctgcccttcgacaaccctcagtcagacaaggaggccctgcaggagggccgcaccgccaccctccggtaccctcggagccccgacggctacctccagatcggctccttctacaagggagtggcagagggagaggtggacccagccttcggccctctggaagcactgcgcctctcgatccagacggactcccctgtgtgggtgattctgagcgagatcttcctgaaaaaggccgactaagctgcgggcttctgagggtaccctgtggccagccctgaagcccacatttctgggggtgtcgtcactgccgtccccggagggccagatacggccccgcccaaagggttctgcctggcgtcgggcttgggccggcctggggtccgccgctggcccggaggccctaggagctggtgctgcccccgcccgccgggccgcggaggaggcaggcggcccccacactgtgcctgaggcccggaaccgttcgcacccggcctgccccagtcaggccgttttagaagagcttttacttgggcgcccsccgtctctggcgcgaacactggaatgcatatactactttatgtgctgtgttttttattcttggatacatttgattttttcacgtaagtccacatatacttctataagagcgtgacttgtaataaagggttaatgaagtgtgtgcctcaaatgtgagcgccctgggcatctccctctgcccctgcggttggcttcatttggtctgtgccccaacatgccaactaagcctggcactgggcctccccagccagcatcagcagcgacctttccctgctaagtcaaggagccagcctggcctgcaggcgcggggtccagcccctggctgtgcagct

SEQ ID NO: 124 - DNA, 2074 bp, Homo sapiens
ctttctcaagccccatgttgcacgccaaactgttcccctgccgccgccgccgccgccttccgacccctgcgccccggccccggtcccccgggccatgcagcctcggccccgcgggcgcccgccgcgcacccgaggagatgaggctccgcaatggcaccttcctgacgctgctgctcttctgcctgtgcgccttcctctcgctgtcctggtacgcggcactcagcggccagaaaggcgacgttgtggacgtttaccagcgggagttcctggcgctgcgcgatcggttgcacgcagctgagcaggagagcctcaagcgctccaaggagctcaacctggtgctggacgagatcaagagggccgtgtcagaaaggcaggcgctgcgagacggagacggcaatcgcacctggggccgcctaacagaggacccccgattgaagccgtggaacggctcacaccggcacgtgctgcacctgcccaccgtcttccatcacytgccacacctgctggccaaggagagcagtctgcagcccgcggtgcgcgtgggccagggccgcaccggagtgtcggtggtgatgggcatcccgagcgtgcggcgcgaggtgcactcgtacctgactgacactctgcactcgctcatctccgagctgagcccgcaggagaaggaggactcggtcatcgtggtgctgatcgccgaggcgaactgactcacagtacacttcggcagtgacagagaacatcaaggccttgttccccacggagatccattctgggctcctggaggtcatctcaccctccccccacttctaccctgacttctcccgcctccgagagtcctttggggaccccaaggagagagtcaggtggaggaccaaacagaacctcgattactgcttcctcatgatgtacgcgcastccaaaggcatctactacgtgcagctggaggatgacatcgtggccaagcccaactacctgagcaccatgaagaactytgcactgcagcagccttcagaggactggatgatcctggagttctcccagctgggcttcattgcacgtgggcactcactcctcgctggctggcaagatccagaaactgaaggacaaagactttggaaagcaggcgctgcggaaggagcatgtgaacccgccagcagagtgggaacatcgagcacccggaggacaagctcttcaacacgtctgtggaggtgctgcccttcgacaaccctcagtcagacaaggaggccctgcaggagggccgcaccgccaccctccggtaccctcggagccccgacggctacctccagatcggctccttctacaagggagtggcagagggagaggtggacccagccttcggccctctggaagcactgcgcctctcgatccagacggactcccctgtgtgggtgattctgagcgagatcttcctgaaaaaggccgactaagctgcgggcttctgagggtaccctgtggccagccctgaagcccacatttctgggggtgtcgtcactgccgtccccggagggccagatacggccccgcccaaagggttctgcctggcgtcgggcttgggccggcctggggtccgccgctggcccggaggccctaggagctggtgctgcccccgcccgccgggccgcggaggaggcaggcggcccccacactgtgcctgaggcccggaaccgttcgcacccggcctgccccagtcaggccgttttagaagagcttttacttgggcgcccsccgtctctggcgcgaacactggaatgcatatactactttatgtgctgtgttttttattcttggatacatttgattttttcacgtaagtccacatatacttctataagagcgtgacttgtaataaagggttaatgaagtgtgtgcctcaaatgtgagcgccctgggcatctccctctgcccctgcggttggcttcatttggtctgtgccccaacatgccaactaagcctggcactgggcctccccagccagcatcagcagcgacctttccctgctaagtcaaggagccagcctggcctgcaggcgcggggtccagcccctggctgtgcagct

SEQ ID NO: 125 - DNA, 2354 bp, Homo sapiens
ctttctcaagccccatgttgcacgccaaactgttcccctgccgccgccgccgccgccttccgacccctgcgccccggccccggtcccccgggccatgcagcctcggccccgcgggcgcccgccgcgcacccgaggagatgaggctccgcaatggcaccttcctgacgctgctgctcttctgcctgtgcgccttcctctcgctgtcctggtacgcggcactcagcggccagaaaggcgacgttgtggacgtttaccagcgggagttcctggcgctgcgcgatcggttgcacgcagctgagcaggagagcctcaagcgctccaaggagctcaacctggtgctggacgagatcaagagggccgtgtcagaaaggcaggcgctgcgagacggagacggcaatcgcacctggggccgcctaacagaggacccccgattgaagccgtggaacggctcacaccggcacgtgctgcacctgcccaccgtcttccatcacytgccacacctgctggccaaggagagcagtctgcagcccgcggtgcgcgtgggccagggccgcaccggagtgtcggtggtgatgggcatcccgagcgtgcggcgcgaggtgcactcgtacctgactgacactctgcactcgctcatctccgagctgagcccgcaggagaaggaggactcggtcatcgtggtgctgatcgccgaggcgaggtgcttggtctccccacagactgactcacagtacacttcggcagtgacagagaacatcaaggccttgttccccacggagatccattctgggctcctggaggtcatctcaccctccccccacttctaccctgacttctcccgcctccgagagtcctttggggaccccaaggagagagtcaggtggaggaccaaacagaacctcgattactgcttcctcatgatgtacgcgcastccaaaggcatctactacgtgcagctggaggatgacatcgtggccaagcccaactacctgagcaccatgaagaactytgcactgcagcagccttcagaggactggatgatcctggagttctcccagctgggcttcattggtaagatgttcaagtcgctggacctgagcctgattgtagagttcattctcatgttctaccgggacaagcccatcgactggctcctggaccatattctgtgggtgaaagtctgcaacccygagaaggatgcgaagcactgtgaccggcagaaagccaacctgcggatccgcttcaaaccgtccctcttccagcacgtgggcactcactcctcgctggctggcaagatccagaaactgaaggacaaagactttggaaagcaggcgctgcggaaggagcatgtgaacccgccagcagaggtgagcacgagcctgaagacataccagcacttcaccctggagaaagcctacctgcgcgaggacttcttctgggccttcacccctgccgcgggggacttcatccgcttccgcttcttccaacctctaagactggagcggttcttcttccgcagtgggaacatcgagcacccggaggacaagctcttcaacacgtctgtggaggtgctgcccttcgacaaccctcagtcagacaaggaggccctgcaggagggccgcaccgccaccctccggtaccctcggagccccgacggctacctccagatcggctccttctacaagggagtggcagagggagaggtggacccagccttcggccctctggaagcactgcgcctctcgatccagacggactcccctgtgtgggtgattctgagcgaggtgaggctgggcagggccaggccaggcacggggagcagccagggagaccctggcggagctcagaggccctgctgaccctgggtccggctcttccagatcttcctgaaaaaggccgactaagctgcgggcttctgagggtaccctgtggccagccctgaagcccacatttctgggggtgtcgtcactgccgtccccggagggccagatacggccccgcccaaagggttctgcctggcgtcgggcttgggccggcctggggtccgccgctggcccggaggccctaggagctggtgctgcccccgcccgccgggccgcggaggaggcaggcggcccccacactgtgcctgaggcccggaaccgttcgcacccggcctgccccagtcaggccgttttagaagagcttttacttgggcgcccsccgtctctggcgcgaacactggaatgcatatactactttatgtgctgtgttttttattcttggatacatttgattttttcacgtaagtccacatatacttctataagagcgtgacttgtaataaagggttaatgaagtgtgtgcctcaaatg

SEQ ID NO: 126 - DNA, 2437 bp, Homo sapiens
ctttctcaagccccatgttgcacgccaaactgttcccctgccgccgccgccgccgccttccgacccctgcgccccggccccggtcccccgggccatgcagcctcggccccgcgggcgcccgccgcgcacccgaggagatgaggctccgcaatggcaccttcctgacgctgctgctcttctgcctgtgcgccttcctctcgctgtcctggtacgcggcactcagcggccagaaaggcgacgttgtggacgtttaccagcgggagttcctggcgctgcgcgatcggttgcacgcagctgagcaggagagcctcaagcgctccaaggagctcaacctggtgctggacgagatcaagagggccgtgtcagaaaggcaggcgctgcgagacggagacggcaatcgcacctggggccgcctaacagaggacccccgattgaagccgtggaacggctcacaccggcacgtgctgcacctgcccaccgtcttccatcacytgccacacctgctggccaaggagagcagtctgcagcccgcggtgcgcgtgggccagggccgcaccggagtgtcggtggtgatgggcatcccgagcgtgcggcgcgaggtgcactcgtacctgactgacactctgcactcgctcatctccgagctgagcccgcaggagaaggaggactcggtcatcgtggtgctgatcgccgaggcgaggtgcttggtctccccacagactgactcacagtacacttcggcagtgacagagaacatcaaggccttgttccccacggagatccattctgggctcctggaggtcatctcaccctccccccacttctaccctgacttctcccgcctccgagagtcctttggggaccccaaggagagagtcaggtggaggaccaaacagaacctcgattactgcttcctcatgatgtacgcgcastccaaaggcatctactacgtgcagctggaggatgacatcgtggccaagcccaactacctgagcaccatgaagaactytgcactgcagcagccttcagaggactggatgatcctggagttctcccagctgggcttcattggtaagatgttcaagtcgctggacctgagcctgattgtagagttcattctcatgttctaccgggacaagcccatcgactggctcctggaccatattctgtgggtgaaagtctgcaacccygagaaggatgcgaagcactgtgaccggcagaaagccaacctgcggatccgcttcaaaccgtccctcttccagcacgtgggcactcactcctcgctggctggcaagatccagaaactgaaggacaaagactttggaaagcaggcgctgcggaaggagcatgtgaacccgccagcagaggtgagcacgagcctgaagacataccagcacttcaccctggagaaagcctacctgcgcgaggacttcttctgggccttcacccctgccgcgggggacttcatccgcttccgcttcttccaacctctaagactggagcggttcttcttccgcagtgggaacatcgagcacccggaggacaagctcttcaacacgtctgtggaggtgctgcccttcgacaaccctcagtcagacaaggaggccctgcaggagggccgcaccgccaccctccggtaccctcggagccccgacggctacctccagatcggctccttctacaagggagtggcagagggagaggtggacccagccttcggccctctggaagcactgcgcctctcgatccagacggactcccctgtgtgggtgattctgagcgagatcttcctgaaaaaggccgactaagctgcgggcttctgagggtaccctgtggccagccctgaagcccacatttctgggggtgtcgtcactgccgtccccggagggccagatacggccccgcccaaagggttctgcctggcgtcgggcttgggccggcctggggtccgccgctggcccggaggccctaggagctggtgctgcccccgcccgccgggccgcggaggaggcaggcggcccccacactgtgcctgaggcccggaaccgttcgcacccggcctgccccagtcaggccgttttagaagagcttttacttgggcgcccsccgtctctggcgcgaacactggaatgcatatactactttatgtgctgtgttttttattcttggatacatttgattttttcacgtaagtccacatatacttctataagagcgtgacttgtaataaagggttaatgaagtgtgtgcctcaaatgtgagcgccctgggcatctccctctgcccctgcggttggcttcatttggtctgtgccccaacatgccaactaagcctggcactgggcctccccagccagcatcagcagcgacctttccctgctaagtcaaggagccagcctggcctgcaggcgcggggtccagcccctggctgtgcagct

SEQ ID NO: 127 - DNA, 2332 bp, Homo sapiens
ctttctcaagccccatgttgcacgccaaactgttcccctgccgccgccgccgccgccttccgacccctgcgccccggccccggtcccccgggccatgcagcctcggccccgcgggcgcccgccgcgcacccgaggagatgaggctccgcaatggcaccttcctgacgctgctgctcttctgcctgtgcgccttcctctcgctgtcctggtacgcggcactcagcggccagaaaggcgacgttgtggacgtttaccagcgggagttcctggcgctgcgcgatcggttgcacgcagctgagcaggagagcctcaagcgctccaaggagctcaacctggtgctggacgagatcaagagggccgtgtcagaaaggcaggcgctgcgagacggagacggcaatcgcacctggggccgcctaacaggacccccgattgaagccgtggaacggctcacaccggcacgtgctgcacctgcccaccgtcttccatcacytgccacacctgctggccaaggagagcagtctgcagcccgcggtgcgcgtgggccagggccgcaccggagtgtcggtggtgatgggcatcccgagcgtgcggcgcgaggtgcactcgtacctgactgacactctgcactcgctcatctccgagctgagcccgcaggagaaggaggactcggtcatcgtggtgctgatcgccgagactgactcacagtacacttcggcagtgacagagaacatcaaggccttgtgagttccccacggagatccattctgggctcctggaggtcatctcaccctccccccacttctaccctgacttctcccgcctccgagagtcctttggggaccccaaggagagagtcaggtggaggaccaaacagaacctcgattactgcttcctcatgatgtacgcgcastccaaaggcatctactacgtgcagctggaggatgacatcgtggccaagcccaactacctgagcaccatgaagaactytgcactgcagcagccttcagaggactggatgatcctggagttctcccagctgggcttcattggtaagatgttcaagtcgctggacctgagcctgattgtagagttcattctcatgttctaccgggacaagcccatcgactggctcctggaccatattctgtgggtgaaagtctgcaacccygagaaggatgcgaagcactgtgaccggcagaaagccaacctgcggatccgcttcaaaccgtccctcttccagcacgtgggcactcactcctcgctggctggcaagatccagaaactgaaggacaaagactttggaaagcaggcgctgcggaaggagcatgtgaacccgccagcagaggtgagcacgagcctgaagacataccagcacttcaccctggagaaagcctacctgcgcgaggacttcttctgggccttcacccctgccgcgggggacttcatccgcttccgcttcttccaacctctaagactggagcggttcttcttccgcagtgggaacatcgagcacccggaggacaagctcttcaacacgtctgtggaggtgctgcccttcgacaaccctcagtcagacaaggaggccctgcaggagggccgcaccgccaccctccggtaccctcggagccccgacggctacctccagatcggctccttctacaagggagtggcagagggagaggtggacccagccttcggccctctggaagcactgcgcctctcgatccagacggactcccctgtgtgggtgattctgagcgaggtgaggctgggcagggccaggccaggcacggggagcagccagggagaccctggcggagctcagaggccctgctgaccctgggtccggctcttccagatcttcctgaaaaaggccgactaagctgcgggcttctgagggtaccctgtggccagccctgaagcccacatttctgggggtgtcgtcactgccgtccccggagggccagatacggccccgcccaaagggttctgcctggcgtcgggcttgggccggcctggggtccgccgctggcccggaggccctaggagctggtgctgcccccgcccgccgggccgcggaggaggcaggcggcccccacactgtgcctgaggcccggaaccgttcgcacccggcctgccccagtcaggccgttttagaagagcttttacttgggcgcccsccgtctctggcgcgaacactggaatgcatatactactttatgtgctgtgttttttattcttggatacatttgattttttcacgtaagtccacatatacttctataagagcgtgacttgtaataaagggttaatgaagtgtgtgcctcaaatg

SEQ ID NO: 128 - DNA, 2431 bp, Homo sapiens
ctttctcaagccccatgttgcacgccaaactgttcccctgccgccgccgccgccgccttccgacccctgcgccccggccccggtcccccgggccatgcagcctcggccccgcgggcgcccgccgcgcacccgaggagatgaggctccgcaatggcaccttcctgacgctgctgctcttctgcctgtgcgccttcctctcgctgtcctggtacgcggcactcagcggccagaaaggcgacgttgtggacgtttaccagcgggagttcctggcgctgcgcgatcggttgcacgcagctgagcaggagagcctcaagcgctccaaggagctcaacctggtgctggacgagatcaagagggccgtgtcagaaaggcaggcgctgcgagacggagacggcaatcgcacctggggccgcctaacagaggacccccgattgaagccgtggaacggctcacaccggcacgtgctgcacctgcccaccgtcttccatcacytgccacacctgctggccaaggagagcagtctgcagcccgcggtgcgcgtgggccagggccgcaccggagtgtcggtggtgatgggcatcccgagcgtgcggcgcgaggtgcactcgtacctgactgacactctgcactcgctcatctccgagctgagcccgcaggagaaggaggactcggtcatcgtggtgctgatcgccgaggcgaggtgcttggtctccccacagactgactcacagtacacttcggcagtgacagagaacatcaaggccttgttccccacggagatccattctgggctcctggaggtcatctcaccctccccccacttctaccctgacttctcccgcctccgagagtcctttggggaccccaaggagagagtcaggtggaggaccaaacagaacctcgattactgcttcctcatgatgtacgcgcastccaaaggcatctactacgtgcagctggaggatgacatcgtggccaagcccaactacctgagcaccatgaagaactytgcactgcagcagccttcagaggactggatgatcctggagttctcccagctgggcttcattggtaagatgttcaagtcgctggacctgagcctgattgtagagttcattctcatgttctaccgggacaagcccatcgactggctcctggaccatattctgtgggtgaaagtctgcaacccygagaaggatgcgaagcactgtgaccggcagaaagccaacctgcggatccgcttcaaaccgtccctcttccagcacgtgggcactcactcctcgctggctggcaagatccagaaactgaaggacaaagactttggaaagcaggcgctgcggaaggagcatgtgaacccgccagcagaggtgagcacgagcctgaagacataccagcacttcaccctggagaaagcctacctgcgcgaggacttcttctgggccttcacccctgccgcgggggacttcatccgcttccgcttcttccaacctctaagactggagcggttcttcttccgcagtgggaacatcgagcacccggaggacaagctcttcaacacgtctgtggaggtgctgcccaaccctcagtcagacaaggaggccctgcaggagggccgcaccgccaccctccggtaccctcggagccccgacggctacctccagatcggctccttctacaagggagtggcagagggagaggtggacccagccttcggccctctggaagcactgcgcctctcgatccagacggactcccctgtgtgggtgattctgagcgagatcttcctgaaaaaggccgactaagctgcgggcttctgagggtaccctgtggccagccctgaagcccacatttctgggggtgtcgtcactgccgtccccggagggccagatacggccccgcccaaagggttctgcctggcgtcgggcttgggccggcctggggtccgccgctggcccggaggccctaggagctggtgctgcccccgcccgccgggccgcggaggaggcaggcggcccccacactgtgcctgaggcccggaaccgttcgcacccggcctgccccagtcaggccgttttagaagagcttttacttgggcgcccsccgtctctggcgcgaacactggaatgcatatactactttatgtgctgtgttttttattcttggatacatttgattttttcacgtaagtccacatatacttctataagagcgtgacttgtaataaagggttaatgaagtgtgtgcctcaaatgtgagcgccctgggcatctccctctgcccctgcggttggcttcatttggtctgtgccccaacatgccaactaagcctggcactgggcctccccagccagcatcagcagcgacctttccctgctaagtcaaggagccagcctggcctgcaggcgcggggtccagcccctggctgtgcagct

SEQ ID NO: 129 - DNA, 2413 bp, Homo sapiens
ctttctcaagccccatgttgcacgccaaactgttcccctgccgccgccgccgccgccttccgacccctgcgccccggccccggtcccccgggccatgcagcctcggccccgcgggcgcccgccgcgcacccgaggagatgaggctccgcaatggcaccttcctgacgctgctgctcttctgcctgtgcgccttcctctcgctgtcctggtacgcggcactcagcggccagaaaggcgacgttgtggacgtttaccagcgggagttcctggcgctgcgcgatcggttgcacgcagctgagcaggagagcctcaagcgctccaaggagctcaacctggtgctggacgagatcaagagggccgtgtcagaaaggcaggcgctgcgagacggagacggcaatcgcacctggggccgcctaacagaggacccccgattgaagccgtggaacggctcacaccggcacgtgctgcacctgcccaccgtcttccatcacytgccacacctgctggccaaggagagcagtctgcagcccgcggtgcgcgtgggccagggccgcaccggagtgtcggtggtgatgggcatcccgagcgtgcggcgcgaggtgcactcgtacctgactgacactctgcactcgctcatctccgagctgagcccgcaggagaaggaggactcggtcatcgtggtgctgatcgccgagactgactcacagtacacttcggcagtgacagagaacatcaaggccttgttccccacggagatccattctgggctcctggaggtcatctcaccctccccccacttctaccctgacttctcccgcctccgagagtcctttggggaccccaaggagagagtcaggtggaggaccaaacagaacctcgattactgcttcctcatgatgtacgcgcastccaaaggcatctactacgtgcagctggaggatgacatcgtggccaagcccaactacctgagcaccatgaagaactytgcactgcagcagccttcagaggactggatgatcctggagttctcccagctgggcttcattggtaagatgttcaagtcgctggacctgagcctgattgtagagttcattctcatgttctaccgggacaagcccatcgactggctcctggaccatattctgtgggtgaaagtctgcaacccygagaaggatgcgaagcactgtgaccggcagaaagccaacctgcggatccgcttcaaaccgtccctcttccagcacgtgggcactcactcctcgctggctggcaagatccagaaactgaaggacaaagactttggaaagcaggcgctgcggaaggagcatgtgaacccgccagcagaggtgagcacgagcctgaagacataccagcacttcaccctggagaaagcctacctgcgcgaggacttcttctgggccttcacccctgccgcgggggacttcatccgcttccgcttcttccaacctctaagactggagcggttcttcttccgcagtgggaacatcgagcacccggaggacaagctcttcaacacgtctgtggaggtgctgcccttcgacaaccctcagtcagacaaggaggccctgcaggagggccgcaccgccaccctccggtaccctcggagccccgacggctacctccagatcggctccttctacaagggagtggcagagggagaggtggacccagccttcggccctctggaagcactgcgcctctcgatccagacggactcccctgtgtgggtgattctgagcgagatcttcctgaaaaaggccgactaagctgcgggcttctgagggtaccctgtggccagccctgaagcccacatttctgggggtgtcgtcactgccgtccccggagggccagatacggccccgcccaaagggttctgcctggcgtcgggcttgggccggcctggggtccgccgctggcccggaggccctaggagctggtgctgcccccgcccgccgggccgcggaggaggcaggcggcccccacactgtgcctgaggcccggaaccgttcgcacccggcctgccccagtcaggccgttttagaagagcttttacttgggcgcccsccgtctctggcgcgaacactggaatgcatatactactttatgtgctgtgttttttattcttggatacatttgattttttcacgtaagtccacatatacttctataagagcgtgacttgtaataaagggttaatgaagtgtgtgcctcaaatgtgagcgccctgggcatctccctctgcccctgcggttggcttcatttggtctgtgccccaacatgccaactaagcctggcactgggcctccccagccagcatcagcagcgacctttccctgctaagtcaaggagccagcctggcctgcaggcgcggggtccagcccctggctgtgcagct

SEQ ID NO: 130 - DNA, 3402 bp, Homo sapiens
ccagagaggcagggtgtggagggtgggggctggcttcttgggtaagagatgcctcagggaagatctacctggctccctgctccttaaacctttccctcctgcccaggtccaccccttcctcttccctggtcacttggcacttcgacctcctgcccgtttcggaaaggggtgtgccctgaggtgactgaactttgcctgatcatgaccttgatcatgcacagggctgctggtggggtgaggccatcccacgcaactctggggtctgtgaagccaccaaggatcaaggaatggaagagctgcctgagtgtagagggagttcggtcaggcttcttaaacttggagacttggaaacagaaggccttgtaggccacataggttttcagagactcgcctggcagaggcctggagcgtcctgctgcgtggactgtgggcaccsagccaccaggaggttgttgatctcattcttgctcactggtccctgccagactggtggtgcctctctactgtcgggcagccccacctctgtgstgccccatccacctacagccctcatgcctgggcccagctggaggttctgacaggggccccctggggtggcatgcggacccttcagggtgccccaggcgcagcacaggtctccagagacacaggcaccagggcgttcagagctagtcccctcgctgctgttgactgtscttgagcagccccagggccggtttctcaacctcatttgctcacctgagcaatgaagtgaggtgggctcctggaactgcagcagccaccccccggggccatcgtgaggctaagaatccagtgcagggtgagcaaccagcgaccgctacaaggacagtgaagagctagcaccaggaccttgggtagcccacccgctggagggagcgtgtgctgcaaaaagcaagagtgggctttggaggccaacggatggagcggattcagtctgaggctgttccagcccttgcttaggatccacctacctaggtctggaaatcgtatttccacttcagatgccttctcagaggataaaataacccccggtgggggagagtactggaagagggctaattcccctggttttctccccatgagcattagtgtcagtgtaattttagagtgaccccagctatgtcacgtgtggcaggcacaagaacagatgtcaatgagctattgcagaggtggacacccagatgtgtgcgctggcacactggaggggcccgtagggtggctctagaccgccccctcgtgacggcttgcctaccacctgcaggcgacgttgtggacgtttaccagcgggagttcctggcgctgcgcgatcggttgcacgcagctgagcaggagagcctcaagcgctccaaggagctcaacctggtgctggacgagatcaagagggccgtgtcagaaaggcaggcgctgcgagacggagacggcaatcgcacctggggccgcctaacagaggacccccgattgaagccgtggaacggctcacaccggcacgtgctgcacctgcccaccgtcttccatcacytgccacacctgctggccaaggagagcagtctgcagcccgcggtgcgcgtgggccagggccgcaccggagtgtcggtggtgatgggcatcccgagcgtgcggcgcgaggtgcactcgtacctgactgacactctgcactcgctcatctccgagctgagcccgcaggagaaggaggactcggtcatcgtggtgctgatcgccgaggcgaggtgcttggtctccccacagactgactcacagtacacttcggcagtgacagagaacatcaaggccttgttccccacggagatccattctgggctcctggaggtcatctcaccctccccccacttctaccctgacttctcccgcctccgagagtcctttggggaccccaaggagagagtcaggtggaggaccaaacagaacctcgattactgcttcctcatgatgtacgcgcastccaaaggcatctactacgtgcagctggaggatgacatcgtggccaagcccaactacctgagcaccatgaagaactytgcactgcagcagccttcagaggactggatgatcctggagttctcccagctgggcttcattggtaagatgttcaagtcgctggacctgagcctgattgtagagttcattctcatgttctaccgggacaagcccatcgactggctcctggaccatattctgtgggtgaaagtctgcaacccygagaaggatgcgaagcactgtgaccggcagaaagccaacctgcggatccgcttcaaaccgtccctcttccagcacgtgggcactcactcctcgctggctggcaagatccagaaactgaaggacaaagactttggaaagcaggcgctgcggaaggagcatgtgaacccgccagcagaggtgagcacgagcctgaagacataccagcacttcaccctggagaaagcctacctgcgcgaggacttcttctgggccttcacccctgccgcgggggacttcatccgcttccgcttcttccaacctctaagactggagcggttcttcttccgcagtgggaacatcgagcacccggaggacaagctcttcaacacgtctgtggaggtgctgcccttcgacaaccctcagtcagacaaggaggccctgcaggagggccgcaccgccaccctccggtaccctcggagccccgacggctacctccagatcggctccttctacaagggagtggcagagggagaggtggacccagccttcggccctctggaagcactgcgcctctcgatccagacggactcccctgtgtgggtgattctgagcgaggtgaggctgggcagggccaggccaggcacggggagcagccagggagaccctggcggagctcagaggccctgctgaccctgggtccggctcttccagatcttcctgaaaaaggccgactaagctgcgggcttctgagggtaccctgtggccagccctgaagcccacatttctgggggtgtcgtcactgccgtccccggagggccagatacggccccgcccaaagggttctgcctggcgtcgggcttgggccggcctggggtccgccgctggcccggaggccctaggagctggtgctgcccccgcccgccgggccgcggaggaggcaggcggcccccacactgtgcctgaggcccggaaccgttcgcacccggcctgccccagtcaggccgttttagaagagcttttacttgggcgcccsccgtctctggcgcgaacactggaatgcatatactactttatgtgctgtgttttttattcttggatacatttgattttttcacgtaagtccacatatacttctataagagcgtgacttgtaataaagggttaatgaagtgtgtgcctcaaatg

SEQ ID NO: 131 - DNA, 3461 bp, Homo sapiens
ccagagaggcagggtgtggagggtgggggctggcttcttgggtaagagatgcctcagggaagatctacctggctccctgctccttaaacctttccctcctgcccaggtccaccccttcctcttccctggtcacttggcacttcgacctcctgcccgtttcggaaaggggtgtgccctgaggtgactgaactttgcctgatcatgaccttgatcatgcacagggctgctggtggggtgaggccatcccacgcaactctggggtctgtgaagccaccaaggatcaaggaatggaagagctgcctgagtgtagagggagttcggtcaggcttcttaaacttggagacttggaaacagaaggccttgtaggccacataggttttcagagactcgcctggcagaggcctggagcgtcctgctgcgtggactgtgggcaccsagccaccaggaggttgttgatctcattcttgctcactggtccctgccagactggtggtgcctctctactgtcgggcagccccacctctgtgstgccccatccacctacagccctcatgcctgggcccagctggaggttctgacaggggccccctggggtggcatgcggacccttcagggtgccccaggcgcagcacaggtctccagagacacaggcaccagggcgttcagagctagtcccctcgctgctgttgactgtscttgagcagccccagggccggtttctcaacctcatttgctcacctgagcaatgaagtgaggtgggctcctggaactgcagcagccaccccccggggccatcgtgaggctaagaatccagtgcagggtgagcaaccagcgaccgctacaaggacagtgaagagctagcaccaggaccttgggtagcccacccgctggagggagcgtgtgctgcaaaaagcaagagtgggctttggaggccaacggatggagcggattcagtctgaggctgttccagcccttgcttaggatccacctacctaggtctggaaatcgtatttccacttcagatgccttctcagaggataaaataacccccggtgggggagagtactggaagagggctaattcccctggttttctccccatgagcattagtgtcagtgtaattttagagtgaccccagctatgtcacgtgtggcaggcacaagaacagatgtcaatgagctattgcagaggtggacacccagatgtgtgcgctggcacactggaggggcccgtagggtggctctagaccgccccctcgtgacggcttgcctaccacctgcaggcgacgttgtggacgtttaccagcgggagttcctggcgctgcgcgatcggttgcacgcagctgagcaggagagcctcaagcgctccaaggagctcaacctggtgctggacgagatcaagagggccgtgtcagaaaggcaggcgctgcgagacggagacggcaatcgcacctggggccgcctaacagaggacccccgattgaagccgtggaacggctcacaccggcacgtgctgcacctgcccaccgtcttccatcacytgccacacctgctggccaaggagagcagtctgcagcccgcggtgcgcgtgggccagggccgcaccggagtgtcggtggtgatgggcatcccgagcgtgcggcgcgaggtgcactcgtacctgactgacactctgcactcgctcatctccgagctgagcccgcaggagaaggaggactcggtcatcgtggtgctgatcgccgagactgactcacagtacacttcggcagtgacagagaacatcaaggccttgttccccacggagatccattctgggctcctggaggtcatctcaccctccccccacttctaccctgacttctcccgcctccgagagtcctttggggaccccaaggagagagtcaggtggaggaccaaacagaacctcgattactgcttcctcatgatgtacgcgcastccaaaggcatctactacgtgcagctggaggatgacatcgtggccaagcccaactacctgagcaccatgaagaactytgcactgcagcagccttcagaggactggatgatcctggagttctcccagctgggcttcattggtaagatgttcaagtcgctggacctgagcctgattgtagagttcattctcatgttctaccgggacaagcccatcgactggctcctggaccatattctgtgggtgaaagtctgcaacccygagaaggatgcgaagcactgtgaccggcagaaagccaacctgcggatccgcttcaaaccgtccctcttccagcacgtgggcactcactcctcgctggctggcaagatccagaaactgaaggacaaagactttggaaagcaggcgctgcggaaggagcatgtgaacccgccagcagaggtgagcacgagcctgaagacataccagcacttcaccctggagaaagcctacctgcgcgaggacttcttctgggccttcacccctgccgcgggggacttcatccgcttccgcttcttccaacctctaagactggagcggttcttcttccgcagtgggaacatcgagcacccggaggacaagctcttcaacacgtctgtggaggtgctgcccttcgacaaccctcagtcagacaaggaggccctgcaggagggccgcaccgccaccctccggtaccctcggagccccgacggctacctccagatcggctccttctacaagggagtggcagagggagaggtggacccagccttcggccctctggaagcactgcgcctctcgatccagacggactcccctgtgtgggtgattctgagcgagatcttcctgaaaaaggccgactaagctgcgggcttctgagggtaccctgtggccagccctgaagcccacatttctgggggtgtcgtcactgccgtccccggagggccagatacggccccgcccaaagggttctgcctggcgtcgggcttgggccggcctggggtccgccgctggcccggaggccctaggagctggtgctgcccccgcccgccgggccgcggaggaggcaggcggcccccacactgtgcctgaggcccggaaccgttcgcacccggcctgccccagtcaggccgttttagaagagcttttacttgggcgcccsccgtctctggcgcgaacactggaatgcatatactactttatgtgctgtgttttttattcttggatacatttgattttttcacgtaagtccacatatacttctataagagcgtgacttgtaataaagggttaatgaagtgtgtgcctcaaatgtgagcgccctgggcatctccctctgcccctgcggttggcttcatttggtctgtgccccaacatgccaactaagcctggcactgggcctccccagccagcatcagcagcgacctttccctgctaagtcaaggagccagcctggcctgcaggcgcggggtccagcccctggctgtgcagct

SEQ ID NO: 132 - DNA, 2956 bp, Homo sapiens
agttttaaacgcgcagccgagggccgcgcgcagragtagggagggcctagggcggcggagccgactcgtmgcggccgaggcgcrcgcggtccgygccggcgtcagtctgggattggccggcccgcgacttcctccgccccctgccaatcgccggggacgacttccgtgggtttttccggctcycccgcgtcgctaaggagcgacgggctgtcggccagaccccgagttctcggtgcgctcagcggccgccgacgctaggaggccgcgctccgcccccgctaccatgaggccccggaaagccttcctgctcctgctgctcttggggctggtgcagctgctggccgtggcgggtgccgagggcccggacgaggattcttctaacagagaaaatgccattgaggatgaagaggaggaggaggaggaagatgatgatgaggaagaagacgacttggaagttaaggaagaaaatggagtcttggtcctaaatgatgcaaactttgataattttgtggctgacaaagacacagtgctgctggagttttatgctccatggtgtggacattgcaagcagtttgctccggaatatgaaaaaattgccaacatattaaaggataaagatcctcccattcctgttgccaagatcgatgcaacctcagcgtctgtgctggccagcaggtttgatgtgagtggctaccccaccatcaagatccttaagaaggggcaggctgtagactacgagggctccagaacccaggaagaaattgttgccaaggtcagagaagtctcccagcccgactggaygcctccaccagaagtcacgcttgtgttgaccaaagagaactttgatgaagttgtgaatgatgcagatatcattctggtggagttttatgccccatggtgtggacactgcaagaaacttgcccccgagtatgagaaggccgccaaggagctcagcaagcgttctcctccaattcccctggcaaaggtcgacgccacygcagaaacagacctggccaagaggtttgatgtctctggctatcccaccctgaaaattttccgcaaaggaaggccttatgactacaacggcccacgagaaaaatatggaatcgttgattacatgatygagcagtccgggcctccctccaaggagattctgaccctgaagcaggtccaggagttcctgaaggatggagacgatgtcatcatcatcggggtctttaagggggagagtgacccagcctaccagcaataccaggatgccgctaacaacctgagagaagattacaaatttcaccacactttcagcacagaaatagcaaagttcttgaaagtctcccaggggcagttggttgtaatgcagcctgagaaattccagtccaagtatgagccccggagccacatgatggacgtccagggctccacccaggactcggccatcaaggacttcgtgctgaagtacgccctgcccctggttggccaccgcaaggtgtcaaacgatgctaagcgctacaccaggcgccccctggtggtcgtctactacagtgtggacttcagctttgattacagagctgcaactcagttttggcggagcaaagtcctagaggtggccaaggacttccctgagtacacctttgccattgcggacgaagaggactatgctggggaggtgaaggacytggggctcagcgagagtggggaggatgtcaatgccgccatcctggacgagagtgggaagaagttcgccatggagccagaggagtttgactctgacaccctccgcgagtttgtcactgctttcaaaaaaggaaaactgaagccagtcatcaaatcccagccagtgcccaagaacaacaagggacccrtcaaggtcgtggtgggaaagacctttgactccattgtgatggaccccaagaaggacgtcctcatcgagttctacgcgccatggtgcgggcactgcaagcagctagagcccgtgtacaacagcctggccaagaagtacaagggccaaaagggcctggtcatcgccaagatggacgccactgccaacgacgtccccagcgaccgctataaggtggagggcttccccaccatctacttcgccmccagtggggacaaaaagaacccagttaaatttgagggtggagacagagatctggagcatttgagcaagtttatagaagaacatgccacaaaactgagcaggaccaaggaagagctttgaaggcctgaggtctgcggaaggtgggaggaggcagacrccctgcgtggcccatggtcggggcgtccacgccgaggccggcaacaaacgacagtatctcggattcctttttttttttttttaattttttatactttggtgtttcacttcatgctctgaatactgaataaccatgaatgactgaatagtttagtccagatttttacagaggatacatctatttttatcattatttggggtttgaaaaatttttttttacaccttctaatttctttatttctcaaagcagataattcttctgtgtgaaaatgttttctttttttaatttaaggtttaaaattcctttkccaaatcatgttgattttgctctttgctttttcgttgtctgagaaattgttggcgtagatttggcttctggtatgtgtttctgattgcttcctgttgagcacaaagtgagagctgccactgagcagccctgccaggggtgctgtttcaggctgggcatcsccaggcggcctccctgcaaaccaagggctgggggcaaaggggcatgatccagggtcccccagggtgggctcagctccagggagaggccacccacgtggcagccccacctcttgagagcccccagtgccggagcagaaaggaccctggacccagaggcagatactgcggggtggtagaaaaggtagagtaggctgtggcaatggaataaaacacgattaaaaacgttaagaa

SEQ ID NO: 133 - DNA, 2860 bp, Homo sapiens
agttttaaacgcgcagccgagggccgcgcgcagragtagggagggcctagggcggcggagccgactcgtmgcggccgaggcgcrcgcggtccgygccggcgtcagtctgggattggccggcccgcgacttcctccgccccctgccaatcgccggggacgacttccgtgggtttttccggctcycccgcgtcgctaaggagcgacgggctgtcggccagaccccgagttctcggtgcgctcagcggccgccgacgctaggaggccgcgctccgcccccgctaccatgaggccccggaaagccttcctgctcctgctgctcttggggctggtgcagctgctggccgtggcgggtgccgagggcccggacgaggattcttctaacagagaaaatgccattgaggatgaagaggaggaggaggaggaagatgatgatgaggaagaagacgacttggaagttaaggaagaaaatggagtcttggtcctaaatgatgcaaactttgataattttgtggctgacaaagacacagtgctgctggagttttatgctccatggtgtggacattgcaagcagtttgctccggaatatgaaaaaattgccaacatattaaaggataaagatcctcccattcctgttgccaagatcgatgcaacctcagcgtctgtgctggccagcaggtttgatgtgagtggctaccccaccatcaagatccttaagaaggggcaggctgtagactacgagggctccagaacccaggaagaaattgttgccaaggtcagagaagtctcccagcccgactggaygcctccaccagaagtcacgcttgtgttgaccaaagagaactttgatgaagttgtgaatgatgcagatatcattctggtggagttttatgccccatggtgtggacactgcaagaaacttgcccccgagtatgagaaggccgccaaggagctcagcaagcgttctcctccaattcccctggcaaaggtcgacgccacygcagaaacagacctggccaagaggtttgatgtctctggctatcccaccctgaaaattttccgcaaaggaaggccttatgactacaacggcccacgagaaaaatatggaatcgttgattacatgatygagcagtccgggcctccctccaaggagattctgaccctgaagcaggtccaggagttcctgaaggatggagacgatgtcatcatcatcggggtctttaagggggagagtgacccagcctaccagcaataccaggatgccgctaacaacctgagagaagattacaaatttcaccacactttcagcacagaaatagcaaagttcttgaaagtctcccaggggcagttggttgtaatgcagcctgagaaattccagtccaagtatgagccccggagccacatgatggacgtccagggctccacccaggactcggccatcaaggacttcgtgctgaagtacgccctgcccctggttggccaccgcaaggtgtcaaacgatgctaagcgctacaccaggcgccccctggtggtcgtctactacagtgtggacttcagctttgattacagagctgcaactcagttttggcggagcaaagtcctagaggtggccaaggacttccctgagtacacctttgccattgcggacgaagaggactatgctggggaggtgaaggacytggggctcagcgagagtggggaggatgtcaatgccgccatcctggacgagagtgggaagaagttcgccatggagccagaggagtttgactctgacaccctccgcgagtttgtcactgctttcaaaaaaggaaaactgaagccagtcatcaaatcccagccagtgcccaagaacaacaagggacccrtcaaggtcgtggtgggaaagacctttgactccattgtgatggaccccaagaaggacgtcctcatcgagttctacgcgccatggtgcgggcactgcaagcagctagagcccgtgtacaacagcctggccaagaagtacaagggccaaaagggcctggtcatcgccaagatggacgccactgccaacgacgtccccagcgaccgctataaggtggagggcttccccaccatctacttcgccmccagtggggacaaaaagaacccagttaaatttgagggtggagacagagatctggagcatttgagcaagtttatagaagaacatgccacaaaactgagcaggaccaaggaagagctttgaaggcctgaggtctgcggaaggtgggaggaggcagacrccctgcgtggcccatggtcggggcgtccacgccgaggccggcaacaaacgacagtatctcggattcctttttttttttttttaattttttatactttggtgtttcacttcatgctcttacatctatttttatcattatttggggtttgaaaaatttttttttacaccttctaatttctttatttctcaaagcagataattcttctgtgtgaaaatgttttctttttttaatttaaggtttaaaattcctttkccaaatcatgttgattttgctctttgctttttcgttgtctgagaaattgttggcgtagatttggcttctggtatgtgtttctgattgcttcctgttgagcacaaagtgagagctgccactgagcagccctgccaggggtgctgtttcaggctgggcatcsccaggcggcctccctgcaaaccaagggctgggggcaaaggggcatgatccaggccccacctcttgagagcccccagtgccggagcagaaaggaccctggacccagaggcagatactgcggggtggtagaaaaggtagagtaggctgtggcaatggaataaaacacgattaaaaacgttaagaactgcgtt

SEQ ID NO: 134 - DNA, 780 bp, Homo sapiens
atgtgtgactggctgattcatgtgtcatcttccaatcgggcaggtcgaggtggtgcatctatctatggcaaacartttgaagatgaacttcatccagacttgaaattcacgggggctggaattctcgcaatggccaatgcggggccagataccaatggcagccagttctttgtgaccctcgcccccacccagtggcttgacggcaaacacaccatttttggccgagtgtgtcagggcataggaatggtgaatcgcgtgggaatggtagaaacaaactcccaggaccgccctgtggacgacgtgaagatcattaaggcatacccttctgggtagacttgctaccctcttgagcagctcttatgaaccataatgctgcttcttgtgcatgtctgctctgatatacgtcgaacaatgtagcagccactgtcatttctcagtggttttgcctaaccaaacttcttcctaaggagatttctagggaatgtatgcatctctatatatattttccctctcaaaaccagaacatcaacagtgctgtttctgacacttcagacatcccacgcaaagccacattgaatttttgccaaatgaaaaacacatccaacaatcaagtttccaagactttagagaaattaggtccaagatttttatatgttcagttgtttatgtataaaaataactttctggattttgtggggaggagcaggagaggaaggaagttaatacctatgtaatacatagaaacttccmcaataaaatgccattgatggttgaaattgc

SEQ ID NO: 135 - DNA, 1720 bp, Homo sapiens
ccgcgaatgaagtttgcattttcctctgttcttgagcccagcttcttctcgtctcccaccccagcttcccggcattggaagaagggaccgtcctcttccttgtcttggccacccaaatcctggtatcgaaagggttgaacggaccggaagtgtgcagcagcgacgggtccccagctaatcgacgccggaagtagcaattactagacaagcattccgccgccggcttcgctatggcggcaattcccccagattcctggcagccacccaacgtttacttggagaccagcatgggaatcattgtgctggagctgtactggaagcatgctccaaagacctstaagaactttgctgagttggctcgtcgaggttactacaatggcacaaaattccacagaattatcaaagacttcatgatccaaggaggtgacccaacagggacaggtcgaggtggtgcatctatctatggcaaacartttgaagatgaacttcatccagacttgaaattcacgggggctggaattctcgcaatggccaatgcggggccagataccaatggcagccagttctttgtgaccctcgcccccacccagtggcttgacggcaaacacaccatttttggccgagtgtgtcagggcataggaatggtgaatcgcgtgggaatggtagaaacaaactcccaggaccgccctgtggacgacgtgaagatcattaaggcatacccttctgggtagacttgctaccctcttgagcagctcttctgagatggccccagtgaaccagcttctagatgacatagaatgacatgtaatgctaaatttcattttggctttgcaagtcatgaagcttaggaggcctggcatcttgggtgagttagagatggaagtacattttaataggatgcttcttttctcttcccccagtgcctaggttgccagagcatttgcacaaatgcccctgtttatcaataggtgactacttactacacatgaaccataatgctgcttcttgtgcatgtctgctctgatatacgtcgaacaatgtagcagccactgtcatttctcagtggttttgcctaaccaaacttcttcctaaggagatttatattctggcctacacagcagtccttgatggctgacagccacagaattccaaaccaagtagtgtctgtcagccctcttaactctgtgcacgccctatttcagtcttttacatttgttcttctagggaatgtatgcatctctatatatattttccctctcaaaaccagaacatcaacagtgctgtttctgacacttcagacatcccacgcaaagccacattgaatttttgccaaatgaaaaacacatccaacaatcaagtttctaagaaggtgtcaagtggggaataataataatgtataataatcaagaaattagtttattaaaaggaagcagaagcattgaccattttttcccagagaagaggagaaatctgtagtgagcaaaggacagaccatgaatcctccttgagaagtagtactctcagaaaggagaagcgccactcaagttcttttaacccaagactttagagaaattaggtccaagatttttatatgttcagttgtttatgtataaaaataactttctggattttgtggggaggagcaggagaggaaggaagttaatacctatgtaatacatagaaacttccmcaataaaatgccattgatggttgaaattgc

SEQ ID NO: 136 - DNA, 1178 bp, Homo sapiens
ccgcgaatgaagtttgcattttcctctgttcttgagcccagcttcttctcgtctcccaccccagcttcccggcattggaagaagggaccgtcctcttccttgtcttggccacccaaatcctggtatcgaaagggttgaacggaccggaagtgtgcagcagcgacgggtccccagctaatcgacgccggaagtagcaattactagacaagcattccgccgccggcttcgctatggcggcaattcccccagattcctggcagccacccaacgtttacttggagaccagcatgggaatcattgtgctggagctgtactggaagcatgctccaaagacctstaagaactttgctgagttggctcgtcgaggttactacaatggcacaaaattccacagaattatcaaagacttcatgatccaaggaggtgacccaacagggacaggtcgaggtggtgcatctatctatggcaaacartttgaagatgaacttcatccagacttgaaattcacgggggctggaattctcgcaatggccaatgcggggccagataccaatggcagccagttctttgtgaccctcgcccccacccagtggcttgacggcaaacacaccatttttggccgagtgtgtcagggcataggaatggtgaatcgcgtgggaatggtagaaacaaactcccaggaccgccctgtggacgacgtgaagatcattaaggcatacccttctgggtagacttgctaccctcttgagcagctcttatgaaccataatgctgcttcttgtgcatgtctgctctgatatacgtcgaacaatgtagcagccactgtcatttctcagtggttttgcctaaccaaacttcttcctaaggagatttctagggaatgtatgcatctctatatatattttccctctcaaaaccagaacatcaacagtgctgtttctgacacttcagacatcccacgcaaagccacattgaatttttgccaaatgaaaaacacatccaacaatcaagtttccaagactttagagaaattaggtccaagatttttatatgttcagttgtttatgtataaaaataactttctggattttgtggggaggagcaggagaggaaggaagttaatacctatgtaatacatagaaacttccmcaataaaatgccattgatggttgaaattgc

SEQ ID NO: 137 - DNA, 2767 bp, Homo sapiens
aggccgcggaaggggcgtggcctcggtccggggtggcggccgttgccgccaccagggcctcttcctgcgggcggtgctgccgaggccggcctgcgcggggcagtcatggtacccccttgagcgggctgtggcggagagcggggcggggactggctggagggtggcggcccggcggggcgggggcggggccggcctctggctccttcttcctctgcatgtggctggcggccgcagagcagttcagttcgctcactcctcgccggccgcctctccttcgggctctcctcgcgtcactggagccatggcgttcgccgagacctacccggcggcatcctccctgcccaacggcgattgcggccgccccagggcgcggccsggaggaaaccgggtgacggtggtgctcggtgcgcagtggggcgacgaaggcaaagggaaggtggtggacctgctggcgcaggacgccgacatcgtgtgccgctgccagggaggaaataatgctggccatacagttgttgtggattctgtggaatatgattttcatctcttacccagtggaataattaatccaaatgtcactgcattcattggaaatggtgtggtaattcatctacctggattgtttgaagaagcagagaaaaatgttcaaaaaggaaaaggactagaaggctgggaaaaaaggcttattatatctgacagagctcatattgtatttgattttcatcaagcagctgatggtatccaggaacaacagagacaagaacaagcaggaaaaaatttgggtacaacaaaaaagggcattggcccagtttattcgtccaaagctgctcggagtggactcaggatgtgcgaccttgtttctgactttgatggcttctctgagaggtttaaagttctagctaaccaatacaaatctatataccccactttggaaatagacattgaaggtgaattacaaaaactcaagggttatatggaaargattaaaccaatggtgagagatggagtttattttctatatgaggccctacatggaccaccaaagaaaatcttggtagaaggtgcaaatgcagcactattagatattgattttgggacttacccttttgtaacctcttcaaattgtactgttggaggtgtttgtactggtttgggtatgccacctcaaaatgttggagaagtgtatggagttgtgaaagcttatacaactagagttggtattggtgcctttcctacagagcaagacaatgaaattggagaattattacaaacaaggggtagagagtttggtgtaactactggaaggaaaagaagatgtggctggttggacctcgttttgctcaaatatgctcatatgatcaatggatttactgcgttggcacttaccaagttggatattttggacatgtttacggaaatcaaagttggagttgcttacaagttagatggtgaaatcatacctcatatcccagcaaaccaagaagtcttaaataaagttgaagttcaatataagactctcccaggatggaacacagacatatcaaatgcaagggcgtttaaagaactacctgttaatgcacaaaactatgttcgatttattgaagatgagcttcaaattccagttaagtggattggtgttggtaaatccagagaatctatgattcaactcttttaatgattgccagtaatgcaagaaacactccttgagagggaggggaaaagactttcttaaatatttcatttatgacctgcaaattcaagaataaagacactgaagtaagtttgaagccctacagttgtttccagtcttttcagatggatgcctactgtggagattaactttggcatattccagtgtcagctttctttagctggaattgccaaatcatttgttgctcctgctgctctcatggtgccacgtttttttttttcaatgtttagtaatagtataatccatgttgtttgatatcaaaagtagaattrcttttaatgtagtttttcttcattattgtcattgcgtgttcttaagttttacccctattagatggtaagaacaattaatgcagttttgcacaaatatttttacattctgatcattcagttctgtcattgtaatctttgttgttagaaacaaatgatgaaaacataggggttctgtaaacttttgtaatgctatgaattctgtttaaattttgggctgtctattttctgctgaaaccatgcaaaattgagctttggtggggctgggagggggttatgtattcatgggacctttaatttgtacagaacacagaacttatttctgtcagttatttaatacattgaaaatttagtgaaatgttcaaagagaatagatgtttcccaaaacaacaatctttatgttaaaaatagtcattaaaagatctgttgtaatatatggtggatatttttctttaatttcaaacattacctctgaaatgtgtatcttttcttttttatcttaccattaattttaaatctagtggattggttttcaacatcgtgcctgccgatatgcctacagaatcatctgtaagtgtcaaaatgaacccacgttgttagccataattttgattatgcctttatttctcctttcttgaaaaaaaaaaggtgttattttgacaattaggcataacattgttttgtagattatcttttaatgaactattttaaatgttaaattaggtgccacttaaatttattttattacaccatgaatagctgattaaaagaaccaaatatttctagtatg

SEQ ID NO: 138 - DNA, 1948 bp, Homo sapiens
aggccgcggaaggggcgtggcctcggtccggggtggcggccgttgccgccaccagggcctcttcctgcgggcggtgctgccgaggccggcctgcgcggggcagtcatggtacccccttgagcgggctgtggcggagagcggggcggggactggctggagggtggcggcccggcggggcgggggcggggccggcctctggctccttcttcctctgcatgtggctggcggccgcagagcagttcagttcgctcactcctcgccggccgcctctccttcgggctctcctcgcgtcactggagccatggcgttcgccgagacctacccggcggcatcctccctgcccaacggcgattgcggccgccccagggcgcggccsggaggaaaccgggtgacggtggtgctcggtgcgcagtggggcgacgaaggcaaagggaaggtggtggacctgctggcgcaggacgccgacatcgtgtgccgctgccagggaggaaataatgctggccatacagttgttgtggattctgtggaatatgattttcatctcttacccagtggaataattaatccaaatgtcactgcattcattggaaatggtgtggtaattcatctacctggattgtttgaagaagcagagaaaaatgttcaaaaaggaaaaggactagaaggctgggaaaaaaggcttattatatctgacagagctcatattgtatttgattttcatcaagcagctgatggtatccaggaacaacagagacaagaacaagcaggaaaaaatttgggtacaacaaaaaagggcattggcccagtttattcgtccaaagctgctcggagtggactcaggatgtgcgaccttgtttctgactttgatggcttctctgagaggtttaaagttctagctaaccaatacaaatctatataccccactttggaaatagacattgaaggtgaattacaaaaactcaagggttatatggaaargattaaaccaatggtgagagatggagtttattttctatatgaggccctacatggaccaccaaagaaaatcttggtagaaggtgcaaatgcagcactattagatattgattttgggacttacccttttgtaacctcttcaaattgtactgttggaggtgtttgtactggtttgggtatgccacctcaaaatgttggagaagtgtatggagttgtgaaagcttatacaactagagttggtattggtgcctttcctacagagcaagacaatgaaattggagaattattacaaacaaggggtagagagtttggtgtaactactggaaggaaaagaagatgtggctggttggacctcgttttgctcaaatatgctcatatgatcaatggatttactgcgttggcacttaccaagttggatattttggacatgtttacggaaatcaaagttggagttgcttacaagttagatggtgaaatcatacctcatatcccagcaaaccaagaagtcttaaataaagttgaagttcaatataagactctcccaggatggaacacagacatatcaaatgcaagggcgtttaaagaactacctgttaatgcacaaaactatgttcgatttattgaagatgagcttcaaattccagttaagtggattggtgttggtaaatccagagaatctatgattcaactcttttaatgattgccagtaatgcaagaaacactccttgagagggaggggaaaagactttcttaaatatttcatttatgacctgcaaattcaagaataaagacactgaatggattggttttcaacatcgtgcctgccgatatgcctacagaatcatctaatcatcaaaaaacaaataggaactatcagaatgaactttgtcagaactctggaaaacacaggtttacatcagtcaggtaaacaatagataaagaaaaaggcaaattaaaaatggtaggaaagctg

SEQ ID NO: 139 - DNA, 2392 bp, Homo sapiens
cgtggctgccgctactcccaggcgttatgggaacggagtcccctcctcttcccgacgtgccctgcgactcagsggccgaacccggaagttccgggccgagttcctcgtgccaacgtgtcttgtaaggtgcggctagaaactggggacatggcagcgcctggcccagcgctctgcctcttcgacgtggatsggaccctcaccgccccgcggcagaaaattaccaaagaaatggatgacttyctacaaaaattgaggcwgaagatcaaaatcrgagtggyaggcggatcggactttgagaaagtgcaggagcaactgggaaatgatgtggttgaaaaatrckattatrtgtttccagaaaatggcttggtagcatacaaagatgggaaactcttgtgtagacagaatattcaaagtcatctgggtgaggccctaatccaagatttaatcaastactktctgagctacattgcgaaaattaaactccygaagaagaggsgtactttmaytgaattcbraaatgggatgttaaacgtgtccsctahtggaagaagctgcagccaaraagaacgcattgagytctacgaactcrataaaaaagraaatayaagacaaaagtttgtagcagatctacggaaagagtttgctggaaaaggcctcacgktttccatasgaggccagatcagctttgatgtctttcctgatggatgggrcaagagatackgtctgcgacrtgtggmaaatgacggttataagaccatttatttctttggagacaaaactrtgccaggtggcaatgaccatgagatcttcacagaccccagaaccatgbgctmctccrtgacarcgcctgaggacabgsscwggatctstgaactgctgttctcctaacgtgggagcgggagggrcggggtcccggctgacaagccagcatagggcattcggtggccagagccgagggtcctcccacacgtgctcacccacccgcagcctaggcaggctctgcatgctatgccaggcatgtgcmgtctggacttccacctccagtgccagaaacttccagaargaaggagaaaactcttgtcaagaatggcccagaggaatgcctcgcacaaaaggtcttccccacccacccccagcccmctagtctaatacccaccctgatacgtgcaatcatgtagttttggcggaaatttccccatcattctaggatgatacagaaagaaaaactgtgcctggaccctccctcttggtgggtctgtggaaacataagcggtttttttaatgggcccctgcatcaataccaaacatgggggtttggtaatgagaaaccaggacaggccatctgcagtgacccagcccaggacgaagtttacaaacacctcctggaacgaagctcccgcctgcatgtcaccttgatggggrctgtgagtggggcagtgtgatacccrgtgactagacgcactctgcgttttcccgtgtttggggctgaggcctgctggacagatggctggccaagtgggagcagaccctagggagtttgcacctcggctgggccggattcggaccggctctgtgttcactacactcagaatagcctggctgcttctctgtctccgagaccggaggtagtgggaaccaacagctgggctggagagttggtgctggcaaaacagtccttsccctggggccggttcttacccaggtccagagaaaccaacgcgggatgtcagacttcaccaaaaggactttctggttgcccctggctggcttcctggaggcgttcgcctctagtttctcagggatggagcgagagcccagccagagaacagtaagaggagctgctctcctatctgcactcacccaggccttcacccagactttaccrcggaggcggctgagtgcagctacagctaggtccgcgtccctcactcttttcatcttctgcacgttcttcgtgaaactggaaggatcccgggtctcagctagaacacggtggaagagaactttcctaggaaacggttcatgtgtcacttttcaggatgtggaaacactgagccatacaccctccattgcttggtgctggggttgtgtggcctccactgggcacttgccgacctgagtctggggccaggggagcccaggctgccctgcactcctgcctcccagcccacagccaggtgctttcatcacagctaaacctggttccctccaaacctcccagccactcgggcttgtaactgtctgagccccggatccggtggggtgaaagcagccagctcatcccagtgactcacaggacacagccatccagcggcatctttccttgtcgaatgatactgtaatgaccttccaaagtgaagagtagcacattaaagtgattttattgtttcct

SEQ ID NO: 140 - DNA, 2300 bp, Homo sapiens
cgtggctgccgctactcccaggcgttatgggaacggagtcccctcctcttcccgacgtgccctgcgactcagsggccgaacccggaagttccgggccgagttcctcgtgccaacgtgtcttgtaaggtgcggctagaaactggggacatggcagcgcctggcccagcgctctgcctcttcgacgtggatsggaccctcaccgccccgcggcagaaaattaccaaagaaatggatgacttyctacaaaaattgaggcwgaagatcaaaatcrgagtggyaggcggatcggactttgagaaagtgcaggagcaactgggaaatgatgtggttgaaaaatrckattatrtgtttccagaaaatggcttggtagcatacaaagatgggaaactcttgtgtagacagaatattcaaagtcatctgggtgaggccctaatccaagatttaatcaastactktctgagctacattgcgaaaattaaactccygaagaagaggsgtactttmaytgaattcbraaatgggatgttaaacgtgtccsctahtggaagaagctgcagccaaraagaacgcattgagytctacgaactcrataaaaaagraaatayaagacaaaagtttgtagcagatctacggaaagagtttgctggaaaaggcctcacgktttccatasgaggccagatcagctttgatgtctttcctgatggatgggrcaagagatackgtctgcgacrtgtggmaaatgacggttataagaccatttatttctttggagacaaaactrtgccaggtggcaatgaccatgagatcttcacagaccccagaaccatgbgctmctccrtgacarcgcctgaggacabgsscwggatctstgaactgctgttctcctaacgtgggagcgggagggrcggggtcccggctgacaagccagcatagggcattcggtggccagagccgagggtcctcccacacgtgctcacccacccgcagcctaggcaggctctgcatgctatgccaggcatgtgcmgtctggacttccacctccagtgccagaaacttccagaargaaggagaaaactcttgtcaagaatggcccagaggaatgcctcgcacaaaaggtcttccccacccacccccagcccmctagtctaatacccaccctgatacgtgcaatcatgtagttttggcggaaatttccccatcattctaggatgatacagaaagaaaaactgtgcctggaccctccctcttggtgggtctccatctgcagtgacccagcccaggacgaagtttacaaacacctcctggaacgaagctcccgcctgcatgtcaccttgatggggrctgtgagtggggcagtgtgatacccrgtgactagacgcactctgcgttttcccgtgtttggggctgaggcctgctggacagatggctggccaagtgggagcagaccctagggagtttgcacctcggctgggccggattcggaccggctctgtgttcactacactcagaatagcctggctgcttctctgtctccgagaccggaggtagtgggaaccaacagctgggctggagagttggtgctggcaaaacagtccttsccctggggccggttcttacccaggtccagagaaaccaacgcgggatgtcagacttcaccaaaaggactttctggttgcccctggctggcttcctggaggcgttcgcctctagtttctcagggatggagcgagagcccagccagagaacagtaagaggagctgctctcctatctgcactcacccaggccttcacccagactttaccrcggaggcggctgagtgcagctacagctaggtccgcgtccctcactcttttcatcttctgcacgttcttcgtgaaactggaaggatcccgggtctcagctagaacacggtggaagagaactttcctaggaaacggttcatgtgtcacttttcaggatgtggaaacactgagccatacaccctccattgcttggtgctggggttgtgtggcctccactgggcacttgccgacctgagtctggggccaggggagcccaggctgccctgcactcctgcctcccagcccacagccaggtgctttcatcacagctaaacctggttccctccaaacctcccagccactcgggcttgtaactgtctgagccccggatccggtggggtgaaagcagccagctcatcccagtgactcacaggacacagccatccagcggcatctttccttgtcgaatgatactgtaatgaccttccaaagtgaagagtagcacattaaagtgattt

SEQ ID NO: 141 - DNA, 1315 bp, Homo sapiens
  misc_feature (1)...(1315): n = A,T,C or G
ggcagagggcggggcctgcttctcctcagcttcaggcggctgcgacgagccctcaggcgaacctctcggctttcccgcgcggcgccgcctcttgctgcgcctccgcctcctcctctgctccgccaccggcttcctcctcctgagcagtcagcccgcgcgccggccggctccgttatggcgacccgcagccctggcgtcgtgattagtgatgatgaaccaggttatgaccttgatttattttksatamctaatcattakgctgaggatttggaaagggtgtttattcytcatrgacyawytakgracargactgdacrtcttsytbvagrtgtgatgaaggagatgggaggccrtcacattgtasmcyycygtgtgckcaagnrgskctrtaaatkmtttgctgaccwgswggwttacatcaaagcactgaakagaaatagtgatagatccattcctatgactgtagattttatcagactgaagagctattgtaatgaccagtcaacaggggacataaaagtaattggtggagatgatctctcaactttaactggaaagaatgtcttgattgtggaagatataattgacactggcaaaacaatgcagactttgctttccttggtcaggcagtataatccaaagatgktcraggtckmaagsttgctggtgaaaaggaccccacgaagtgttggatataagccakwctttgttgratttgaaaytccagacaagtttgttgtaggatatgcccttgactataatgwatacktcasgddtttgaancatgtttgtgtcattagtgaaactggaaaagcaaaatacaaagcctaagatgagagttcaagttgagtttggaaacatctggagtcctattgacatcgccagtaaaattatcaatgttctagttctgtggccatctgcttagtagagctttttgcatgtatcttctaagaattttatctgttttgtactttagaaatgtcagttgctgcattcctaaactgtttatttgcactatgagcctatagactatcagttccctttgggcggattgttgtttaacttgtaaatgaaaaaattctcttaaaccacagcactattgagtgaaacattgaactcatatctgtaagaaataaagagaagatatattagttttttaattggtattttaatttttatatatgcaggaaagaatagaagtgattgaatattgttaattataccaccgtgtttttgttctgtcctggaattattttagtagtgtttcagtaatgttgactgtattttccaacttgttcaaattattaccagtgaa

SEQ ID NO: 142 - DNA, 1510 bp, Homo sapiens
  misc_feature (1)...(1510): n = A,T,C or G
ggcagagggcggggcctgcttctcctcagcttcaggcggctgcgacgagccctcaggcgaacctctcggctttcccgcgcggcgccgcctcttgctgcgcctccgcctcctcctctgctccgccaccggcttcctcctcctgagcagtcagcccgcgcgccggccggctccgttatggcgacccgcagccctggcgtcgtgattagtgatgatgaaccaggttatgaccttgatttattttksatamctaatcattakgctgaggatttggaaagggtgtttattcytcatrgacyawytakgracargactgdacrtcttsytbvagrtgtgatgaaggagatgggaggccrtcacattgtasmcyycygtgtgckcaagnrgskctrtaaatkmtttgctgaccwgswggwttacatcaaagcactgaakagaaatagtgatagatccattcctatgactgtagattttatcagactgaagagctattgtaatgaccagtcaacaggggacataaaagtaattggtggagatgatctctcaactttaactggaaagaatgtcttgattgtggaagatataattgacactggcaaaacaatgcagactttgctttccttggtcaggcagtataatccaaagatgktcraggtckmaagsttgctggtgaaaaggaccccacgaagtgttggatataagccakwctttgttgratttgaaaytccagacaagtttgttgtaggatatgcccttgactataatgwatacktcasgddtttgaancatgtttgtgtcattagtgaaactggaaaagcaaaatacaaagcctaagatgagagttcaagttgagtttggaaacatctggagtcctattgacatcgccagtaaaattatcaatgttctagttctgtggccatctgcttagtagagctttttgcatgtatcttctaagaattttatctgttttgtactttagaaatgtcagttgctgcattcctaaactgtttatttgcactatgagcctatagactatcagttccctttgggcggattgttgtttaacttgtaaatgaaaaaattctcttaaaccacagcactattgagtgaaacattgaactcatatctgtaagaaataaagagaagatatattagttttttaattggtattttaatttttatatatgcaggaaagaatagaagtgattgaatattgttaattataccaccgtgtgttagaaaagtaagaagcagtcaattttcacatcaaagacagcatctaagaagttttgttctgtcctggaattattttagtagtgtttcagtaatgttgactgtattttccaacttgttcaaattattaccagtgaatctttgtcagcagttcccttttaaatgcaaatcaataaattcccaaaaatttaactgctttatgaattcaatttaaaaatccttaaaataagtcctgtctctttaaaaaaacctatgcatagttatcatttctctacaaatt

SEQ ID NO: 143 - DNA, 6174 bp, Homo sapiens
ggccgggcgggggtgcggctccaggaaaggagcgcggcctccaggaagccggctggccgtgatgctgcccaatggtggtcccccgctcccggggtccccggccggccaagcaggagggctctaactccgtgaggaccccagcattatttctataattgtttgtgagaaggactgaatcccagagcattgccttgttgctgacctttcagtatggggaggattggcatctcctgtctttttcctgcttcttggcattttagcatatctccagtagggtgtcctcgaattctgaataccaatttacgccaaattatggtcattagtgtcctggctgctgctgtttcacttttatatttttctgttgtcataatccgaaataagtatgggcgactaaccagagacaagaaatttcaaaggtacctggcacgagttaccgacattgaagctacagacaccaataaccccaatgtgaactatgggatcgtggtggactgtggtagcagtgggtctcgagtatttgtttactgctggccaaggcataatggcaatccacatgatctgttggatatcaggcaaatgagggataaaaaccgaaagccagtggtcatgaagataaaaccgggcatttcagaatttgctacctctccagagaaagtcagtgattacatttctccacttttgaactttgctgcagagcatgtgccacgggcaaaacacaaagagacacctctctacattctctgcacggctggaatgagaatcctccccgaaagccagcagaaagctattctggaagaccttctgaccgatatcccygtgcactttgactttctgttttctgactctcatgcagaagtaatttctgggaaacaagaaggtgtgtatgcttggattggcattaattttgtccttggacgatttgagcatattgaagatgatgatgaggccrttgtggaagttaacattcctggaagtgaaagcagcgaagccattgtccgtaaaaggacagcgggcattctcgacatgggcggcgtgtcgactcagatagcgtacgaagtccccaaaactgtaagctttgcgtcctcacagcaggaagaagtagctaaaaacttgttagctgaatttaacttgggatgtgatgttcaccaaactgagcatgtgtatcgagtctaygtggccacgtttcttgggtttggtggcaatgctgctcgacagagatacgaagacagaatatttgccaacaccattcaaaagaacaggctcctgggtrracagactggtctgactcctgatatgccrtacttggacccctgcctacccctagacattaaagatgaaatccagcaaaatggacaaaccatatacctacgagggactggagactttgacctgtgtcgagagactatccagcctttcatgaataaaacaaaygagacccagacttccctcaatggggtctaccagcccccaattcacttccagaacagtgaattctatggcttctccgaattctactactgcaccgaggatgtgttacgaatggggggagactacaatgctgctaaatttactaaagctgcaaaggattaytgtgcaacaaagtggtccattttgcgggaacgctttgaccgaggactgtacgcctctcatgctgacctccacaggcttaagtatcagtgcttcaaatcggcctggatgtttgaggtgtttcataggggcttttcgtttcctgtcaactataaaagcttaaagactgccttgcaagtttacgacaaggaggttcagtggacccttggagccatcctctacaggacccgctttctaccrttaagagacatccagcaggaggccttccgagccagtcacacccactggcggggcgtttcctttgtctacaaccactacctgttctctggctgcttcctggtggtgctgctggccatcctgctgtacctgctgcggctgcggcgcatccacaggcgcactccccggagcagctcggccgccgccctctggatggaggagggccttcccgcccagaatgccccrgggaccttgtgatccagctcacagctccacgaagactcaaaaggaaaagccatttttgcctcagggtttctcctctttattttcctgtggttttgttttttctttcccttttttgttcctccaaacaaaaacaaaatgcaggccgagcgcggtggctcacgcctgtaatcccagcactttgggaggccgaggcgggcggatcatgaggtcaggagatcgagaccatcctggctaacacggtgaaaccccgtctctactaaaaatacaaaaaattagctgggtgtggtggcgggcgcccgtagtcccagctactcaggaggctgaggcaggagaatggcatgaacctgggaggcagagcttgcagtgagccragatcacaccactgcactccagcctgggcgacagagtgagactccgtctcaaaaaaaaaaaaatgcattgtttataagccctgctgtctagaagtattgcgtttagccattttgagtacagcattaaattgaggagtggggaagagggaaattcacttgatttttgctgcacaggatatytgccaaaaataaatgagatttctggggtttctctaaggaatgttaaatttaaacacatgcactttgatactggagggaggtggaaagatgcattctgtcagtggagaggggactgaatagtgatgctttcatagaaccaaaaaacttactgcctgaaatgataatcctcttttttctctatcttgaaagctctaacctgaagagggtgatttttttttttatttattgttcaggtctgttactgtatatgttttctttgcaaatttaaattttttaaaccatttatatccaaaacagagaaacatgggcaccaggagataaccatttataaaagtgatagtgaactatcgactacagctttgtgygagtgtgtgaaaaatcccaagaaaccagcgtgaggggaggcaatgctggttctttaaaaacacacacttcagaatttactggtacattttatttagaaaaatcctcgttactgttatcttttcctgaccgcaggtaattacgctccttattccatatttcagtggcattagaacactgtggttttgaaagaattggaaattcctagtttcaccagtttcggttttattggaactagagcacatgcccacttcttgctcagtattcctcagtgtttctgcttaatcgtgcctcagtttcttccagcttccaattggtgtttcccccaccccccttaattaaaagtcatctcagcttttaatcgtactgggagaccccatgcacagcctgccgagtcctcttcctaaccgcattgactgaggctgttgctggcagcaccactgtaaatccagaagggaagagtctgcatccaatacaggaaataaattcacattttgaaggaaaaaattcgacaatttaagccaaaatctaaaaaggacaattggattggcatatgtgagattggtgttttttcacctatttatttagttgagaagtttggggaattctcgtacagtttttttaggtggagtttgttttgtgygagtgtctgtgtgtgctgttccctaactccagaacagttaaattcctgtagttggtagcagattagtacccagaagtggggttgttgctataacagataactgaggatattataaaagtggctttggaactaggtactgggcagaggctgggagagtttggagaaacaggagagaaaaggcctgtattgccatgaactgagcattaggggcagttctgctgagggatcagaagagaagaccaagggaattctgtcccagttgtggctcaractgcctcaggtgcagcytaacctgcgtctctggaaggtaaaatgcatctgatccttgaggcaagagctgtgggggcatggctccctcacctggatttcaaagcgtgttaccagcagcctggggacccaggctctgcctctggatttacctgcatcgtatttgcgcttcgtggtcaaagttgttaagaaaggggtgagcttctggctmcctaataagttggtcttggccacctgcctgcgacacttcctggaggagccatggattattggtggaggctkcagggagctggcgatggagccactggtgtcagcagcagagagggaagaaaggaaaggaaggggccacaaatggttgaagtgggcaggtgggcacccagggagttaggggaccccgccttccagctctgggcatagaagagttagtcacatacctgaggatcctgaaacaagggctgagaaaacctcattgctccagctgagaggtagtagtggatttgccatttttaaacagttgcctaagaaaaaacgttgaagaatatgcagcagacactatatgtggcctgtaaagcctagaatatttactaaaatatttacagaaaaagtttgctggtccttgtgagaacaatgcagttcaaaaaaggatacagacagaagcatcctcttaaatcaggaatgtagtttccatttgtgggcacgaaaagatggacaagagaagtaaccaaacttcaatcttaaaatatttgttgcaccagaatttcacttcggatttttccgtctagattattttcaagatgagttttgaaacaaaccaagaaacctgcccctcacccaaaattgtttaaaaagagaccactcaagggagttcattatgccrtatggagatgtctgcagtcgcagcaaatcacattccagagaaggtctcgcgtaggtgaagacagccaggtgctttctctaagagatacagggtgggtgagagacaagccagggaggatcttaattcaagagaagaattcataccaagagctgaccaagaaggcagtaaattctgtgtacttgtagcagaagaaattggactaggaacttgcccaaagctttatcaaagaaaagcattgtgttcaatcttggtagaaacatgccagcaataagtgcttatgttccatagccatatcatgggcttctcacttttaaacctcctccaggggatgttctcagacatttcacaatccctctggggacattacagtagaagagaaacacatggaactgtaccagtgctttttgcccatgttcatcctaagctccggctttaggcagtgctttctgacctgggcggagtgaagacgctgctggtggctgaggccagtaacatggggcccctgcccagccaccctgaaggctgggtaggtccctcttttcaccaccagttttccacayctgtgtactctagattaacaaactctggataaacagatatttacattttaaactcaggcctacacagagtagttttccttataaggagcatgtatcacttagcaagaaactaaaaatggcaaatgagtttttcatcctttaagaaaaraatcagctttagaattctctgcggtcagttgtgtgcaatgcaacaaaactacctttcagtaaattacttagttatttatttcagtgttttgtttcttttgatactaagtttccctttcaataatgaatgatgtgaccaaccaaggagaatttgtttgttctgtactaaaattatattttacagttaggaattataaaaagcaagggagcatctttaaatgttttttgtttaagcgatgtcttccatccaaagtaagaataatactctcggaaggtccttttggtgtcatgtcacttgctgtatgtggcagccttacagtgccacacttgggtactgaaaaatcaataaaacgaaagttcatcatcccatggcccgtagactgtgtgggcttgcttccttgtcatctttgaatcttcttactcattagaatgatgagttgaacttgagtccaaattcagtgaaatacattgtctgagtctgacgcacactctttgcatgtgttgtgttgggtgtgcatacagtgaagcacaattgtgtggggttgtggagagggcgtccacactctctgcagctcagaaagcagatatttcacaagtagtgaccaacccacgacgttaagccattcaccaacaataattgccactctgagatgactgtttataaggtcaccattttaagtacctacttgtatatagacaaggaaaagtaataaaatt

SEQ ID NO: 144 - DNA, 6150 bp, Homo sapiens
ggccgggcgggggtgcggctccaggaaaggagcgcggcctccaggaagccggctggccgtgatgctgcccaatggtggtcccccgctcccggggtccccggccggccaagcaggagggctctaactccgtgaggaccccagcattatttctataattgtttgtgagaaggactgaatcccagagcattgccttgttgctgacctttcagtatggggaggattggcatctcctgtctttttcctgcttcttggcattttagcatatctccagtagggtgtcctcgaattctgaataccaatttacgccaaattatggtcattagtgtcctggctgctgctgtttcacttttatatttttctgttgtcataatccgaaataagtatgggcgactaaccagagacaagaaatttcaaaggtacctggcacgagttaccgacattgaagctacagacaccaataaccccaatgtgaactatgggatcgtggtggactgtggtagcagtgggtctcgagtatttgtttactgctggccaaggcataatggcaatccacatgatctgttggatatcaggcaaatgagggataaaaaccgaaagccagtggtcatgaagataaaaccgggcatttcagaatttgctacctctccagagaaagtcagtgattacatttctccacttttgaactttgctgcagagcatgtgccacgggcaaaacacaaagagacacctctctacattctctgcacggctggaatgagaatcctccccgaaagccagcagaaagctattctggaagaccttctgaccgatatcccygtgcactttgactttctgttttctgactctcatgcagaagtaatttctgggaaacaagaaggtgtgtatgcttggattggcattaattttgtccttggacgatttgagcatattgaagatgatgatgaggccrttgtggaagttaacattcctggaagtgaaagcagcgaagccattgtccgtaaaaggacagcgggcattctcgacatgggcggcgtgtcgactcagatagcgtacgaagtccccaaaactgaagaagtagctaaaaacttgttagctgaatttaacttgggatgtgatgttcaccaaactgagcatgtgtatcgagtctaygtggccacgtttcttgggtttggtggcaatgctgctcgacagagatacgaagacagaatatttgccaacaccattcaaaagaacaggctcctgggtrracagactggtctgactcctgatatgccrtacttggacccctgcctacccctagacattaaagatgaaatccagcaaaatggacaaaccatatacctacgagggactggagactttgacctgtgtcgagagactatccagcctttcatgaataaaacaaaygagacccagacttccctcaatggggtctaccagcccccaattcacttccagaacagtgaattctatggcttctccgaattctactactgcaccgaggatgtgttacgaatggggggagactacaatgctgctaaatttactaaagctgcaaaggattaytgtgcaacaaagtggtccattttgcgggaacgctttgaccgaggactgtacgcctctcatgctgacctccacaggcttaagtatcagtgcttcaaatcggcctggatgtttgaggtgtttcataggggcttttcgtttcctgtcaactataaaagcttaaagactgccttgcaagtttacgacaaggaggttcagtggacccttggagccatcctctacaggacccgctttctaccrttaagagacatccagcaggaggccttccgagccagtcacacccactggcggggcgtttcctttgtctacaaccactacctgttctctggctgcttcctggtggtgctgctggccatcctgctgtacctgctgcggctgcggcgcatccacaggcgcactccccggagcagctcggccgccgccctctggatggaggagggccttcccgcccagaatgccccrgggaccttgtgatccagctcacagctccacgaagactcaaaaggaaaagccatttttgcctcagggtttctcctctttattttcctgtggttttgttttttctttcccttttttgttcctccaaacaaaaacaaaatgcaggccgagcgcggtggctcacgcctgtaatcccagcactttgggaggccgaggcgggcggatcatgaggtcaggagatcgagaccatcctggctaacacggtgaaaccccgtctctactaaaaatacaaaaaattagctgggtgtggtggcgggcgcccgtagtcccagctactcaggaggctgaggcaggagaatggcatgaacctgggaggcagagcttgcagtgagccragatcacaccactgcactccagcctgggcgacagagtgagactccgtctcaaaaaaaaaaaaatgcattgtttataagccctgctgtctagaagtattgcgtttagccattttgagtacagcattaaattgaggagtggggaagagggaaattcacttgatttttgctgcacaggatatytgccaaaaataaatgagatttctggggtttctctaaggaatgttaaatttaaacacatgcactttgatactggagggaggtggaaagatgcattctgtcagtggagaggggactgaatagtgatgctttcatagaaccaaaaaacttactgcctgaaatgataatcctcttttttctctatcttgaaagctctaacctgaagagggtgatttttttttttatttattgttcaggtctgttactgtatatgttttctttgcaaatttaaattttttaaaccatttatatccaaaacagagaaacatgggcaccaggagataaccatttataaaagtgatagtgaactatcgactacagctttgtgygagtgtgtgaaaaatcccaagaaaccagcgtgaggggaggcaatgctggttctttaaaaacacacacttcagaatttactggtacattttatttagaaaaatcctcgttactgttatcttttcctgaccgcaggtaattacgctccttattccatatttcagtggcattagaacactgtggttttgaaagaattggaaattcctagtttcaccagtttcggttttattggaactagagcacatgcccacttcttgctcagtattcctcagtgtttctgcttaatcgtgcctcagtttcttccagcttccaattggtgtttcccccaccccccttaattaaaagtcatctcagcttttaatcgtactgggagaccccatgcacagcctgccgagtcctcttcctaaccgcattgactgaggctgttgctggcagcaccactgtaaatccagaagggaagagtctgcatccaatacaggaaataaattcacattttgaaggaaaaaattcgacaatttaagccaaaatctaaaaaggacaattggattggcatatgtgagattggtgttttttcacctatttatttagttgagaagtttggggaattctcgtacagtttttttaggtggagtttgttttgtgygagtgtctgtgtgtgctgttccctaactccagaacagttaaattcctgtagttggtagcagattagtacccagaagtggggttgttgctataacagataactgaggatattataaaagtggctttggaactaggtactgggcagaggctgggagagtttggagaaacaggagagaaaaggcctgtattgccatgaactgagcattaggggcagttctgctgagggatcagaagagaagaccaagggaattctgtcccagttgtggctcaractgcctcaggtgcagcytaacctgcgtctctggaaggtaaaatgcatctgatccttgaggcaagagctgtgggggcatggctccctcacctggatttcaaagcgtgttaccagcagcctggggacccaggctctgcctctggatttacctgcatcgtatttgcgcttcgtggtcaaagttgttaagaaaggggtgagcttctggctmcctaataagttggtcttggccacctgcctgcgacacttcctggaggagccatggattattggtggaggctkcagggagctggcgatggagccactggtgtcagcagcagagagggaagaaaggaaaggaaggggccacaaatggttgaagtgggcaggtgggcacccagggagttaggggaccccgccttccagctctgggcatagaagagttagtcacatacctgaggatcctgaaacaagggctgagaaaacctcattgctccagctgagaggtagtagtggatttgccatttttaaacagttgcctaagaaaaaacgttgaagaatatgcagcagacactatatgtggcctgtaaagcctagaatatttactaaaatatttacagaaaaagtttgctggtccttgtgagaacaatgcagttcaaaaaaggatacagacagaagcatcctcttaaatcaggaatgtagtttccatttgtgggcacgaaaagatggacaagagaagtaaccaaacttcaatcttaaaatatttgttgcaccagaatttcacttcggatttttccgtctagattattttcaagatgagttttgaaacaaaccaagaaacctgcccctcacccaaaattgtttaaaaagagaccactcaagggagttcattatgccrtatggagatgtctgcagtcgcagcaaatcacattccagagaaggtctcgcgtaggtgaagacagccaggtgctttctctaagagatacagggtgggtgagagacaagccagggaggatcttaattcaagagaagaattcataccaagagctgaccaagaaggcagtaaattctgtgtacttgtagcagaagaaattggactaggaacttgcccaaagctttatcaaagaaaagcattgtgttcaatcttggtagaaacatgccagcaataagtgcttatgttccatagccatatcatgggcttctcacttttaaacctcctccaggggatgttctcagacatttcacaatccctctggggacattacagtagaagagaaacacatggaactgtaccagtgctttttgcccatgttcatcctaagctccggctttaggcagtgctttctgacctgggcggagtgaagacgctgctggtggctgaggccagtaacatggggcccctgcccagccaccctgaaggctgggtaggtccctcttttcaccaccagttttccacayctgtgtactctagattaacaaactctggataaacagatatttacattttaaactcaggcctacacagagtagttttccttataaggagcatgtatcacttagcaagaaactaaaaatggcaaatgagtttttcatcctttaagaaaaraatcagctttagaattctctgcggtcagttgtgtgcaatgcaacaaaactacctttcagtaaattacttagttatttatttcagtgttttgtttcttttgatactaagtttccctttcaataatgaatgatgtgaccaaccaaggagaatttgtttgttctgtactaaaattatattttacagttaggaattataaaaagcaagggagcatctttaaatgttttttgtttaagcgatgtcttccatccaaagtaagaataatactctcggaaggtccttttggtgtcatgtcacttgctgtatgtggcagccttacagtgccacacttgggtactgaaaaatcaataaaacgaaagttcatcatcccatggcccgtagactgtgtgggcttgcttccttgtcatctttgaatcttcttactcattagaatgatgagttgaacttgagtccaaattcagtgaaatacattgtctgagtctgacgcacactctttgcatgtgttgtgttgggtgtgcatacagtgaagcacaattgtgtggggttgtggagagggcgtccacactctctgcagctcagaaagcagatatttcacaagtagtgaccaacccacgacgttaagccattcaccaacaataattgccactctgagatgactgtttataaggtcaccattttaagtacctacttgtatatagacaaggaaaagtaataaaatt

SEQ ID NO: 145 - DNA, 6207 bp, Homo sapiens
cgggcgcaggcggtgamgtgttgccggcgggggccgggcgggggtgcggctccaggaaaggagcgcggcctccaggaagccggctggccgtgatgctgcccaatggtggtcccccgctcccggggtccccggccggccaagcaggtgagggctctaactccgtgaggaccccagcattatttctataattgtttgtgagaaggactgaatcccagagcattgccttgttgctgacctttcagtatggggaggattggcatctcctgtctttttcctgcttcttggcattttagcatatctccagtagggtgtcctcgaattctgaataccaatttacgccaaattatggtcattagtgtcctggctgctgctgtttcacttttatatttttctgttgtcataatccgaaataagtatgggcgactaaccagagacaagaaatttcaaaggtacctggcacgagttaccgacattgaagctacagacaccaataaccccaatgtgaactatgggatcgtggtggactgtggtagcagtgggtctcgagtatttgtttactgctggccaaggcataatggcaatccacatgatctgttggatatcaggcaaatgagggataaaaaccgaaagccagtggtcatgaagataaaaccgggcatttcagaatttgctacctctccagagaaagtcagtgattacatttctccacttttgaactttgctgcagagcatgtgccacgggcaaaacacaaagagacacctctctacattctctgcacggctggaatgagaatcctccccgaaagccagcagaaagctattctggaagaccttctgaccgatatcccygtgcactttgactttctgttttctgactctcatgcagaagtaatttctgggaaacaagaaggtgtgtatgcttggattggcattaattttgtccttggacgatttgagcatattgaagatgatgatgaggccrttgtggaagttaacattcctggaagtgaaagcagcgaagccattgtccgtaaaaggacagcgggcattctcgacatgggcggcgtgtcgactcagatagcgtacgaagtccccaaaactgtaagctttgcgtcctcacagcaggaagaagtagctaaaaacttgttagctgaatttaacttgggatgtgatgttcaccaaactgagcatgtgtatcgagtctaygtggccacgtttcttgggtttggtggcaatgctgctcgacagagatacgaagacagaatatttgccaacaccattcaaaagaacaggctcctgggtrracagactggtctgactcctgatatgccrtacttggacccctgcctacccctagacattaaagatgaaatccagcaaaatggacaaaccatatacctacgagggactggagactttgacctgtgtcgagagactatccagcctttcatgaataaaacaaaygagacccagacttccctcaatggggtctaccagcccccaattcacttccagaacagtgaattctatggcttctccgaattctactactgcaccgaggatgtgttacgaatggggggagactacaatgctgctaaatttactaaagctgcaaaggattaytgtgcaacaaagtggtccattttgcgggaacgctttgaccgaggactgtacgcctctcatgctgacctccacaggcttaagtatcagtgcttcaaatcggcctggatgtttgaggtgtttcataggggcttttcgtttcctgtcaactataaaagcttaaagactgccttgcaagtttacgacaaggaggttcagtggacccttggagccatcctctacaggacccgctttctaccrttaagagacatccagcaggaggccttccgagccagtcacacccactggcggggcgtttcctttgtctacaaccactacctgttctctggctgcttcctggtggtgctgctggccatcctgctgtacctgctgcggctgcggcgcatccacaggcgcactccccggagcagctcggccgccgccctctggatggaggagggccttcccgcccagaatgccccrgggaccttgtgatccagctcacagctccacgaagactcaaaaggaaaagccatttttgcctcagggtttctcctctttattttcctgtggttttgttttttctttcccttttttgttcctccaaacaaaaacaaaatgcaggccgagcgcggtggctcacgcctgtaatcccagcactttgggaggccgaggcgggcggatcatgaggtcaggagatcgagaccatcctggctaacacggtgaaaccccgtctctactaaaaatacaaaaaattagctgggtgtggtggcgggcgcccgtagtcccagctactcaggaggctgaggcaggagaatggcatgaacctgggaggcagagcttgcagtgagccragatcacaccactgcactccagcctgggcgacagagtgagactccgtctcaaaaaaaaaaaaatgcattgtttataagccctgctgtctagaagtattgcgtttagccattttgagtacagcattaaattgaggagtggggaagagggaaattcacttgatttttgctgcacaggatatytgccaaaaataaatgagatttctggggtttctctaaggaatgttaaatttaaacacatgcactttgatactggagggaggtggaaagatgcattctgtcagtggagaggggactgaatagtgatgctttcatagaaccaaaaaacttactgcctgaaatgataatcctcttttttctctatcttgaaagctctaacctgaagagggtgatttttttttttatttattgttcaggtctgttactgtatatgttttctttgcaaatttaaattttttaaaccatttatatccaaaacagagaaacatgggcaccaggagataaccatttataaaagtgatagtgaactatcgactacagctttgtgygagtgtgtgaaaaatcccaagaaaccagcgtgaggggaggcaatgctggttctttaaaaacacacacttcagaatttactggtacattttatttagaaaaatcctcgttactgttatcttttcctgaccgcaggtaattacgctccttattccatatttcagtggcattagaacactgtggttttgaaagaattggaaattcctagtttcaccagtttcggttttattggaactagagcacatgcccacttcttgctcagtattcctcagtgtttctgcttaatcgtgcctcagtttcttccagcttccaattggtgtttcccccaccccccttaattaaaagtcatctcagcttttaatcgtactgggagaccccatgcacagcctgccgagtcctcttcctaaccgcattgactgaggctgttgctggcagcaccactgtaaatccagaagggaagagtctgcatccaatacaggaaataaattcacattttgaaggaaaaaattcgacaatttaagccaaaatctaaaaaggacaattggattggcatatgtgagattggtgttttttcacctatttatttagttgagaagtttggggaattctcgtacagtttttttaggtggagtttgttttgtgygagtgtctgtgtgtgctgttccctaactccagaacagttaaattcctgtagttggtagcagattagtacccagaagtggggttgttgctataacagataactgaggatattataaaagtggctttggaactaggtactgggcagaggctgggagagtttggagaaacaggagagaaaaggcctgtattgccatgaactgagcattaggggcagttctgctgagggatcagaagagaagaccaagggaattctgtcccagttgtggctcaractgcctcaggtgcagcytaacctgcgtctctggaaggtaaaatgcatctgatccttgaggcaagagctgtgggggcatggctccctcacctggatttcaaagcgtgttaccagcagcctggggacccaggctctgcctctggatttacctgcatcgtatttgcgcttcgtggtcaaagttgttaagaaaggggtgagcttctggctmcctaataagttggtcttggccacctgcctgcgacacttcctggaggagccatggattattggtggaggctkcagggagctggcgatggagccactggtgtcagcagcagagagggaagaaaggaaaggaaggggccacaaatggttgaagtgggcaggtgggcacccagggagttaggggaccccgccttccagctctgggcatagaagagttagtcacatacctgaggatcctgaaacaagggctgagaaaacctcattgctccagctgagaggtagtagtggatttgccatttttaaacagttgcctaagaaaaaacgttgaagaatatgcagcagacactatatgtggcctgtaaagcctagaatatttactaaaatatttacagaaaaagtttgctggtccttgtgagaacaatgcagttcaaaaaaggatacagacagaagcatcctcttaaatcaggaatgtagtttccatttgtgggcacgaaaagatggacaagagaagtaaccaaacttcaatcttaaaatatttgttgcaccagaatttcacttcggatttttccgtctagattattttcaagatgagttttgaaacaaaccaagaaacctgcccctcacccaaaattgtttaaaaagagaccactcaagggagttcattatgccrtatggagatgtctgcagtcgcagcaaatcacattccagagaaggtctcgcgtaggtgaagacagccaggtgctttctctaagagatacagggtgggtgagagacaagccagggaggatcttaattcaagagaagaattcataccaagagctgaccaagaaggcagtaaattctgtgtacttgtagcagaagaaattggactaggaacttgcccaaagctttatcaaagaaaagcattgtgttcaatcttggtagaaacatgccagcaataagtgcttatgttccatagccatatcatgggcttctcacttttaaacctcctccaggggatgttctcagacatttcacaatccctctggggacattacagtagaagagaaacacatggaactgtaccagtgctttttgcccatgttcatcctaagctccggctttaggcagtgctttctgacctgggcggagtgaagacgctgctggtggctgaggccagtaacatggggcccctgcccagccaccctgaaggctgggtaggtccctcttttcaccaccagttttccacayctgtgtactctagattaacaaactctggataaacagatatttacattttaaactcaggcctacacagagtagttttccttataaggagcatgtatcacttagcaagaaactaaaaatggcaaatgagtttttcatcctttaagaaaaraatcagctttagaattctctgcggtcagttgtgtgcaatgcaacaaaactacctttcagtaaattacttagttatttatttcagtgttttgtttcttttgatactaagtttccctttcaataatgaatgatgtgaccaaccaaggagaatttgtttgttctgtactaaaattatattttacagttaggaattataaaaagcaagggagcatctttaaatgttttttgtttaagcgatgtcttccatccaaagtaagaataatactctcggaaggtccttttggtgtcatgtcacttgctgtatgtggcagccttacagtgccacacttgggtactgaaaaatcaataaaacgaaagttcatcatcccatggcccgtagactgtgtgggcttgcttccttgtcatctttgaatcttcttactcattagaatgatgagttgaacttgagtccaaattcagtgaaatacattgtctgagtctgacgcacactctttgcatgtgttgtgttgggtgtgcatacagtgaagcacaattgtgtggggttgtggagagggcgtccacactctctgcagctcagaaagcagatatttcacaagtagtgaccaacccacgacgttaagccattcaccaacaataattgccactctgagatgactgtttataaggtcaccattttaagtacctacttgtatatagacaaggaaaagtaataaaatt

SEQ ID NO: 146 - DNA, 5128 bp, Homo sapiens
cggggctgggctcgtggctgagccagcagctgcagcagctacgggagtggccgggtggccggcgggtgccagccgccatggaggccgtgccccgcatgcccatgatctggctggacctgaaggaggccggtgactttcacttccagccagctgtgaagaagtttgtcctgaagaattatggagagaacccagaagcctacaatgaagaactgaagaagctggagttgctcagacagaatgctgtccgtgtcccacgagactttgagggctgtagtgtcctccgcaagtacctcggccagcttcattacctgcagagtcgggtccccatgggctygggccaggaggccgctgtccctgtcacctggacagagatcttctcaggcaagtctgtggcccatgaggacatcaagtacgagcaggcctgtattctctacaaccttggagcgctgcactccatgctgggggccatggacaagcgggtgtctgaggagggcatgaaggtctcctgtacccatttccagtgcgcagccggcgccttcgcctacctacgggagcacttccctcaagcctacagcgtcgacatgagccgccagatccttacgctcaacgtcaacctcatgctgggccaggctcaggagtgcctcctggagaagtcgatgttggacaacaggaagagctttctggtggcccgcatcagtgcacaggtggtagattactacaaggaggcatgccgggccttggagaaccccgacactgcctcactgctgggycggatccagaaggactggaagaaacttgtgcagatgaagatctactacttcgcagccgtggctcatctgcacatgggaaagcaggccgaggagcagcagaagttcggggagcgggttgcatacttccagagcgccctggacaagctcaatgaagccatcaagttggccaagggccagcctgacactgtgcaagacgcgcttcgcttcactatggatgtcattgggggaaagtacaattctgccaagaaggacaacgacttcatttaccatgaggctgtcccagcattggacacycttcagcctgtaaaaggagcccccttggtgaagcccttgccagtgaaccccacagacccagctgttacaggccctgacatctttgccaaactggtacccatggctgcccacgaggcctcgtcactgtacagtgaggagaaggccaagctgctccgggagatgatggccaagattgaggacaagaatgaggtcctggaccagttcatggattcaatgcagttggatcccgagacggtggacaaccttgatgcctacagccacatcccaccccagctcatggagaagtgcgcggctctcagcgtccggcccgacactgtcaggaaccttgtacagtccatgcaagtgctgtcaggtgtgttcacggatgtggaggcttccctgaaggacatcagagatctgttggaggaggatgagctgctagagcagaagtttcaggaggcggtgggccaggcaggggccatctccatcacctccaaggctgagctggcagaggtgaggcgagaatgggccaagtacatggaagtccatgagaaggcctccttcaccaacagtgagctgcaccgtgccatgaacctgcacgtcggcaacctgcgcctgctcagcgggccgcttgaccaggtccgggctgccctgcccacacyggccctctccccagaggacaaggccgtgctgcaaaacctaaagcgcatcctggctaaggtgcaggagatgcgggaccagcgcgtgtccctggagcagcagctgcgtgagcttatccagaaagatgacatcactgcctcgctggtcaccacagaccactcagagatgaaggtgggctggaagttgttcgaggagcagctgaaaaagtatgaccagctgaaggtgtacctggagcagaacctggccgcccaggaccgtgtcctctgtgcactgacagaggccaacgtgcagtacgcagccgtgcggcgggtactcagcgacttggaccaaaagtggaactccacgctgcagaccctggtggcctcgtatgaagcctatgaggacctgatgaagaagtcgcaggagggcagggacttctacgcagatctggagagcaaggtggctgctctgctggagcgcacgcagtccacctgccaggcccgcgaggctgcccgccagcagctcctggacagggagctgaagaagaagccgccgccacggcccacagccccaaagccgctgctgccccgcagggaggagagtgaggcagtggaagcaggagacccccctgaggagctgcgcagcctcccccctgacatggtggctggcccacgactgcctgacaccttcctgggaagtgccaccccgctccactttcctcccagccccttccccagctccacaggcccaggaccccactatctctcaggccccttgccccctggtacctactcgggccccacccagctgatacagcccagggccccagggccccatgcaatgcccgtagcacctgggcctgccctctacccagcccctgcctacacaccggagctgggccttgtgccccgatcctccccacagcatggcgtggtgagcagtccctatgtgggggtagggccggccccaccagttgcaggtctcccctcggccccacctcctcaattctcaggccccgagttggccatggcggttcggccagccaccaccacagtagatagcatccaggcgcccatccccagccacacagccccacggccaaaccccacccctgctcctcccccgccctgcttccctgtgcccccaccgcagccactgcccacgccttacacctaccctgcaggggctaagcaacccatcccrgcacagcaccacttctcttctgggatccccgcaggttttccagccccaaggattgggccccagccccagccccatcctcagccccatccttcacaagcgtttgggcctcagcccccacagcagccccttccactccagcatccacatctcttcccaccccaggccccaggactcctacccccacaatccccctacccctatgcccctcagcctggggtcctggggcagccgccaccccccctacacacccagctctacccaggtcccgctcaagaccctctgccagcccactcaggggctctgcctttccccagccctgggccccctcagcctccccatcccccactggcatatggtcctgccccttctaccagacccatgggcccccaggcagcccctcttaccattcgagggccctcgtctgctggccagtccacccctagtccccacctggtgccttcacctgccccatctccagggcctggtccrgtacccyctcgccccccagcagcagaaccacccccttgcctgcgccgaggcgccgcagctgcagacctgctctcctccagcccggagagccagcatggcggcactcagtctcctgggggtgggcagcccctgctgcagcccaccaaggtggatgcagctgagggtcgtcggccgcaggccctgcggctgattgagcgggacccctatgarcatcctgagaggctgcggcagttgcagcaggagctggaggcctttcggggtcagctgggggatgtgggagctctggacactgtctggcgagagctgcaagatgcgcaggaacatgatgcccgaggccgttccatcgccattgcccgctgctactcactgaagaaccggcaccaggatgtcatgccctatgacagtaaccgtgtggtgctgcgctcaggcaaggatgactacatcaatgccagctgcgtggaggggctctccccatactgccccccgctagtggcaacccaggccccactgcctggcacagctgctgacttctggctcatggtccatgagcagaaagtgtcagtcattgtcatgctggtttctgaggctgagatggagaagcaaaaagtggcacgctacttccccaccgagaggggccagcccatggtgcacggtgccctgagcctggcattgagcagcgtccgcagcaccgaaacccatgtggagcgcgtgctgagcctgcagttccgagaccagagcctcaagcgctctcttgtgcacctgcacttccccacttggcctgagttaggcctgcccgacagccccagcaacttgctgcgcttcatccaggaggtgcacgcacattacctgcatcagcggccgctgcacacgcccatcattgtgcactgcagctctggtgtgggccgcacgggagcctttgcactgctctatgcagctgtgcaggaggtggaggctgggaacggaatccctgagctgcctcagctggtgcggcgcatgcggcagcagagaaagcacatgctgcaggagaagctgcacctcaggttctgctatgaggcagtggtgagacacgtggagcaggtcctgcagcgccatggtgtgcctcctccatgcaaacccttggccagtgcaagcatcagccagaagaaccaccttcctcaggactcccaggacctggtcctcggtggggatgtgcccatcagctccatccaggccaccattgccaagctcagcattcggcctcctggggggttggagtccccgcctaaggaggagccgccagtgcctgaagcccccagctcggggcccccctcctcctccctggaattgctggcctccttgaccccagaggccttctccctggacagctccctgcggggcaaacagcggatgagcaagcataactttctgcaggcccataacgggcaagggctgcgggccacccggccctctgacgaccccctcagccttctggatccactctggacactcaacaagacctgaacaggttttgcctacctggtccttacactacatcatcatcatctcatgcccacctgcccacacccagcagagcttctcagtgggcacagtctcttactcccatttctgctgcctttggccctgcctggcccagcctgcacccctgtggggtggaaatgtactgcaggctytgggtcaggttctgctcctttatgggacccgacatttttcagctctttgctattgaaataataaaccaccctgttctgtggccc

SEQ ID NO: 147 - DNA, 5241 bp, Homo sapiens
cggggctgggctcgtggctgagccagcagctgcagcagctacgggagtggccgggtggccggcgggtgccagccgccatggaggccgtgccccgcatgcccatgatctggctggacctgaaggaggccggtgactttcacttccagccagctgtgaagaagtttgtcctgaagaattatggagagaacccagaagcctacaatgaagaactgaagaagctggagttgctcagacagaatgctgtccgtgtcccacgagactttgagggctgtagtgtcctccgcaagtacctcggccagcttcattacctgcagagtcgggtccccatgggctygggccaggaggccgctgtccctgtcacctggacagagatcttctcaggcaagtctgtggcccatgaggacatcaagtacgagcaggcctgtattctctacaaccttggagcgctgcactccatgctgggggccatggacaagcgggtgtctgaggagggcatgaaggtctcctgtacccatttccagtgcgcagccggcgccttcgcctacctacgggagcacttccctcaagcctacagcgtcgacatgagccgccagatccttacgctcaacgtcaacctcatgctgggccaggctcaggagtgcctcctggagaagtcgatgttggacaacaggaagagctttctggtggcccgcatcagtgcacaggtggtagattactacaaggaggcatgccgggccttggagaaccccgacactgcctcactgctgggycggatccagaaggactggaagaaacttgtgcagatgaagatctactacttcgcagccgtggctcatctgcacatgggaaagcaggccgaggagcagcagaagttcggggagcgggttgcatacttccagagcgccctggacaagctcaatgaagccatcaagttggccaagggccagcctgacactgtgcaagacgcgcttcgcttcactatggatgtcattgggggaaagtacaattctgccaagaaggacaacgacttcatttaccatgaggctgtcccagcattggacacycttcagcctgtaaaaggagcccccttggtgaagcccttgccagtgaaccccacagacccagctgttacaggccctgacatctttgccaaactggtacccatggctgcccacgaggcctcgtcactgtacagtgaggagaaggccaagctgctccgggagatgatggccaagattgaggacaagaatgaggtcctggaccagttcatggattcaatgcagttggatcccgagacggtggacaaccttgatgcctacagccacatcccaccccagctcatggagaagtgcgcggctctcagcgtccggcccgacactgtcaggaaccttgtacagtccatgcaagtgctgtcaggtgtgttcacggatgtggaggcttccctgaaggacatcagagatctgttggaggaggatgagctgctagagcagaagtttcaggaggcggtgggccaggcaggggccatctccatcacctccaaggctgagctggcagaggtgaggcgagaatgggccaagtacatggaagtccatgagaaggcctccttcaccaacagtgagctgcaccgtgccatgaacctgcacgtcggcaacctgcgcctgctcagcgggccgcttgaccaggtccgggctgccctgcccacacyggccctctccccagaggacaaggccgtgctgcaaaacctaaagcgcatcctggctaaggtgcaggagatgcgggaccagcgcgtgtccctggagcagcagctgcgtgagcttatccagaaagatgacatcactgcctcgctggtcaccacagaccactcagagatgaagaagttgttcgaggagcagctgaaaaagtatgaccagctgaaggtgtacctggagcagaacctggccgcccaggaccgtgtcctctgtgcactgacagaggccaacgtgcagtacgcagccgtgcggcgggtactcagcgacttggaccaaaagtggaactccacgctgcagaccctggtggcctcgtatgaagcctatgaggacctgatgaagaagtcgcaggagggcagggacttctacgcagatctggagagcaaggtggctgctctgctggagcgcacgcagtccacctgccaggcccgcgaggctgcccgccagcagctcctggacagggagctgaagaagaagccgccgccacggcccacagccccaaagccgctgctgccccgcagggaggagagtgaggcagtggaagcaggagacccccctgaggagctgcgcagcctcccccctgacatggtggctggcccacgactgcctgacaccttcctgggaagtgccaccccgctccactttcctcccagccccttccccagctccacaggcccaggaccccactatctctcaggccccttgccccctggtacctactcgggccccacccagctgatacagcccagggccccagggccccatgcaatgcccgtagcacctgggcctgccctctacccagcccctgcctacacaccggagctgggccttgtgccccgatcctccccacagcatggcgtggtgagcagtccctatgtgggggtagggccggccccaccagttgcaggtctcccctcggccccacctcctcaattctcaggccccgagttggccatggcggttcggccagccaccaccacagtagatagcatccaggcgcccatccccagccacacagccccacggccaaaccccacccctgctcctcccccgccctgcttccctgtgcccccaccgcagccactgcccacgccttacacctaccctgcaggggctaagcaacccatcccrgcacagcaccacttctcttctgggatccccgcaggttttccagccccaaggattgggccccagccccagccccatcctcagccccatccttcacaagcgtttgggcctcagcccccacagcagccccttccactccagcatccacatctcttcccaccccaggccccaggactcctacccccacaatccccctacccctatgcccctcagcctggggtcctggggcagccgccaccccccctacacacccagctctacccaggtcccgctcaagaccctctgccagcccactcaggggctctgcctttccccagccctgggccccctcagcctccccatcccccactggcatatggtcctgccccttctaccagacccatgggcccccaggcagcccctcttaccattcgagggccctcgtctgctggccagtccacccctagtccccacctggtgccttcacctgccccatctccagggcctggtccrgtacccyctcgccccccagcagcagaaccacccccttgcctgcgccgaggcgccgcagctgcagacctgctctcctccagcccggagagccagcatggcggcactcagtctcctgggggtgggcagcccctgctgcagcccaccaaggtggatgcagctgagggtcgtcggccgcaggccctgcggctgattgagcgggacccctatgarcatcctgagaggctgcggcagttgcagcaggagctggaggcctttcggggtcagctgggggatgtgggagctctggacactgtctggcgagagctgcaagatgcgcaggaacatgatgcccgaggccgttccatcgccattgcccgctgctactcactgaagaaccggcaccaggatgtcatgccctatgacagtaaccgtgtggtgctgcgctcaggcaaggatgactacatcaatgccagctgcgtggaggggctctccccatactgccccccgctagtggcaacccaggccccactgcctggcacagctgctgacttctggctcatggtccatgagcagaaagtgtcagtcattgtcatgctggtttctgaggctgagatggagaagcaaaaagtggcacgctacttccccaccgagaggggccagcccatggtgcacggtgccctgagcctggcattgagcagcgtccgcagcaccgaaacccatgtggagcgcgtgctgagcctgcagttccgagaccagagcctcaagcgctctcttgtgcacctgcacttccccacttggcctgagttaggcctgcccgacagccccagcaacttgctgcgcttcatccaggaggtgcacgcacattacctgcatcagcggccgctgcacacgcccatcattgtgcactgcagctctggtgtgggccgcacgggagcctttgcactgctctatgcagctgtgcaggaggtggaggctgggaacggaatccctgagctgcctcagctggtgcggcgcatgcggcagcagagaaagcacatgctgcaggagaagctgcacctcaggttctgctatgaggcagtggtgagacacgtggagcaggtcctgcagcgccatggtgtgcctcctccatgcaaacccttggccagtgcaagcatcagccagaagaaccaccttcctcaggactcccaggacctggtcctcggtggggatgtgcccatcagctccatccaggccaccattgccaagctcagcattcggcctcctggggggttggagtccccggttgccagcttgccaggccctgcagagcccccaggcctcccgccagccagcctcccagagtctaccccaatcccatcttcctccccaccccccctttcctccccactacctgaggctccccagcctaaggaggagccgccagtgcctgaagcccccagctcggggcccccctcctcctccctggaattgctggcctccttgaccccagaggccttctccctggacagctccctgcggggcaaacagcggatgagcaagcataactttctgcaggcccataacgggcaagggctgcgggccacccggccctctgacgaccccctcagccttctggatccactctggacactcaacaagacctgaacaggttttgcctacctggtccttacactacatcatcatcatctcatgcccacctgcccacacccagcagagcttctcagtgggcacagtctcttactcccatttctgctgcctttggccctgcctggcccagcctgcacccctgtggggtggaaatgtactgcaggctytgggtcaggttctgctcctttatgggacccgacatttttcagctctttgctattgaaataataaaccaccctgttctgtggcc

SEQ ID NO: 148 - DNA, 2488 bp, Homo sapiens
cgaccagcctgtggcgtggttggggctccggaagggcgcgcgcgagcgcttttttgggaggacaccacaggtggacgcctcagctgatcgtcctccctcccggggaccctgccccgagtcgccgagtagccgcagagtcgcctccgtcsccccgccgcccctgtgtttcggacatggccgcacgccttctccgagggtccctacgcgtcctgggcggccaccgtgcgccgcgccagctgcccgccgcgcgatgttctcattccggaggggaagaacgtctagaaaytccttctgctaaaaaattaacagatataggaattcgaagaatcttttctccagagcatgacattttccggaaaagtgtaaggaagtttttccaagaagaagtgattcctcatcactcagaatgggagaaagctggagaagtaagtagggaggtttgggaaaaagctggaaaacaaggactgcttggtgtcaatattgcagagcatcttggtggaattggaggggatctgtactccgcagctattgtctgggaggagcaagcttattcaaattgttcaggcccaggttttagtattcattcaggtattgtcatgtcctatattacaaaccatggctcagaagaacagattaagcactttattccccagatgactgcaggcaaatgtattggtgcaatagcaatgacagagcctggagctggaagtgacttacagggaataaaaacaaatgctaaaaaggatggaagtgactggattctcaatggaagcaaggtgttcatcagtaatgggtcattaagtgatgttgtgattgtagttgcggtcacaaatcatgaagctccctcccctgcccatggtattagcctttttctggtggaaaatggaatgaaaggatttatcaagggacgaaagctacataaaatgggattaaaagcccaggataccgcagaactattctttgaagatatacggttgccagctagtgccctacttggagaagagaataaaggcttctattacatcatgaaagagcttccacaggaaaggctgttaattgctgatgtggcaatttcagctastgaattcatgtttgaagaaaccaggaactatgttaaacaaagaaaagcttttggcaaaacagttgctcacctacagacagtgcaacatmaattagcagaattaaaaacacatatatgtgtaacccgagcatttgtggacaactgtctccagctgcatgaagcgaaacgtttggactccgccactgcttgcatggcgaaatattgggcatctgagttacaaaatagtgtagcttacgactgtgtacagctccatggaggttggggatacatgtgggagtacccaattgcaaaagcttatgtggatgccagagttcagccaatctatggtggtacaaatgaaataatgaaggagctgattgcaagagagattgtctttgacaagtagacatctgcccacatcctggagtcctattacagctaatctcgttttaaatctgctcaagataaaatgtaacttggaaagcgaggaaacactaaacatgtttttacctgctctctctatagagaaggaaataaaatataaatataagattaacacagtggaaggacaaatctttgaagccaaaattctagttttccaatataaggtttaacttacagttttttatgtagccaaaggtaaacggttttctgaatcttgcctaggtgtttcatttatctctaaaattctaaaaagcataaatcattcaaatcttcaaaccaaggcagaaataattttatgtcgctmtagtataaaaacattaataagatagcacattgacttttaaagggaaaagtaaatataacttagcatgtaaactcatttcggctaccatttgctccaaattccctagaacagtggtttttaccactgtactccaaccccgtttttaagcaatggaactctttcttcaaacaaaagcttatgcagaacatctctgtgaaacgctgctgagtgagaactgctttcattgaagctggaagccatcataccttactgccttgaaacccctaggactcagctaagtatttgcctaaccctgaccagggaatgccttggttctgtcaattgctgacatctgagaacacagaataatccatcatttttaatttcaagatattggtacattttataggtatcaaagcaatggcttttcttttgcaacagttaatgtatttattaacttaataattactttatgtcttctataaaccaggctgttaatacaatgatgacaaacaaaactggcaagatcactaaaaaataagtgaataaacaaataagtagtaaaataaggtaagaagtaaatatgtaaaagagataatttcaagcataagtgcaatgtaaataataaagtaagcatttaaaattcaaaagtgaggaaatgacatttgatttaagacttaaaagtaattacaaaaaataaa

SEQ ID NO: 149 - DNA, 3618 bp, Homo sapiens
agaggctgggagctgcggccgctgtgccagggtgaccggtagagttgtasccgaggtggcggcgcggggcggggcgggcggagagagaaggaaggaggtggttgtgcaggatggcgacggcggcctacgagcagctgaagctgcatatcacacctgaaaaattttatgtggaagcttgtgatgatggagcagatgacgtacttaccattgaccgtgtgtccacagaggttacccttgcagtcaagaaagatgttcctccttcagctgtcacaagaccaatatttggtatactgggcacaatccatctggtggcaggtaattatcttatagtcattaccaaaaagataaaagtaggtgaatttttcagtcatgtagtctggaaagcaacagattttgatgtcctttcttataagaagacaatgttgcacttaactgatattcagttacaagataataaaaccttcctagcgatgctaaaccatgtcttgaatgtggatggattttacttttcaacaacatatgatttgacccatactttgcagcggctatccaacactagtcctgaattccaagaaatgagtctcttggaaagggcagatcagcggtttgtatggaatggtcatcttctaagagaactttctgcacagccrgaggttcatcggtttgcccttccagtgttacatggctttattaccatgcattcatgttctattaatggaaaatactttgattggattctcatctcgaggaggagctgtttcagagctggtgtgcgctattatgtaagaggaattgattcggaaggccatgcagctaactttgtagaaacagaacaaattgtgcactacaatgggagcaaagcttcgtttgtacaggcaagttgatcaatacctgttttctggtcccaaagaccaaacctcaagtacaaaccactgccacagatcagcaaagtagcaaatcacatggacggtttccaaaggcattttgattcccaagtaattatttatggaaaacaagttataatcaatctgattaaccagaagggctcggagaagccacttgagcagacatttgcaacaatggtgtcttccttgggaagtggaatgatgagatacattgcctttgacttccataaggaatgtaaaaatatgagatgggatcgactaagtattttattggatcaggtagcagaaatgcaagatgaattaagttattttctagtggactctgctggccaggtggtggcaaaccaggaaggcgtgttccgaagcaattgcatggattgtctagatagaaccaatgtgatccagagtttgttagctcgtcgttcwcttcaggcccaacttcagagactaggagttttgcatgtgggacaaaagcttgaagaacaagatgaatttgagaagatttacaaaaatgcctgggctgacaacgcaaatgcttgtgccaagcaatatgcgggaactggtgccttgaagactgactttaccaggcaaactggaaagagaactcatttgggacttataatggatggctggaactcaatgatacgatattataagaacaacttttccgatggatttagacaagattccatagacttatttcttggaaactattcagtggatgaattagaatctcatagtcctttaagtgttccaagggactggaaattcctggctttgcctattatcatggttgttgccttttcaatgtgcattatctgtttgcttatggctggtgacacttggacagaaacactggcctatgtgctcttctggggagttgcaagcattggaacattttttatcattctttacaatggcaaagattttgtcgatgctcccagactggtccagaaagaaaagatagactgaatttgtatttgtggaaagcggcttggcttggaagattccattgtgcagaactggagtctttactgacccgctttccacatcagcccaaggtctttttaatgcctttatccaaaagcacatcttgtgctccatgcaggatgatgacagaattgatctgatgttactgccttgatggtctctttactattgggacagttagatttataatttgaagctattctgtaattaaaatataacctgaattcagcttgcagaatggaagctgaatctgttcattgtattctattgattgtcaatttaattagctgttgcagaataagtaatatattttaaaaacctagctcctttcattatttaaaacagcaaaattatttttgtagctcagtttcattattgtcattgtagaagcggtcactattagcaggcatacttttccacacatctttggacttttcttaaaagttcagtaataagctaactgtgtttataaaatgtaagtctcttacagacatcaagtagtttgatgagacagtctgtgacttcatgataggaaagaggaggatgaggtctggggttctttaaagtctctggtgggctgcctcatgactttaatcagcttgaactgccagtgcaccagcagtttaggtgtgatgagagaattcagatatactttatctttttaaaaaagtgtaaataaaatcaaagaatgtaaagtctatctcttscgctagaggtccaaagctgcctctgttttaaagattatcccaatgtggaagatgcccatgactggtcagctacttcctcctatacattttggtttctttgagggtcactcattgagacacgcaggcctctgagagggtcttgttctagatttcatattgcacttggagggtaacagctgctttttcacgcatggtactcttgatgtttttcactctgtcaaggattttgttggctatcaatgaatgtgtctaaaacttagtgcttccaggtagttatagtactccaaatcaaggaccaacttaaacgttaatttttgtgcaaaaacaaacctgaaaaatatgcttcggaaactgtgcatagttctaattgtaagtcagattgtatattcaaattgtaattaagagatttaaatattagaacggtatgtaaggtagtataattaccactattttaaataattcagttaaacactgctgcaatatttcagtgttgtgcttgaaaatatgtacagtttttttccaatattaataccttatgttgtccttaaatatttctaaaagcgcctttatttcagcattacctttttttcatcactatcttttataaaacattaatataagtcgttacttttawaaactaaaggaaataatagctggaaaaccctctgtagtttaaaatcagtcattaaactcacaatagggtaagtaaatatagccacctgttaacatgtaaataagcataatttgttccaaagatggaatattgaaacttagttcatgtctgctgtaaaatattatttaaatgctgctgggcatttcacttaaagaacttaatgtcaacagctacaacaaagaccaaatctgaactgctaatgtggctgctttgtagggaatggactaatatcagtgtgttagatcttaaggtatcagtatttcagaatcctgcgacgattttatttctaaattcatgtactgtatgtccataagtgaaaataaaatgtcatattcttttctat

SEQ ID NO: 150 - DNA, 3615 bp, Homo sapiens
agaggctgggagctgcggccgctgtgccagggtgaccggtagagttgtasccgaggtggcggcgcggggcggggcgggcggagagagaaggaaggaggtggttgtgcaggatggcgacggcggcctacgagcagctgaagctgcatatcacacctgaaaaattttatgtggaagcttgtgatgatggagcagatgacgtacttaccattgaccgtgtgtccacagaggttacccttgcagtcaagaaagatgttcctccttcagctgtcacaagaccaatatttggtatactgggcacaatccatctggtggcaggtaattatcttatagtcattaccaaaaagataaaagtaggtgaatttttcagtcatgtagtctggaaagcaacagattttgatgtcctttcttataagaagacaatgttgcacttaactgatattcagttacaagataataaaaccttcctagcgatgctaaaccatgtcttgaatgtggatggattttacttttcaacaacatatgatttgacccatactttgcagcggctatccaacactagtcctgaattccaagaaatgagtctcttggaaagggcagatcagcggtttgtatggaatggtcatcttctaagagaactttctgcacagccrgaggttcatcggtttgcccttccagtgttacatggctttattaccatgcattcatgttctattaatggaaaatactttgattggattctcatctcgaggaggagctgtttcagagctggtgtgcgctattatgtaagaggaattgattcggaaggccatgcagctaactttgtagaaacagaacaaattgtgcactacaatgggagcaaagcttcgtttgtacaggcaagttgatcaatacctgttttctggtcccaaagaccaaacctcaagtacaaaccactgccacagatcagcaaagtagcaaatcacatggacggtttccaaaggcattttgattcccaagtaattatttatggaaaacaagttataatcaatctgattaaccagaagggctcggagaagccacttgagcagacatttgcaacaatggtgtcttccttgggaagtggaatgatgagatacattgcctttgacttccataaggaatgtaaaaatatgagatgggatcgactaagtattttattggatcaggtagcagaaatgcaagatgaattaagttattttctagtggactctgctggccaggtggtggcaaaccaggaaggcgtgttccgaagcaattgcatggattgtctagatagaaccaatgtgatccagagtttgttagctcgtcgttcwcttcaggcccaacttcagagactaggagttttgcatgtgggacaaaagcttgaagaacaagatgaatttgagaagatttacaaaaatgcctgggctgacaacgcaaatgcttgtgccaagcaatatgcgggaactggtgccttgaagactgactttaccagaactggaaagagaactcatttgggacttataatggatggctggaactcaatgatacgatattataagaacaacttttccgatggatttagacaagattccatagacttatttcttggaaactattcagtggatgaattagaatctcatagtcctttaagtgttccaagggactggaaattcctggctttgcctattatcatggttgttgccttttcaatgtgcattatctgtttgcttatggctggtgacacttggacagaaacactggcctatgtgctcttctggggagttgcaagcattggaacattttttatcattctttacaatggcaaagattttgtcgatgctcccagactggtccagaaagaaaagatagactgaatttgtatttgtggaaagcggcttggcttggaagattccattgtgcagaactggagtctttactgacccgctttccacatcagcccaaggtctttttaatgcctttatccaaaagcacatcttgtgctccatgcaggatgatgacagaattgatctgatgttactgccttgatggtctctttactattgggacagttagatttataatttgaagctattctgtaattaaaatataacctgaattcagcttgcagaatggaagctgaatctgttcattgtattctattgattgtcaatttaattagctgttgcagaataagtaatatattttaaaaacctagctcctttcattatttaaaacagcaaaattatttttgtagctcagtttcattattgtcattgtagaagcggtcactattagcaggcatacttttccacacatctttggacttttcttaaaagttcagtaataagctaactgtgtttataaaatgtaagtctcttacagacatcaagtagtttgatgagacagtctgtgacttcatgataggaaagaggaggatgaggtctggggttctttaaagtctctggtgggctgcctcatgactttaatcagcttgaactgccagtgcaccagcagtttaggtgtgatgagagaattcagatatactttatctttttaaaaaagtgtaaataaaatcaaagaatgtaaagtctatctcttscgctagaggtccaaagctgcctctgttttaaagattatcccaatgtggaagatgcccatgactggtcagctacttcctcctatacattttggtttctttgagggtcactcattgagacacgcaggcctctgagagggtcttgttctagatttcatattgcacttggagggtaacagctgctttttcacgcatggtactcttgatgtttttcactctgtcaaggattttgttggctatcaatgaatgtgtctaaaacttagtgcttccaggtagttatagtactccaaatcaaggaccaacttaaacgttaatttttgtgcaaaaacaaacctgaaaaatatgcttcggaaactgtgcatagttctaattgtaagtcagattgtatattcaaattgtaattaagagatttaaatattagaacggtatgtaaggtagtataattaccactattttaaataattcagttaaacactgctgcaatatttcagtgttgtgcttgaaaatatgtacagtttttttccaatattaataccttatgttgtccttaaatatttctaaaagcgcctttatttcagcattacctttttttcatcactatcttttataaaacattaatataagtcgttacttttawaaactaaaggaaataatagctggaaaaccctctgtagtttaaaatcagtcattaaactcacaatagggtaagtaaatatagccacctgttaacatgtaaataagcataatttgttccaaagatggaatattgaaacttagttcatgtctgctgtaaaatattatttaaatgctgctgggcatttcacttaaagaacttaatgtcaacagctacaacaaagaccaaatctgaactgctaatgtggctgctttgtagggaatggactaatatcagtgtgttagatcttaaggtatcagtatttcagaatcctgcgacgattttatttctaaattcatgtactgtatgtccataagtgaaaataaaatgtcatattcttttctat

SEQ ID NO: 151 - DNA, 3615 bp, Homo sapiens
agaggctgggagctgcggccgctgtgccagggtgaccggtagagttgtasccgaggtggcggcgcggggcggggcgggcggagagagaaggaaggaggtggttgtgcaggatggcgacggcggcctacgagcagctgaagctgcatatcacacctgaaaaattttatgtggaagcttgtgatgatggagcagatgacgtacttaccattgaccgtgtgtccacagaggttacccttgcagtcaagaaagatgttcctccttcagctgtcacaagaccaatatttggtatactgggcacaatccatctggtggcaggtaattatcttatagtcattaccaaaaagataaaagtaggtgaatttttcagtcatgtagtctggaaagcaacagattttgatgtcctttcttataagaagacaatgttgcacttaactgatattcagttacaagataataaaaccttcctagcgatgctaaaccatgtcttgaatgtggatggattttacttttcaacaacatatgatttgacccatactttgcagcggctatccaacactagtcctgaattccaagaaatgagtctcttggaaagggcagatcagcggtttgtatggaatggtcatcttctaagagaactttctgcacagccrgaggttcatcggtttgcccttccagtgttacatggctttattaccatgcattcatgttctattaatggaaaatactttgattggattctcatctcgaggaggagctgtttcagagctggtgtgcgctattatgtaagaggaattgattcggaaggccatgcagctaactttgtagaaacagaacaaattgtgcactacaatgggagcaaagcttcgtttgtacagactcgaggatcaatacctgttttctggtcccaaagaccaaacctcaagtacaaaccactgccacagatcagcaaagtagcaaatcacatggacggtttccaaaggcattttgattcccaagtaattatttatggaaaacaagttataatcaatctgattaaccagaagggctcggagaagccacttgagcagacatttgcaacaatggtgtcttccttgggaagtggaatgatgagatacattgcctttgacttccataaggaatgtaaaaatatgagatgggatcgactaagtattttattggatcaggtagcagaaatgcaagatgaattaagttattttctagtggactctgctggccaggtggtggcaaaccaggaaggcgtgttccgaagcaattgcatggattgtctagatagaaccaatgtgatccagagtttgttagctcgtcgttcacttcaggcccaacttcagagactaggagttttgcatgtgggacaaaagcttgaagaacaagatgaatttgagaagatttwcaaaaatgcctgggctgacaacgcaaatgcttgtgccaagcaatatgcgggaactggtgccttgaagactgactttaccagaactggaaagagaactcatttgggacttataatggatggctggaactcaatgatacgatattataagaacaacttttccgatggatttagacaagattccatagacttatttcttggaaactattcagtggatgaattagaatctcatagtcctttaagtgttccaagggactggaaattcctggctttgcctattatcatggttgttgccttttcaatgtgcattatctgtttgcttatggctggtgacacttggacagaaacactggcctatgtgctcttctggggagttgcaagcattggaacattttttatcattctttacaatggcaaagattttgtcgatgctcccagactggtccagaaagaaaagatagactgaatttgtatttgtggaaagcggcttggcttggaagattccattgtgcagaactggagtctttactgacccgctttccacatcagcccaaggtctttttaatgcctttatccaaaagcacatcttgtgctccatgcaggatgatgacagaattgatctgatgttactgccttgatggtctctttactattgggacagttagatttataatttgaagctattctgtaattaaaatataacctgaattcagcttgcagaatggaagctgaatctgttcattgtattctattgattgtcaatttaattagctgttgcagaataagtaatatattttaaaaacctagctcctttcattatttaaaacagcaaaattatttttgtagctcagtttcattattgtcattgtagaagcggtcactattagcaggcatacttttccacacatctttggacttttcttaaaagttcagtaataagctaactgtgtttataaaatgtaagtctcttacagacatcaagtagtttgatgagacagtctgtgacttcatgataggaaagaggaggatgaggtctggggttctttaaagtctctggtgggctgcctcatgactttaatcagcttgaactgccagtgcaccagcagtttaggtgtgatgagagaattcagatatactttatctttttaaaaaagtgtaaataaaatcaaagaatgtaaagtctatctcttacgctagaggtccaaagctgcctctgttttaaagattatcccaatgtggaagatgcccatgactggtcagctacttcctcstatacattttggtttctttgagggtcactcattgagacacgcaggcctctgagagggtcttgttctagatttcatattgcacttggagggtaacagctgctttttcacgcatggtactcttgatgtttttcactctgtcaaggattttgttggctatcaatgaatgtgtctaaaacttagtgcttccaggtagttatagtactccaaatcaaggaccaacttaaacgttaatttttgtgcaaaaacaaacctgaaaaatatgcttcggaaactgtgcatagttctaattgtaagtcagattgtatattcaaattgtaattaagagatttaaatattagaacggtatgtaaggtagtataattaccactattttaaataattcagttaaacactgctgcaatatttcagtgttgtgcttgaaaatatgtacagtttttttccaatattaataccttatgttgtccttaaatatttctaaaagcgcctttatttcagcattacctttttttcatcactatcttttataaaacattaatataagtcgttacttttagaaactaaaggaaataatagctggaaaaccctctgtagtttaaaatcagtcattaaactcacaatagggtaagtaaatatwgccacctgttaacatgtaaataagcataatttgttccaaagatggaatattgaaacttagttcatgtctgctgtaaaatattatttaaatgctgctgggcatttcacttaaagaacttaatgtcaacagctacaacaaagaccaaatctgaactgctaatgtggctgctttgtagggaatggactaatatcagtgtgttagatcttaaggtatcagtatttcagaatcctgcgacgattttatttctaaattcatgtactgtatgtccataagtgaaaataaaatgtcatattcttttctat

SEQ ID NO: 152 - DNA, 4211 bp, Homo sapiens
tgctgttttgacaacatggcggcgcccatggtccgtggcccggcagtgctcgcctaaaggtggagaacgaggagtagaggagccgcaggccagagcctgtgagcagatccagacctacagataaaaaacattatttaatctatctgggatttactccggcttatgatttgagggccttctcaccttctgaagaatggcttctgtttggcagagaytgggtttttatgcctctcttctgaaaagacagctaaatggtgggccagatgtcatcaagtgggaaaggagagtaattcccggatgtaccagaagcatctacagtgccacgggaaagtggacaaaagagtatacattgcagacaagaaaggatgttgagaaatggtggcatcaacgaataaaagaacaggcctccaaaatttcagaagctgataaatcgaagccaaaattttacgtgctttccatgttcccttatccttctggtaagctgcacatgggccatgtgcgtgtctacaccatcagcgacaccatagcacggttccagaagatgagagggatgcaggtcatcaaccccatgggatgggatgcttttggattgcctgctgaaaatgccgcagtcgagaggaatctacatccacaaagttggacacaaagtaatattaaacacatgaggaaacagcttgatcgtctgggcctgtgtttcagctgggatagggaaataactacgtgtttgccagattactacaagtggactcagtatctctttattaaactgtatgaggctgggctggcctatcaaaaggaggccctggttaactgggacccagtggatcaaacagtgcttgccaatgagcaggtggatgaacatggctgttcatggcgttctggagcaaaggtggaacagaagtacctcagacaatggtttattaagacaaccgcttatgcaaaggccatgcaggacgcgttggcagaccttccagaatggtatggaataaaaggcatgcaagcccactggattggggactgtgtgggctgccacctggacttcacattaaaggttcatgggcaagccacgggcgaaaagctgactgcctatacggccacccctgaagccatttatggcacctcccacgtggccatctcgcccagccacagactcctacatgggcacagctctctgaaggaagccttgaggatggcccttgtccctggcaaagattgcctcacgcctgtaatggctgtgaacatgctyacccagcaggaggtccctgtcgttattttggccaaagctgacttggaaggctctctggattcaaaaataggaattcccagtactagctcagaggacaccatcttagcccaaaccctgggcctggcctactctgaagtcattgaaactttgccagatggcacagagagactgagcagctctgctgagttcacaggtatgacccggcaggatgcttttctagccctgactcagaaagcccgggggaagagagtgggtggagacgtgacaagtgataaactgaaagactggctgatttcacggcagcggtactggggcacaccaatccccatygtccactgcccagtctgtggccccacacctgtgcccctggaggacttgcctgtgaccctgcccaacatcgcrtctttcactggcaagggaggccccccactggccatggcttcagagtgggtgaactgctcctgcccaaggtgcaagggagcagccaagagagagacagacacgatggatacctttgttgattctgcttggtactacttcagatacactgaccctcataatccacacagcccttttaacacagcagtggccgattactggatgcctgtggatttgtacattggagggaaagaacatgccgtcatgcacttgttctatgcaagattctttagtcatttttgccatgatcaaaaaatggttaaacatagggagccttttcataagctgctggcccaaggccttatcaaggggcagacattccgcctaccatctggacagtatctacagagagaggaagtggatctcacaggttccgttcctgttcatgcaaaaacgaaagagaagttagaggtgacgtgggagaagatgagtaagtccaaacacaacggggtggacccagaggaagttgtggagcagtatgggatcgacacrattcggctctacatcctttttgctgcccctcctgagaaggatatcttgtgggatgtgaaaactgatgctctccctggggtgctgagatggcaacaacgactgtggaccttgacaactcggtttattgaggccagggcttcygggaagtctccccagcctcagctgctgagtaacaaggagaaagcygaggccaggaakctctgggagtacaagaactccgtcatctctcaggtgaccacccatttcacagaggacttctcactgaattctgcaatttctcagctgatgggactcagcaatgccctctcgcaagcctctcagagcgtcattctccacagccccgagtttgaggatgctttgtgtgccctgatggtratggctgctccactggcccctcatgtaacctcagagatctgggcaggcctggcgctggtgccgaggaagctctgtgcccactacacttgggatgccagtgtgctgctccaggcatggcctgctgtggacccggakttcctgcagcagcctgaggttgtccagatggcagttctgatcaacaataaagcttgtggcaaaattcctgtgccccaacaagttgcccgggaccaggacaaagtccacraatttgttcttcaaagcgagctgggtgtcaggcttttgcaaggacgaagcatcaagaagtccttcctttccccgagaactgccctcatcaacttcctggtgcaagattgacagccaggaggctgcagctaccacgagggcctctgaggaacctccttccaggcctgggatgagggggcgatgtctgctggcccaggggaagggaaaagacaaatgtcttgactgttgacctcggtcctgtggcagactgcagtcaacagtgtgcctctgtagtgtggcctggtgctggggtgaaggtgagctgggcaaaggagaaatatgagctactgaggagggggttggacatcctgcccctcaccccccacccacactgcaggtagaggaggccatctgatcccatgggaagccatcagagacactgctggtgggagcaggaaggagcagtgcccctcgagcagccaggaagcctgcggatctgggaaatggctctgccttaggcrcttctcgggaatttgaggccagcctgaggaactgcaggactcaggtgcaatgtgccagccacttggaactgctaactgagcctccagatggtagtgaatggtctctttgccttcaggctggatgaggaagtcatttaggaaatgttcaaataaccaatatgtggaaatggacacagggatcttctgaagttgctttgaatcaaaaggcaggcagtgctggttcctctgcctgtgtccccaccactccccagctctgtcatgcaggcctgtcctccccaaccccagctggaygtgcctcccaggcctgctgtggttctgacacacaggatcccaggcaaggcaccacttcctcacatgaatgaggagcagcaagtcataaccactcccttgggtatacaatttgctgtgtagtgaagtggaaccaggctcaggctgctggtcccaacctcagagccccaccgcagcccagtagggatgcagcacgccccagagggctcatgtgggccccagatggcaatgccaccattgttgatgtgactccagagccagttattaggaagagcaagctcaccacagaggagtggaactgaggccccccagatgttgcctccggtgtccaagccacagcggtctggctgttgggaagatggccaggaatggactcataccattggcacattaggctaatcctggttttatgtgaagtcagcaattaagtgttcccactagaactgacctaagccactgattaatatttaatgagggaaggtaggggagaatctagccattttataatgccagaaatctatatatgttatctgatgccatttttctgaagtagcctcacatgtggtccccctgcagttcagcagttaacagatgacttttttagtgtaataaaatgtttatcatctatg

SEQ ID NO: 153 - DNA, 2980 bp, Homo sapiens
gcatcagagatagagtcttccctggcattgcaggagagaatctgaagggatgatggatgcatcaaaagagctgcaagttctccacattgacttcttgaatcaggacaaygcygtttctcaccacacatgggagttccaaacgagcagtcctgtgttccggcgaggacaggtgtttcacctgcggctggtgctgaaccagcccctacaatcctaccaccaactgaaactggaattcagcacagggccgaatcctagcatcgccaaacacaccctggtggtgctcgacccgaggacgccctcagaccactacaactggcaggcaacccttcaaaatgagtctggcaaagasgtcacagtggctgtcaccagttcccccaatgccatcctgggcaagtaccaactaaacgtgaaaactggaaaccacatccttaagtctgaagaaaacatcctataccttctcttcaacccatggtgtaaagaggacatggttttcatgcctgatgaggacgagcgcaaagartacatcctcaatgacacgggctgccattacgtgggggctgccagaagtatcaaatgcaaaccctggaactttggtcagtttgagaaaaatgtcctggactgctgcatttccctgctgactgagagctccctcaagcccacagataggagggaccccgtgctggtgtgcagggccatgtgtgctatgatgagctttgagaaaggccagggcgtgctcattgggaattggactggggactaygaaggtggcacagccccayacaagtggacaggcastgccccgatcctgcagcagtactacaacacgaagcaggctgtgtgctttggccagtgctgggtgtttgctgggatcctgactacagtgctgagagcgttgggcatcccagcacgcagtgtgacaggcttcgattcagctcacgacacagaaaggaacctcacggtggacacctatgtgaatgagaatggcragaaaatcaccagtatgacccacgactctgtctggaatttccatgtgtggacggatgcctggatgaagcgaccggatctgcccaagggctacgacggctggcaggctgtggacgcaacgccgcaggagcgaagccagggtgtcttctgctgtgggccatcaccactgaccgccatcyrcaaaggtgacrtctttattgtctatgacaccagattcgtcttctcagaagtgaatggtgacaggctyatctggttggtgaagatggtgaatgggcargaggagttacacrtaatttcaatggagaccacaagcatcgggaaaaacatcagcaccaaggcagtgggccaagacaggcggagagatatcacctatsagtacaagtatccagaaggctcctctgaggagaggcaggtcatggatcatgccttcctccttctcagttctgagagggagcacagacgacctgtaaaagagaactttcttcacrtgtcggtacaatcagatgatgtgctgctgggaaactctgttaatttcaccgtgattcttaaaaggaagaccgctgccctacagaatgtcaacatcttgggctcctttgaactacagttgtacactggcaagaagatggcaaaactgtgtgacctcaataagacctcgcagatccaaggtcaagtatcagaagtgactctgaccttggactccaagacctacatcaacagcctggctatattagatgatgagccagttatcagaggtttcatcattgcggaaattgtggagtctaaggaaatcatggcctctgaagtattcacgtctttccagtaccctgagttctctatagagttgcctaacacaggcagaattggccagctacttgtctgcaattgtatcttcaagaataccctggccatccctttgactgacgtcaagttctctttggaaagcctgggcatctcctcactacagacctctgaccatgggacggtgcagcctggtgagaccatccaatcccaaataaaatgcaccccaataaaaactggacccaagaaatttatcgtcaagttaagttccaaacaagtgaaagagattaatgctcagaagattgttctcatcaccaagtagscttgtctgatgctgtggagccttagttgagatttcagcatttcctaccttgtgcttagctttcagattatggatgattaaatttgatgacttatatgagggcagattcaagagccagcaggtcaaaaaggccaacacaaccataagcagccagacccacaaggccaggtcctgtgctatcacaggrtcacctcttttacagttagaaacaccagccgaggccacagaatcccatccctttcctgagtcatggcctcaaaaatcagggccaccattgtctcaattcaaatccatagatttcgaagccacagaktctctccctggagcagcagactatgggcagcccagtgctgccacctgctgacgacccttgagaagctgccatatcttcaggccatgggttcaccagccctgaaggcacctgtcaactggagtgctctctcagcactgggatgggcctgatagaagtgcattctcctcctattgcctccattctcctctctctatccctgaaatccaggaagtccctctcctggtgctccaagcagtttgaagcccaatctgcaaggacatttctcaagggccatgtggttttgcagacaaccctgtcctcaggcctgaactcaccatagagacccatgtcagcaaacggtgaccagcaaatcctcttcccttattctaaagctgccccttgggagactccagggagaaggcattgcttcctccctggtgtgaactctttctttggtattccatccactatcctggcaactcaaggctgcttctgttaactgaagcctgctccttcttgttctgccctccagagatttgctcaaatgatcaataagctttaaattaaactctacttcaagaaaa

SEQ ID NO: 154 - DNA, 2578 bp, Homo sapiens
gcatcagagatagagtcttccctggcattgcaggagagaatctgaagggatgatggatgcatcaaaagagctgcaagttctccacattgacttcttgaatcaggacaaygcygtttctcaccacacatgggagttccaaacgagcagtcctgtgttccggcgaggacaggtgtttcacctgcggctggtgctgaaccagcccctacaatcctaccaccaactgaaactggaattcagcacagggccgaatcctagcatcgccaaacacaccctggtggtgctcgacccgaggacgccctcagaccactacaactggcaggcaacccttcaaaatgagtctggcaaagasgtcacagtggctgtcaccagttcccccaatgccatcctgggcaagtaccaactaaacgtgaaaactggaaaccacatccttaagtctgaagaaaacatcctataccttctcttcaacccatggtgtaaagaggacatggttttcatgcctgatgaggacgagcgcaaagartacatcctcaatgacacgggctgccattacgtgggggctgccagaagtatcaaatgcaaaccctggaactttggtcagtttgagaaaaatgtcctggactgctgcatttccctgctgactgagagctccctcaagcccacagataggagggaccccgtgctggtgtgcagggccatgtgtgctatgatgagctttgagaaaggccagggcgtgctcattgggaattggactggggactaygaaggtggcacagccccayacaagtggacaggcastgccccgatcctgcagcagtactacaacacgaagcaggctgtgtgctttggccagtgctgggtgtttgctgggatcctgactacagtgctgagagcgttgggcatcccagcacgcagtgtgacaggcttcgattcagctcacgacacagaaaggaacctcacggtggacacctatgtgaatgagaatggcragaaaatcaccagtatgacccacgactctgtctggaatttccatgtgtggacggatgcctggatgaagcgaccggatctgcccaagggctacgacggctggcaggctgtggacgcaacgccgcaggagcgaagccagggtgtcttctgctgtgggccatcaccactgaccgccatcyrcaaaggtgacrtctttattgtctatgacaccagattcgtcttctcagaagtgaatggtgacaggctyatctggttggtgaagatggtgaatgggcargaggagttacacrtaatttcaatggagaccacaagcatcgggaaaaacatcagcaccaaggcagtgggccaagacaggcggagagatatcacctatsagtacaagtatccagaaggctcctctgaggagaggcaggtcatggatcatgccttcctccttctcagttctgagagggagcacagacgacctgtaaaagagaactttcttcacrtgtcggtacaatcagatgatgtgctgctgggaaactctgttaatttcaccgtgattcttaaaaggaagaccgctgccctacagaatgtcaacatcttgggctcctttgaactacagttgtacactggcaagaagatggcaaaactgtgtgacctcaataagacctcgcagatccaaggtcaagtatcagaagtgactctgaccttggactccaagacctacatcaacagcctggctatattagatgatgagccagttatcagaggtttcatcattgcggaaattgtggagtctaaggaaatcatggcctctgaagtattcacgtctttccagtaccctgagttctctatagagttgcctaacacaggcagaattggccagctacttgtctgcaattgtatcttcaagaataccctggccatccctttgactgacgtcaagttctctttggaaagcctgggcatctcctcactacagacctctgaccatgggacggtgcagcctggtgagaccatccaatcccaaataaaatgcaccccaataaaaactggacccaagaaatttatcgtcaagttaagttccaaacaagtgaaagagattaatgctcagaagattgttctcatcaccaaktagscttgtctgatgctgtggagccttagttgagatttcagcatttcctaccttgtgcttagctttcagattatggatgattaaatttgatgacttatatgagggcagattcaagagccagcaggtcaaaaaggccaacacaaccataagcagccagacccacaaggccaggtcctgtgctatcacaggrtcacctcttttacagttagaaacaccagccgaggccacagaatcccatccctttcctgagtcatggcctcaaaaatcagggccaccattgtctcaattcaaatccatagatttcgaagccacagaaaggcattgcttcctccctggtgtgaactctttctttggtattccatccactatcctggcaactcaaggctgcttctgttaactgaagcctgctccttcttgttctgccctccagagatttgctcaaatgatcaataagctttaaattaaactctacttcaa

SEQ ID NO: 155 - DNA, 2557 bp, Homo sapiens
gcgcgagacctggtgcgggaggcccgggcagggagaagtgtgcggggccgggacaagccggctccgagtccggctccggggggcggggcgggaggggcctgcgcggcggcgggagcccagagccgcgctaaagcgggtcaagcgtcctccttttctccccgccccttctcctcctcctacctgggcctctgcgtggagacgcgcacctggcaaccggaggccgcgtctccgccttctctgctcgcgcctggcgcccggagcctgcccgggacctccgccggagccgcgctcgctgcaggcggcctcgagcgctctctcgttgatgccgttttggaggtgaccggcgcggcggccgctctatggtggggccgcgttagtggctgcggctccgcgggactccagggcgcggctgcgaggtggcggggcgccccgcctgcagaaccctgcttgcagctcaggtttcggggtgcttgaggaggccgccacggcagcgcgggagcggaagatgttggagctgaggcaccggggaagctgccccggccccagggaagcggtgtcgccgccacaccgcgagggagaggcggccggcggcgaccacgaaaccgagagcaccagcgacaaagaaacagatattgatgacagatatggagatttggattccagaacagattctgatattccggaaattccaccatcctcagatagaacccctgagattctcaaaaaagctctatctggtttatcttcaaggtggaaaaactggtggatacgtggaattctcactctaactatgatctcgttktttttcctgatcatctatatgggatccttcatgctgatgcttcttgttctgggcatccaagtgaaatgcttccatgaaattatcactataggttatagagtctatcattcttatgatctaccatggtttagaacactaagttggtactttctattgtgtgtaaactactttttctatggagagactgtagctgattattttgctacatttgttcaaagagaagaacaacttcagttcctcattcgctaccatagatttatatcatttgccctctatctggcaggtttctgcatgtttgtactgagtttggtgaagaaacattatcgtctgcagttttatatgttcgcatggactcatgtcactttactgataactgtcactcagtcacaccttgtcatccaaaatctgtttgaaggcatgatatggttccttgttccaatatcaagtgttatctgcaatgacataactgcttacctttttggatttttttttgggagaactccattaattaagttgtctcctaaaaagacttgggaaggattcattggtggtttcttttccacagttgtgtttggattcattgctgcctatgtgttatccaaataccagtactttgtctgcccagtggaataccgaagtgatgtaaactccttcgtgacagaatgtgagccctcagaacttttccagcttcagacttactcacttccaccctttctaaaggcagtcttgagacaggaaagagtgagcttgtaccctttccagatccacagcattgcactgtcaacctttgcatctttaattggcccatttggaggcttctttgctagtggattcaaaagagccttcaaaatcaaggattttgcaaataccattcctggacatggtgggataatggacagatttgattgtcagtatttgatggcaacttttgtacatgtgtacatcacaagttttataaggggcccaaatcccagcaaagtgctacagcagttgttggtgcttcaasctgaacagcagttaaatatatataaaaccctgaagactcatctcattgagaaaggaatcctacaacccaccttgaaggtataactggatccagagagggaaggactgacaagaaggaattattcagaaaaacactgacagatgttttataaattgtacagaaaaatagttaaamatgcaataggttgaagttttggagatatgtttctctctgaaattactgtgaatatttaacaaacacttacttgatctatgttatgaaataagtagcaaattgccagcaaaatgtcttgtaccttttctaaagtgtattttctgatgtgaacttccttccccttacttgctaggtttcataatttaaaagactggtatttaaaagagtcaaacactataaaatgagtaagttgacgatgttttaagattgcayctggcagtgtgcctttttgcacaaatatttacttttgcacttggagctgcttttaattttagcaaaatgttttatgcaaggcacaataggaagtcagttctcctgcacttcctcctcatgtagtctggagtactttctaaagggcttagttggatttaaaaaaaaaaaaaaaagattgtctrcttttcaaagaagtaaccatttgccaggggaaaacattctgcttttaggtagtttcaaaattcaggggagggagcctgaaatttttgccatgattggtttgttagaaagagcaggcatcagactacttctgataaaattgt

SEQ ID NO: 156 - DNA, 2319 bp, Homo sapiens
gcgcgagacctggtgcgggaggcccgggcagggagaagtgtgcggggccgggacaagccggctccgagtccggctccggggggcggggcgggaggggcctgcgcggcggcgggagcccagagccgcgctaaagcgggtcaagcgtcctccttttctccccgccccttctcctcctcctacctgggcctctgcgtggagacgcgcacctggcaaccggaggccgcgtctccgccttctctgctcgcgcctggcgcccggagcctgcccgggacctccgccggagccgcgctcgctgcaggcggcctcgagcgctctctcgttgatgccgttttggaggtgaccggcgcggcggccgctctatggtggggccgcgttagtggctgcggctccgcgggactccagggcgcggctgcgaggtggcggggcgccccgcctgcagaaccctgcttgcagctcaggtttcggggtgcttgaggaggccgccacggcagcgcgggagcggaagatgttggagctgaggcaccggggaagctgccccggccccagggaagcggtgtcgccgccacaccgcgagggagaggcggccggcggcgaccacgaaaccgagagcaccagcgacaaagaaacagatattgatgacagatatggagatttggattccagaacagattctgatattccggaaattccaccatcctcagatagaacccctgagattctcaaaaaagctctatctggtttatcttcaaggtggaaaaactggtggatacgtggaattctcactctaactatgatctcgttktttttcctgatcatctatatgggatccttcatgctgatgcttcttgttctgggcatccaagtgaaatgcttccatgaaattatcactataggttatagagtctatcattcttatgatctaccatggtttagaacactaagttggtactttctattgtgtgtaaactactttttctatggagagactgtagctgattattttgctacatttgttcaaagagaagaacaacttcagttcctcattcgctaccatagatttatatcatttgccctctatctggcaggtttctgcatgtttgtactgagtttggtgaagaaacattatcgtctgcagttttatatgttcgcatggactcatgtcactttactgataactgtcactcagtcacaccttgtcatccaaaatctgtttgaaggcatgatatggttccttgttccaatatcaagtgttatctgcaatgacataactgcttacctttttggatttttttttgggagaactccattaattaagttgtctcctaaaaagacttgggaaggattcattggtggtttcttttccacagttgtgtttggattcattgctgcctatgtgttatccaaataccagtactttgtctgcccagtggaataccgaagtgatgtaaactccttcgtgacagaatgtgagccctcagaacttttccagcttcagacttactcacttccaccctttctaaaggcagtcttgagacaggaaagagtgagcttgtaccctttccagatccacagcattgcactgtcaacctttgcatctttaattggcccatttggaggcttctttgctagtggattcaaaagagccttcaaaatcaaggattttgcaaataccattcctggacatggtgggataatggacagatttgattgtcagtatttgatggcaacttttgtacatgtgtacatcacaagttttataaggggcccaaatcccagcaaagtgctacagcagttgttggtgcttcaasctgaacagcagttaaatatatataaaaccctgaagactcatctcattgagaaaggaatcctacaacccaccttgaaggtataactggatccagagagggaaggactgacaagaaggaattattcagaaaaacactgacagatgttttataaattgtacagaaaaatagttaaamatgcaataggttgaagttttggagatatgtttctctctgaaattactgtgaatatttaacaaacacttacttgatctatgttatgaaataagtagcaaattgccagcaaaatgtcttgtaccttttctaaagtgtattttctgatgtgaacttccttccccttacttgctaggtttcaayctggcagtgtgcctttttgcacaaatatttacttttgcacttggagctgcttttaattttagcaaaatgttttatgcaaggcacaataggaagtcagttctcctgcacttcctcctcatgtagtctggagtactttctaaagggcttagttggattt

SEQ ID NO: 157 - DNA, 1820 bp, Homo sapiens
cggacctccacactgagccatgcccacccccgacgccaccacgccacaggccaagggcttccgcagggccgtgtctgagctggacgccaagcaggcagaggccatcatgtccccgcggttcattgggcgcaggcagagcctcatcgaggacgcccgcaaggagcgggaggcggcggtggcagcagcggccgctgcagtcccctcrgagcccggggaccccctggaggcygtggcctttgaggagaaggaggggaaggccrtgctaaacctgctcttctccccgagggccaccaagccctcggcgctgtcccgagctgtgaaggtgtttgagacgtttgaagccaaaatccaccatctagagacccggcccgcccagaggccgcgagctgggggcccccacctggagtacttcgtgcgcctcgaggtgcgccgaggggacctggccgccctgctcagtggtgtgcgccaggtgtcagaggacgtgcgcagccccgcggggcccaaggtcccctggttcccaagaaaagtgtcagagctggacaagtgtcatcacctggtcaccaagttcgaccctgacctggacttggaccacccgggcttctcggaccaggtgtaccgccagcgcaggaagctgattgctgagatcgccttccagtacaggcacggcgacccgattccccgtgtggagtacaccgccgaggarattgccacctggaaggaggtctacaccacgctgaarggcctctacgccacgcacgcctgcggggagcacctggaggcctttgctttgctggagcgcttcagcggctaccgggaagacaatatcccccagctggaggacgtctcccgcttcctgaaggagcgcaygggcttccagctgcggcctgtggccggcctgctgtccgcccgggacttcctggccagcctggccttccrcgtgttccagtgcacccagtatatccgccacgcgtcctcgcccatgcactcccctgagccggactkctgccacgagctgctggggcacgtgcccatgctggccgaccgcaccttcgcgcagttctcgcaggacattggcctggcgtccctgggggcctcggatgaggaaattgagaagctgtccacgctgtactggttcacggtggagttcgggctgtgtaagcagaacggggaggtgaaggcctatggtgccgggctgctgtcctcctacggggagctcctgcactgcctgtctgaggagcctgagattcgggccttcgaccctgaggctgcggccgtgcagccctaccaagaccagacrtaccagtcagtctacttcgtgtctgagagcttcagtgacgccaaggacaagctcaggagctatgcctcacgcatccagcgccccttctccgtgaagttcgacccgtacaygctggccatcgacrtgctggacagcccccaggccgtgcggcgctccctggagggtgtccaggatgagctggacacccttgcccatgcgctgagtgccattggctaggtgcacggcgtccctgagggcccttcccaacctcccctggtcctgcactgtcccggagctcaggccctggtgaggggctgggtcccgggtgccccccatgccctccctgctgccaggctcccactgcccctgcacctgcttctcagcgcaacagctgtgtgtgcccgtggtgaggttgtgctgcctgtggtgaggtcctgtcctggctcccagggtcctgggggctgctgcactgccctccgcccttccctgacactgtctgctgccccaatcaccgtcacaataaaagaaactgtggtctctacac

SEQ ID NO: 158 - DNA, 1644 bp, Homo sapiens
cggacctccacactgagccatgcccacccccgacgccaccacgccacaggccaagggcttccgcagggccgtgtctgagctggacgccaagcaggcagaggccatcatgggccaccaagccctcggcgctgtcccgagctgtgaaggtgtttgagacgtttgaagccaaaatccaccatctagagacccggcccgcccagaggccgcgagctgggggcccccacctggagtacttcgtgcgcctcgaggtgcgccgaggggacctggccgccctgctcagtggtgtgcgccaggtgtcagaggacgtgcgcagccccgcggggcccaaggtcccctggttcccaagaaaagtgtcagagctggacaagtgtcatcacctggtcaccaagttcgaccctgacctggacttggaccacccgggcttctcggaccaggtgtaccgccagcgcaggaagctgattgctgagatcgccttccagtacaggcacggcgacccgattccccgtgtggagtacaccgccgaggarattgccacctggaaggaggtctacaccacgctgaarggcctctacgccacgcacgcctgcggggagcacctggaggcctttgctttgctggagcgcttcagcggctaccgggaagacaatatcccccagctggaggacgtctcccgcttcctgaaggagcgcaygggcttccagctgcggcctgtggccggcctgctgtccgcccgggacttcctggccagcctggccttccrcgtgttccagtgcacccagtatatccgccacgcgtcctcgcccatgcactcccctgagccggactkctgccacgagctgctggggcacgtgcccatgctggccgaccgcaccttcgcgcagttctcgcaggacattggcctggcgtccctgggggcctcggatgaggaaattgagaagctgtccacgctgtactggttcacggtggagttcgggctgtgtaagcagaacggggaggtgaaggcctatggtgccgggctgctgtcctcctacggggagctcctgcactgcctgtctgaggagcctgagattcgggccttcgaccctgaggctgcggccgtgcagccctaccaagaccagacrtaccagtcagtctacttcgtgtctgagagcttcagtgacgccaaggacaagctcaggagctatgcctcacgcatccagcgccccttctccgtgaagttcgacccgtacaygctggccatcgacrtgctggacagcccccaggccgtgcggcgctccctggagggtgtccaggatgagctggacacccttgcccatgcgctgagtgccattggctaggtgcacggcgtccctgagggcccttcccaacctcccctggtcctgcactgtcccggagctcaggccctggtgaggggctgggtcccgggtgccccccatgccctccctgctgccaggctcccactgcccctgcacctgcttctcagcgcaacagctgtgtgtgcccgtggtgaggttgtgctgcctgtggtgaggtcctgtcctggctcccagggtcctgggggctgctgcactgccctccgcccttccctgacactgtctgctgccccaatcaccgtcacaataaaagaaactgtggtctctacac

SEQ ID NO: 159 - DNA, 1901 bp, Homo sapiens
cggacctccacactgagccatgcccacccccgacgccaccacgccacaggccaagggcttccgcagggccgtgtctgagctggacgccaagcaggcagaggccatcatgggcgccccggggcccagcctcacaggctctccrtggcctggaactgcagccccagctgcatcctacacccccaccccaaggtccccgcggttcattgggcgcaggcagagcctcatcgaggacgcccgcaaggagcgggaggcggcggtggcagcagcggccgctgcagtcccctcrgagcccggggaccccctggaggcygtggcctttgaggagaaggaggggaaggccrtgctaaacctgctcttctccccgagggccaccaagccctcggcgctgtcccgagctgtgaaggtgtttgagacgtttgaagccaaaatccaccatctagagacccggcccgcccagaggccgcgagctgggggcccccacctggagtacttcgtgcgcctcgaggtgcgccgaggggacctggccgccctgctcagtggtgtgcgccaggtgtcagaggacgtgcgcagccccgcggggcccaaggtcccctggttcccaagaaaagtgtcagagctggacaagtgtcatcacctggtcaccaagttcgaccctgacctggacttggaccacccgggcttctcggaccaggtgtaccgccagcgcaggaagctgattgctgagatcgccttccagtacaggcacggcgacccgattccccgtgtggagtacaccgccgaggarattgccacctggaaggaggtctacaccacgctgaarggcctctacgccacgcacgcctgcggggagcacctggaggcctttgctttgctggagcgcttcagcggctaccgggaagacaatatcccccagctggaggacgtctcccgcttcctgaaggagcgcaygggcttccagctgcggcctgtggccggcctgctgtccgcccgggacttcctggccagcctggccttccrcgtgttccagtgcacccagtatatccgccacgcgtcctcgcccatgcactcccctgagccggactkctgccacgagctgctggggcacgtgcccatgctggccgaccgcaccttcgcgcagttctcgcaggacattggcctggcgtccctgggggcctcggatgaggaaattgagaagctgtccacgctgtactggttcacggtggagttcgggctgtgtaagcagaacggggaggtgaaggcctatggtgccgggctgctgtcctcctacggggagctcctgcactgcctgtctgaggagcctgagattcgggccttcgaccctgaggctgcggccgtgcagccctaccaagaccagacrtaccagtcagtctacttcgtgtctgagagcttcagtgacgccaaggacaagctcaggagctatgcctcacgcatccagcgccccttctccgtgaagttcgacccgtacaygctggccatcgacrtgctggacagcccccaggccgtgcggcgctccctggagggtgtccaggatgagctggacacccttgcccatgcgctgagtgccattggctaggtgcacggcgtccctgagggcccttcccaacctcccctggtcctgcactgtcccggagctcaggccctggtgaggggctgggtcccgggtgccccccatgccctccctgctgccaggctcccactgcccctgcacctgcttctcagcgcaacagctgtgtgtgcccgtggtgaggttgtgctgcctgtggtgaggtcctgtcctggctcccagggtcctgggggctgctgcactgccctccgcccttccctgacactgtctgctgccccaatcaccgtcacaataaaagaaactgtggtctctacac

SEQ ID NO: 160 - DNA, 1813 bp, Homo sapiens
atgcccacccccgacgccaccacgccacaggccaagggcttccgcagggccgtgtctgagctggacgccaagcaggcagaggccatcatggtaagagggcagtccccgcggttcattgggcgcaggcagagcctcatcgaggacgcccgcaaggagcgggaggcggcggtggcagcagcggccgctgcagtcccctcrgagcccggggaccccctggaggcygtggcctttgaggagaaggaggggaaggccrtgctaaacctgctcttctccccgagggccaccaagccctcggcgctgtcccgagctgtgaaggtgtttgagacgtttgaagccaaaatccaccatctagagacccggcccgcccagaggccgcgagctgggggcccccacctggagtacttcgtgcgcctcgaggtgcgccgaggggacctggccgccctgctcagtggtgtgcgccaggtgtcagaggacgtgcgcagccccgcggggcccaaggtcccctggttcccaagaaaagtgtcagagctggacaagtgtcatcacctggtcaccaagttcgaccctgacctggacttggaccacccgggcttctcggaccaggtgtaccgccagcgcaggaagctgattgctgagatcgccttccagtacaggcacggcgacccgattccccgtgtggagtacaccgccgaggarattgccacctggaaggaggtctacaccacgctgaarggcctctacgccacgcacgcctgcggggagcacctggaggcctttgctttgctggagcgcttcagcggctaccgggaagacaatatcccccagctggaggacgtctcccgcttcctgaaggagcgcaygggcttccagctgcggcctgtggccggcctgctgtccgcccgggacttcctggccagcctggccttccrcgtgttccagtgcacccagtatatccgccacgcgtcctcgcccatgcactcccctgagccggactkctgccacgagctgctggggcacgtgcccatgctggccgaccgcaccttcgcgcagttctcgcaggacattggcctggcgtccctgggggcctcggatgaggaaattgagaagctgtccacgctgtactggttcacggtggagttcgggctgtgtaagcagaacggggaggtgaaggcctatggtgccgggctgctgtcctcctacggggagctcctgcactgcctgtctgaggagcctgagattcgggccttcgaccctgaggctgcggccgtgcagccctaccaagaccagacrtaccagtcagtctacttcgtgtctgagagcttcagtgacgccaaggacaagctcaggagctatgcctcacgcatccagcgccccttctccgtgaagttcgacccgtacaygctggccatcgacrtgctggacagcccccaggccgtgcggcgctccctggagggtgtccaggatgagctggacacccttgcccatgcgctgagtgccattggctaggtgcacggcgtccctgagggcccttcccaacctcccctggtcctgcactgtcccggagctcaggccctggtgaggggctgggtcccgggtgccccccatgccctccctgctgccaggctcccactgcccctgcacctgcttctcagcgcaacagctgtgtgtgcccgtggtgaggttgtgctgcctgtggtgaggtcctgtcctggctcccagggtcctgggggctgctgcactgccctccgcccttccctgacactgtctgctgccccaatcaccgtcacaataaaagaaactgtggtctctacac

SEQ ID NO: 161 - DNA, 1894 bp, Homo sapiens
atgcccacccccgacgccaccacgccacaggccaagggcttccgcagggccgtgtctgagctggacgccaagcaggcagaggccatcatggtaagagggcagggcgccccggggcccagcctcacaggctctccrtggcctggaactgcagccccagctgcatcctacacccccaccccaaggtccccgcggttcattgggcgcaggcagagcctcatcgaggacgcccgcaaggagcgggaggcggcggtggcagcagcggccgctgcagtcccctcrgagcccggggaccccctggaggcygtggcctttgaggagaaggaggggaaggccrtgctaaacctgctcttctccccgagggccaccaagccctcggcgctgtcccgagctgtgaaggtgtttgagacgtttgaagccaaaatccaccatctagagacccggcccgcccagaggccgcgagctgggggcccccacctggagtacttcgtgcgcctcgaggtgcgccgaggggacctggccgccctgctcagtggtgtgcgccaggtgtcagaggacgtgcgcagccccgcggggcccaaggtcccctggttcccaagaaaagtgtcagagctggacaagtgtcatcacctggtcaccaagttcgaccctgacctggacttggaccacccgggcttctcggaccaggtgtaccgccagcgcaggaagctgattgctgagatcgccttccagtacaggcacggcgacccgattccccgtgtggagtacaccgccgaggarattgccacctggaaggaggtctacaccacgctgaarggcctctacgccacgcacgcctgcggggagcacctggaggcctttgctttgctggagcgcttcagcggctaccgggaagacaatatcccccagctggaggacgtctcccgcttcctgaaggagcgcaygggcttccagctgcggcctgtggccggcctgctgtccgcccgggacttcctggccagcctggccttccrcgtgttccagtgcacccagtatatccgccacgcgtcctcgcccatgcactcccctgagccggactkctgccacgagctgctggggcacgtgcccatgctggccgaccgcaccttcgcgcagttctcgcaggacattggcctggcgtccctgggggcctcggatgaggaaattgagaagctgtccacgctgtactggttcacggtggagttcgggctgtgtaagcagaacggggaggtgaaggcctatggtgccgggctgctgtcctcctacggggagctcctgcactgcctgtctgaggagcctgagattcgggccttcgaccctgaggctgcggccgtgcagccctaccaagaccagacrtaccagtcagtctacttcgtgtctgagagcttcagtgacgccaaggacaagctcaggagctatgcctcacgcatccagcgccccttctccgtgaagttcgacccgtacaygctggccatcgacrtgctggacagcccccaggccgtgcggcgctccctggagggtgtccaggatgagctggacacccttgcccatgcgctgagtgccattggctaggtgcacggcgtccctgagggcccttcccaacctcccctggtcctgcactgtcccggagctcaggccctggtgaggggctgggtcccgggtgccccccatgccctccctgctgccaggctcccactgcccctgcacctgcttctcagcgcaacagctgtgtgtgcccgtggtgaggttgtgctgcctgtggtgaggtcctgtcctggctcccagggtcctgggggctgctgcactgccctccgcccttccctgacactgtctgctgccccaatcaccgtcacaataaaagaaactgtggtctctacac

SEQ ID NO: 162 - DNA, 1722 bp, Homo sapiens
cgtgcgtgtctcgagtcgcacggagggcaaccgtcgmcgggcttagcgcctyaactgtcgttggtgtatttttctggtgtcacttctgtgccttccttcaaaggtggtgctttgtccctgtgggtcatctgtactgattgcgccaagcaaagcatttgttctccaaatgtcaactgtcaaggagcagctaattgagaagctaattgaggatgatgaaaactcccagtgtaaaattactattgttggaactggtgccgtaggcatggcttgtgctattagtatcttactgaaggatttggctgatgaacttgcccttgttgatgttgcattggacaaactgaagggagaaatgatggatcttcagcatggcagtcttttctttagtacttcaaagattacttctggaaaagattacagtgtatctgcaaactccagaatagttattgtcacagcaggtgcaaggcagcaggagggagaaactcgccttgccctggtccaacgtaatgtggctataatgaaatcaatcattcctgccatagtccattatagtcctgattgtaaaattcttgttgtttcaaatccagtggatattttgacatatatagtctggaagataagtggcttacctgtaactcgtgtaattggaagtggttgtaatctagactctgcccgtttccgttacctaattggagaaaagttgggtgtccaccccacaagctgccatggttggattattggagaacatggtgattctagtgtgcccttatggagtggggtgaatgttgctggtgttgctctgaagactctggaccctaaattaggaacggattcagataaggaacactggaaaaatatccataaacaagttattcaaagtgcctatgaaattatcaagctgaaggggtatacctcttgggctattggactgtctgtgatggatytggtaggatccattttgaaaaatcttaggagagtgcacccagtttccaccatggttaagggattatatggaataaaasaagaactctttctcagtatcccttgtgtcttggggcggaatggtgtctcagatgttgtgaaaattaacttgaattctgaggaggaggcccttttcaagaagagtgcagaaacactttggaatattcaaaaggatctaatattttaaattaaagccttctaatgttccactgtttggagaacagaagatagcaggctgtgtattttaaattttgaaagtattttcatttgatctttaaaaaataaaaacaaattggagacctgtgacataactctagtctctcaagattagaacgagcaaatggtaaagagattttcctctttaagaatcatttatagctctattctaatgatacccaatctgtacaggtgtaagttatacttctgaggtatgtcacatatgttagagtgccttcagatgtagtagaatatgtataatcactataatacagagctttgattcttttcacaaaccaagccctttttctagtattacaattttatcttgtactttcatccgttagagtaccagcatattcacttcattacattagcgtcatatgtttatgtataatcattataaatgtggccgggcactgcagcctgggtgamagagtgaggctctgtctcaaaaaaaatcattataaatgcttatttttaagaccatatatatcaaaaagaaataaaaagctgagtgctgtggct

SEQ ID NO: 163 - DNA, 1670 bp, Homo sapiens
aacgtgcgtgtctcgagtcgcacggagggcaaccgtcgmcgggcttagcgcctyaactgtcgttggtgtatttttctggtgtcacttctgtgccttccttcaaaggttctccaaatgtcaactgtcaaggagcagctaattgagaagctaattgaggatgatgaaaactcccagtgtaaaattactattgttggaactggtgccgtaggcatggcttgtgctattagtatcttactgaaggatttggctgatgaacttgcccttgttgatgttgcattggacaaactgaagggagaaatgatggatcttcagcatggcagtcttttctttagtacttcaaagattacttctggaaaagattacagtgtatctgcaaactccagaatagttattgtcacagcaggtgcaaggcagcaggagggagaaactcgccttgccctggtccaacgtaatgtggctataatgaaatcaatcattcctgccatagtccattatagtcctgattgtaaaattcttgttgtttcaaatccagtggatattttgacatatatagtctggaagataagtggcttacctgtaactcgtgtaattggaagtggttgtaatctagactctgcccgtttccgttacctaattggagaaaagttgggtgtccaccccacaagctgccatggttggattattggagaacatggtgattctagtgtgcccttatggagtggggtgaatgttgctggtgttgctctgaagactctggaccctaaattaggaacggattcagataaggaacactggaaaaatatccataaacaagttattcaaagtgcctatgaaattatcaagctgaaggggtatacctcttgggctattggactgtctgtgatggatytggtaggatccattttgaaaaatcttaggagagtgcacccagtttccaccatggttaagggattatatggaataaaasaagaactctttctcagtatcccttgtgtcttggggcggaatggtgtctcagatgttgtgaaaattaacttgaattctgaggaggaggcccttttcaagaagagtgcagaaacactttggaatattcaaaaggatctaatattttaaattaaagccttctaatgttccactgtttggagaacagaagatagcaggctgtgtattttaaattttgaaagtattttcatttgatctttaaaaaataaaaacaaattggagacctgtgacataactctagtctctcaagattagaacgagcaaatggtaaagagattttcctctttaagaatcatttatagctctattctaatgatacccaatctgtacaggtgtaagttatacttctgaggtatgtcacatatgttagagtgccttcagatgtagtagaatatgtataatcactataatacagagctttgattcttttcacaaaccaagccctttttctagtattacaattttatcttgtactttcatccgttagagtaccagcatattcacttcattacattagcgtcatatgtttatgtataatcattataaatgtggccgggcactgcagcctgggtgamagagtgaggctctgtctcaaaaaaaatcattataaatgcttatttttaagaccatatatatcaaaaagaaataaaaagctgagtgctgtggct

SEQ ID NO: 164 - DNA, 3854 bp, Homo sapiens
aaggttaagtagcatgcccgaggtcatacactgataaacatgaggccaatgattagatatgtctgacttcacattccacatatttccttacactgttttgcagtgtaaataggtggttaagaagataccaaagtagatctctggttcatcttctgagaagcagaactagaattctcctggctagcagttatccatctagtgcatatgtatctagagctggccaggcctttagtttacaaaataaatagaaagccttgtccccactctggaggagcttgctgccttgttagaaggtgagatatgttcgaatagaacatttggggaaaccatttgagacctggtataatgaagtgctaagattgtgggcaaggtggggaggaggtaggccttcctgactagtttaggctacaatagttgggaagactgcaagaagccagcaggcttcagtcatgccctaaaagagcgattggtttagaaaaaaaacaaaagggaactactaacatgtattctattctaggcaggtgtcaggcaaagttgtatcttattttggtctcactagwttcttgcaaagcttatctgcatatccaggttttataaaaggttaagaaactgaagctcctagaagtaaatgagcccttagttatcaaatattgtctgcattgtgcaacttcttttttagcccgtagtctttgttttcatactttagttttagagaattactccaaattcatcatgattgaagacaataaggagaacaaagaccattccttagaaaggggaagagcaagtctcattttttccttaaagaatgaagttggaggacttataaaagccctgaaaatctttcaggagaagcatgtgaatctgttacatatcgagtcccgaaaatcaaaaagaagaaactcagaatttgagatttttgttgactgtgacatcaacagagaacaattgaatgatatttttcatctgctgaagtctcataccaatgttctctctgtgaatctaccagataattttactttgaaggaagatggtatggaaactgttccttggtttccaaagaagatttctgacctggaccattgtgccaacagagttctgatgtatggatctgaactagatgcagaccatcctggcttcaaagacaatgtctaccgtaaacgtcgaaagtattttgcggacttggctatgaactataaacatggagaccccattccaaaggttgaattcactgaagaggagattaagacctggggaaccgtattccaagagctcaacaaactctacccaacccatgcttgcagagagtatctcaaaaacttacctttgctttctaaatattgtggatatcgggaggataatatcccacaattggaagatgtctccaactttttaaaagagcgtacaggtttttccatccgtcctgtggctggttacttatcaccaagagatttyttatcaggtttagcctttcgagtttttcactgcactcaatatgtgagacacagttcagatcccttytataccccagagccagatacctgccatgaactcttaggtcatgtcccgcttttggctgaacctagttttgcccaattctcccaagaaattggcttggcttctcttggcgcttcagaggaggctgttcaaaaactggcaacgtgctactttttcactgtggagtttggtctatgtaaacaagatggacagctaagagtctttggtgctggcttactttcttctatcagtgaactcaaacatgcactttctggacatgccaaagtaaagccctttgatcccaagattacctgcaaacaggaatgtcttatcacaacttttcaagatgtctactttgtatctgaaagttttgaagatgcaaaggagaagatgagagaatttaccaaaacaattaagcgtccatttggagtgaagtataatccatatacacggagtattcagatcctgaaagacaccaagagcataaccagtgccatgaatgagctgcagcatgatctcgatgttgtcagtgatgcccttgctaaggtcagcaggaagccgagtatctaacagtagccagtcatccaggaacatttgagcatcaattcggaggtctgggccatctcttgctttccttgaacacctgatcctggagggacagcatcttctggccaaacaatattatcgaattccactacttaaggaatcactagtctttgaaaatttgtacctggatattctatttaccacttatttttttgtttagttttatttctttttttttttggtagcagctttaatgagacaatttatataccatacaagccactgaccacccatttttaatagagaagttgtttgacccaatagatagatctaatctcagcctaactctattttccccaatcctccttgagtaaaatgaccctttaggatcgcttagaataacttgaggagtattatggcgctgactcatattgttacctaagatccccttatttctaaagtatctgttacttattgctgaatttgtgccaagctcaatcacattcacactaaaatttaacaggagaccctgctgtctttgttgctagcatgagcaaaagtatagaggcctttgcacatggaggatacctagtaaagagcaagtagtctagtttcaagtgtagtatcttgtagggaaatgggagtagctaagcctggaaaggttgaatggggcataatcattaagactaggctaaaaattcgagactttattttttaggcattagggagccccttcccaagtgactatcttccttgaaactttgttttytttcaatgacatcacacgatactggttttattctggactatctatcctactcatgggtccaagggaaacttagtagagatgcgacttgcatggggctgtactcagacatgtggtcctaggtattataatgggattgtccccagattaacaggaagcattgttatcaaaggaagagttcaaactgagatagataagagaagcacaaagtaaaagatagaaaaaacagtgctgagtactttatttctaaggtataaggtgaggccataaacagaaaggtatgcaatgagagtagaggctgcagaaaaggggaggaaatagaatgtcagaaaggtcaagaagagtggtttaggactgagactgtaagtaatgtaaggattgccaaggaatggtttttatgcagagtcagctgtgtagcacagggagtaagcagtcctgttataaatgggtgaagctgaactccaaaatacaaacttatgtctctttaatttgcccctttcctccctctagtcactaaatgaagatgttcttcaagtttctgtctttgcacttctactctttttgccatctcttcatggggaatgtcacccagatacatgacttcagttcttattttgaatgactcctctatttgcagttataaccctgacatctttcttgaatttttttgccccttaattccaacgaactcctggatgtctatgtagatgtctcataatttaggccaatgctgtacaacttcatgtggcatcatccacatagaatgaataggggttgttcaatatgacagccctgccaagcatctcaaattgaacaggtctataaaggaactcagaatcacttgaatatcacagtccatcagcttcctttcccagtaatttaatttccattaatggtatattaaacatcgtattttcaatcatttttaggtttagtcagctacttaaaaataggctttttcttcacataaataaattgtataccatttaatgtgttttatttcaacagactaatagatcttttaacacttcttagtcctcaaaat

SEQ ID NO: 165 - DNA, 3799 bp, Homo sapiens
aaggttaagtagcatgcccgaggtcatacactgataaacatgaggccaatgattagatatgtctgacttcacattccacatatttccttacactgttttgcagtgtaaataggtggttaagaagataccaaagtagatctctggttcatcttctgagaagcagaactagaattctcctggctagcagttatccatctagtgcatatgtatctagagctggccaggcctttagtttacaaaataaatagaaagccttgtccccactctggaggagcttgctgccttgttagaaggtgagatatgttcgaatagaacatttggggaaaccatttgagacctggtataatgaagtgctaagattgtgggcaaggtggggaggaggtaggccttcctgactagtttaggctacaatagttgggaagactgcaagaagccagcaggcttcagtcatgccctaaaagagcgattggtttagaaaaaaaacaaaagggaactactaacatgtattctattctaggcaggtgtcaggcaaagttgtatcttattttggtctcactagwttcttgcaaagcttatctgcatatccaggttttataaaaggttaagaaactgaagctcctagaagtaaatgagcccttagttatcaaatattgtctgcattgtgcaacttcttttttagcccgtagtctttgttttcatactttagttttagagaattactccaaattcatcatgattgaagacaataaggagaacaaagaccattccttagaaaggggaagagcaagtctcattttttccttaaagaatgaagttggaggacttataaaagccctgaaaatctttcaggagaagcatgtgaatctgttacatatcgagtcccgaaaatcaaaaagaagaaactcagaatttgagatttttgttgactgtgacatcaacagagaacaattgaatgatatttttcatctgctgaagtctcataccaatgttctctctgtgaatctaccagataattttactttgaaggaagatggtatggaaactgttccttggtttccaaagaagatttctgacctggaccattgtgccaacagagttctgatgtatggatctgaactagatgcagaccatcctggcttcaaagacaatgtctaccgtaaacgtcgaaagtattttgcggacttggctatgaactataaacatggagaccccattccaaaggttgaattcactgaagaggagattaagacctggggaaccgtattccaagagctcaacaaactctacccaacccatgcttgcagagagtatctcaaaaacttacctttgctttctaaatattgtggatatcgggaggataatatcccacaattggaagatgtctccaactttttaaaagagcgtacaggtttttccatccgtcctgtggctggttacttatcaccaagagatttyttatcaggtttagcctttcgagtttttcactgcactcaatatgtgagacacagttcagatcccttytataccccagagccagatacctgccatgaactcttaggtcatgtcccgcttttggctgaacctagttttgcccaattctcccaagaaattggcttggcttctcttggcgcttcagaggaggctgttcaaaaactggcaacgtgctactttttcactgtggagtttggtctatgtaaacaagatggacagctaagagtctttggtgctggcttactttcttctatcagtgaactcaaacatgcactttctggacatgccaaagtaaagccctttgatcccaagattacctgcaaacaggaatgtcttatcacaacttttcaagatgtctactttgtatctgaaagttttgaagatgcaaaggagaagatgagagaatttaccaaaacaattaagcgtccatttggagtgaagtataatccatatacacggagtattcagatcctgaaagacaccaagagcataaccagtgccatgaatgagctgcagcatgatctcgatgttgtcagtgatgcccttgctaaggtcagcaggaagccgagtatctaacagtagccagtcatccaggaacatttgagcatcaattcggaggtctgggccatctcttgctttccttgaacacctgatcctggagggacagcatcttctggccaaacaatattatcgaattccactacttaaggaatcactagtctttgaaaatttgtacctggatattctatttaccacttatttttttgtttagttttatttctttttttttttggtagcagctttaatgagacaatttatataccatacaagccactgaccacccatttttaatagagaagttgtttgacccaatagatagatctaatctcagcctaactctattttccccaatcctccttgagtaaaatgaccctttaggatcgcttagaataacttgaggagtattatggcgctgactcatattgttacctaagatccccttatttctaaagtatctgttacttattgctgaatttgtgccaagctcaatcacattcacactaaaatttaacaggagaccctgctgtctttgttgctagcatgagcaaaagtatagaggcctttgcacatggaggatacctagtaaagagcaagtagtctagtttcaagtgtagtatcttgtagggaaatgggagtagctaagcctggaaaggttgaatggggcataatcattaagactaggctaaaaattcgagactttattttttaggcattagggagccccttcccaagtgactatcttccttgaaactttgttttytttcaatgacatcacacgatactggttttattctggactatctatcctactcatgggtccaagggaaacttagtagagatgcgacttgcatggggctgtactcagacatgtggtcctaggtattataatgggattgtccccagattaacaggaagcattgttatcaaaggaagagttcaaactgagatagataagagaagcacaaagtaaaagataaaaggtatgcaatgagagtagaggctgcagaaaaggggaggaaatagaatgtcagaaaggtcaagaagagtggtttaggactgagactgtaagtaatgtaaggattgccaaggaatggtttttatgcagagtcagctgtgtagcacagggagtaagcagtcctgttataaatgggtgaagctgaactccaaaatacaaacttatgtctctttaatttgcccctttcctccctctagtcactaaatgaagatgttcttcaagtttctgtctttgcacttctactctttttgccatctcttcatggggaatgtcacccagatacatgacttcagttcttattttgaatgactcctctatttgcagttataaccctgacatctttcttgaatttttttgccccttaattccaacgaactcctggatgtctatgtagatgtctcataatttaggccaatgctgtacaacttcatgtggcatcatccacatagaatgaataggggttgttcaatatgacagccctgccaagcatctcaaattgaacaggtctataaaggaactcagaatcacttgaatatcacagtccatcagcttcctttcccagtaatttaatttccattaatggtatattaaacatcgtattttcaatcatttttaggtttagtcagctacttaaaaataggctttttcttcacataaataaattgtataccatttaatgtgttttatttcaacagactaatagatcttttaacacttcttagtcctcaaaat

SEQ ID NO: 166 - DNA, 3081 bp, Homo sapiens
ggggtgccaaacccacccggcggctgcgccagcgactctgcagctgaagcgcatttggtgaggcggtcgggcgagggagcgcgcacggagcgcgggacggagcgccaggcggacggaccgaaggacggaggcaccgaaggacggacgcccccgcacacgcagacgcacagagctcggcgcggcccccgtcgcatacacactggcacagacacaagcagggacacacgcagacacacgcacactcgcgcgcgcatcctcccgccagcctgcccgcctgctcgccggcgcccggagcccgctctggccgcttgctttttgctgagaaagcttcctgccctggaagatggcacccttccccatccagacaccttgggaatgaattatgagggagccaggagtgagagagagaaccacgctgctgatgactccgagggaggggccctggacatgtgctgcagtgagaggctaccgggtctcccccagccgatagtgatggaggcactggacgaggctgaagggctccaggactcacagagagagatgccgccaccccctcctccctcgccgccctcagatccagctcagaagccaccacctcgaggcgctgggagccactccctcactgtcaggagcagcctgtgcctgttcgctgcctcacagttcctgcttgcctgtggggtgctctggttcagcggttatggccacatctggtcacagaacgccacaaacctcgtctcctctttgctgacgctcctgaaacagctggaacccacggcctggcttgactctgggacgtggggagtccccagtctgctgctggtctttctgtccgtgggcctggtcctcgttaccaccctggtgtggcacctcctgaggacacccscagagccacccaccccactgccccctgaggacaggcgccagtcagtgagccgccagccctccttcacctactcagagtggatggaggagaagatcgaggatgacttcctggacctcgacccggtgcccgagactcctgtgtttgattgtgtgatggacatcaagcctgaggctgaccccacctcactcaccgtcaagtccatgggtctgcaggagaggaggggttccaatgtctccctgaccctggacatgtgcactccgggctgcaacgaggagggctttggctatctcatgtccccacgtgaggagtccgcccgcgagtacctgctcagcgcctcccgtgtcctccaagcagaagagcttcatgaaaaggccctggaccctttcctgctgcaggcggaattctttgaaatccccatgaactttgtggatccgaaagagtacgacatccctgggctggtgcggaagaaccggtacaaaaccatacttcccaaccctcacagcagagtgtgtctgacctcaccagaccctgacgaccctctgagttcctacatcaatgccaactacatccggggctatggtggrgaggagaaggtgtacatcgccactcagggacccatcgtcagcacggtcgccgacttctggcgcatggtgtggcaggagcacacgcccatcattgtcatgatcaccaacatcgaggagatgaacgagaaatgcaccgagtattggccggaggagcaggtggcgtacgacggtgttgagatcactgtgcagaaagtcattcacacggaggattaccggctgcgactcatctccctcaagagtgggactgaggagcgaggcctgaagcattactggttcacatcctggcccgaccagaagaccccagaccgggcccccccactcctgcacctggtgcgggaggtggaggaggcagcccagcaggaggggccccactgtgcccccatcatcgtccactgcagtgcagggattgggaggaccggctgcttcattgccaccagcatctgctgccagcagctgcggcaggagggtgtrgtggacatcctgaagaccacgtgccagctccgtcaggacaggggcggcatgatccagacatgcgagcagtaccagtttgtgcaccacgtcatgagcctctacgaaaagcagctgtcccaccagtccccagaatgactgcgcttctcctacaaggttctctgggcactgcccagcctgagtctcggccctcacccagggccctgcctcgggtcctgggcctgctccccgcttcctccccttcagtcagctccctctgtcctctgtcagcctggcctgacccctaccctccagcattgctcttcctactgtacatattggggagtggggggcagggtcgggaagggacatgccaggccaggcctggggccccggggcctgacccacaccacgcagaccccgggctccagtttttaacgatggttccatcaatacctgatccagaatgtttccstgctacactttgtgtcctgctgcaatgtgttctgtctgtccatccatctctgccctctgtaccggacactgtgtctcctcagccaggaaggggtaatgagctccagcccctaagcaaccggacttgcctgcctcggcctcacccgcacttctcccaaaaggcagatgacggggagttaggcatggggagctccagaaggtcaccagagagctttcagctgagggagagttctctaggttggagtgggcatcacagccagggtggcctctgggtgtcagatgctctcaggagggtgcccagcctgtgaggcactggcaaggtagggggcagatggggcatggagaacccagaggatctaggccctgttggggaggggaggggagctcaaggtttgggtggggactcagcccagatctacgtgagacatttttctgtgtcactgtgggaaagccttcccagaagtctcactgcgtgttgctctgcgtgtgttcccatgtccatgcgtgtgttgagagcccatcaggagggcatgcatgactctttggcaacatgtattatcttggagccacgtgtttttattgctgactttaaatatttatcccacggcagacagagacatttggtgtctttttataattcgctcgtggtcattgaatagagcaataaacggagcattttgagcaaaactaacc

SEQ ID NO: 167 - DNA, 2920 bp, Homo sapiens
ggggtgccaaacccacccggcggctgcgccagcgactctgcagctgaagcgcatttggtgaggcggtcgggcgagggagcgcgcacggagcgcgggacggagcgccaggcggacggaccgaaggacggaggcaccgaaggacggacgcccccgcacacgcagacgcacagagctcggcgcggcccccgtcgcatacacactggcacagacacaagcagggacacacgcagacacacgcacactcgcgcgcgcatcctcccgccagcctgcccgcctgctcgccggcgcccggagcccgctctggccgcttgctttttgctgagaaagcttcctgccctggaagatggcacccttccccatccagacaccttgggaatgaattatgagggagccaggagtgagagagagaaccacgctgctgatgactccgagggaggggccctggacatgtgctgcagtgagaggctaccgggtctcccccagccgatagtgatggaggcactggacgaggctgaagggctccaggactcacagagagagatgccgccaccccctcctccctcgccgccctcagatccagctcagaagccaccacctcgaggcgctgggagccactccctcactgtcaggagcagcctgtgcctgttcgctgcctcacagttcctgcttgcctgtggggtgctctggttcagcggttatggccacatctggtcacagaacgccacaaacctcgtctcctctttgctgacgctcctgaaacagctggaacccacggcctggcttgactctgggacgtggggagtccccagtctgctgctggtctttctgtccgtgggcctggtcctcgttaccaccctggtgtggcacctcctgaggacacccscagagccacccaccccactgccccctgaggacaggcgccagtcagtgagccgccagccctccttcacctactcagagtggatggaggagaagatcgaggatgacttcctggacctcgacccggtgcccgagactcctgtgtttgattgtgtgatggacatcaagcctgaggctgaccccacctcactcaccgtcaagtccatgggtctgcaggagaggaggggttccaatgtctccctgaccctggacatgtgcactccgggctgcaacgaggagggctttggctatctcatgtccccacgtgaggagtccgcccgcgagtacctgctcagcgcctcccgtgtcctccaagcagaagagcttcatgaaaaggccctggaccctttcctgctgcaggcggaattctttgaaatccccatgaactttgtggatccgaaagagtacgacatccctgggctggtgcggaagaaccggtacaaaaccatacttcccaaccctcacagcagagtgtgtctgacctcaccagaccctgacgaccctctgagttcctacatcaatgccaactacatccggggctatggtggrgaggagaaggtgtacatcgccactcagggacccatcgtcagcacggtcgccgacttctggcgcatggtgtggcaggagcacacgcccatcattgtcatgatcaccaacatcgaggagatgaacgagaaatgcaccgagtattggccggaggagcaggtggcgtacgacggtgttgagatcactgtgcagaaagtcattcacacggaggattaccggctgcgactcatctccctcaagtgcagggattgggaggaccggctgcttcattgccaccagcatctgctgccagcagctgcggcaggagggtgtrgtggacatcctgaagaccacgtgccagctccgtcaggacaggggcggcatgatccagacatgcgagcagtaccagtttgtgcaccacgtcatgagcctctacgaaaagcagctgtcccaccagtccccagaatgactgcgcttctcctacaaggttctctgggcactgcccagcctgagtctcggccctcacccagggccctgcctcgggtcctgggcctgctccccgcttcctccccttcagtcagctccctctgtcctctgtcagcctggcctgacccctaccctccagcattgctcttcctactgtacatattggggagtggggggcagggtcgggaagggacatgccaggccaggcctggggccccggggcctgacccacaccacgcagaccccgggctccagtttttaacgatggttccatcaatacctgatccagaatgtttccstgctacactttgtgtcctgctgcaatgtgttctgtctgtccatccatctctgccctctgtaccggacactgtgtctcctcagccaggaaggggtaatgagctccagcccctaagcaaccggacttgcctgcctcggcctcacccgcacttctcccaaaaggcagatgacggggagttaggcatggggagctccagaaggtcaccagagagctttcagctgagggagagttctctaggttggagtgggcatcacagccagggtggcctctgggtgtcagatgctctcaggagggtgcccagcctgtgaggcactggcaaggtagggggcagatggggcatggagaacccagaggatctaggccctgttggggaggggaggggagctcaaggtttgggtggggactcagcccagatctacgtgagacatttttctgtgtcactgtgggaaagccttcccagaagtctcactgcgtgttgctctgcgtgtgttcccatgtccatgcgtgtgttgagagcccatcaggagggcatgcatgactctttggcaacatgtattatcttggagccacgtgtttttattgctgactttaaatatttatcccacggcagacagagacatttggtgtctttttataattcgctcgtggtcattgaatagagcaataaacggagcattttgagcaaaactaacc

SEQ ID NO: 168 - DNA, 3172 bp, Homo sapiens
ggggtgccaaacccacccggcggctgcgccagcgactctgcagctgaagcgcatttggtgaggcggtcgggcgagggagcgcgcacggagcgcgggacggagcgccaggcggacggaccgaaggacggaggcaccgaaggacggacgcccccgcacacgcagacgcacagagctcggcgcggcccccgtcgcatacacactggcacagacacaagcagggacacacgcagacacacgcacactcgcgcgcgcatcctcccgccagcctgcccgcctgctcgccggcgcccggagcccgctctggccgctggatgatctgaagctgccctctctccttcatttatatcaccagcttgctttttgctgagaaagcttcctgccctggaagatggcacccttccccatccagacaccttgggaatgaattatgagggagccaggagtgagagagagaaccacgctgctgatgactccgagggaggggccctggacatgtgctgcagtgagaggctaccgggtctcccccagccgatagtgatggaggcactggacgaggctgaagggctccaggactcacagagagagatgccgccaccccctcctccctcgccgccctcagatccagctcagaagccaccacctcgaggcgctgggagccactccctcactgtcaggagcagcctgtgcctgttcgctgcctcacagttcctgcttgcctgtggggtgctctggttcagcggttatggccacatctggtcacagaacgccacaaacctcgtctcctctttgctgacgctcctgaaacagctggaacccacggcctggcttgactctgggacgtggggagtccccagtctgctgctggtctttctgtccgtgggcctggtcctcgttaccaccctggtgtggcacctcctgaggacacccscagagccacccaccccactgccccctgaggacaggcgccagtcagtgagccgccagccctccttcacctactcagagtggatggaggagaagatcgaggatgacttcctggacctcgacccggtgcccgagactcctgtgtttgattgtgtgatggacatcaagcctgaggctgaccccacctcactcaccgtcaagtccatgggtctgcaggagaggaggggttccaatgtctccctgaccctggacatgtgcactccgggctgcaacgaggagggctttggctatctcatgtccccacgtgaggagtccgcccgcgagtacctgctcagcgcctcccgtgtcctccaagcagaagagcttcatgaaaaggccctggaccctttcctgctgcaggcggaattctttgaaatccccatgaactttgtggatccgaaagagtacgacatccctgggctggtgcggaagaaccggtacaaaaccatacttcccaaccctcacagcagagtgtgtctgacctcaccagaccctgacgaccctctgagttcctacatcaatgccaactacatccggggctatggtggrgaggagaaggtgtacatcgccactcagggacccatcgtcagcacggtcgccgacttctggcgcatggtgtggcaggagcacacgcccatcattgtcatgatcaccaacatcgaggagatgaacgagaaatgcaccgagtattggccggaggagcaggtggcgtacgacggtgttgagatcactgtgcagaaagtcattcacacggaggattaccggctgcgactcatctccctcaagagtgggactgaggagcgaggcctgaagcattactggttcacatcctggcccgaccagaagaccccagaccgggcccccccactcctgcacctggtgcgggaggtggaggaggcagcccagcaggaggggccccactgtgcccccatcatcgtccactgcagtgcagggattgggaggaccggctgcttcattgccaccagcatctgctgccagcagctgcggcaggagggtgtrgtggacatcctgaagaccacgtgccagctccgtcaggacagcccatccctccacgaccctgcccccactgtgcatctctgccgkgcaggggcggcatgatccagacatgcgagcagtaccagtttgtgcaccacgtcatgagcctctacgaaaagcagctgtcccaccagtccccagaatgactgcgcttctcctacaaggttctctgggcactgcccagcctgagtctcggccctcacccagggccctgcctcgggtcctgggcctgctccccgcttcctccccttcagtcagctccctctgtcctctgtcagcctggcctgacccctaccctccagcattgctcttcctactgtacatattggggagtggggggcagggtcgggaagggacatgccaggccaggcctggggccccggggcctgacccacaccacgcagaccccgggctccagtttttaacgatggttccatcaatacctgatccagaatgtttccstgctacactttgtgtcctgctgcaatgtgttctgtctgtccatccatctctgccctctgtaccggacactgtgtctcctcagccaggaaggggtaatgagctccagcccctaagcaaccggacttgcctgcctcggcctcacccgcacttctcccaaaaggcagatgacggggagttaggcatggggagctccagaaggtcaccagagagctttcagctgagggagagttctctaggttggagtgggcatcacagccagggtggcctctgggtgtcagatgctctcaggagggtgcccagcctgtgaggcactggcaaggtagggggcagatggggcatggagaacccagaggatctaggccctgttggggaggggaggggagctcaaggtttgggtggggactcagcccagatctacgtgagacatttttctgtgtcactgtgggaaagccttcccagaagtctcactgcgtgttgctctgcgtgtgttcccatgtccatgcgtgtgttgagagcccatcaggagggcatgcatgactctttggcaacatgtattatcttggagccacgtgtttttattgctgactttaaatatttatcccacggcagacagagacatttggtgtctttttataattcgctcgtggtcattgaatagagcaataaacggagcattttgagcaaaactaac

SEQ ID NO: 169 - DNA, 1524 bp, Homo sapiens
atgtggcctagatggaagggtgaaggggtcccactctcagtgttcttcctgtgttcttcctccttccatctcatctctatctctgggctggtttgtgagctgaaagagttcacacatacctggggtgggcctctgtctcctcgacagagtgggactgaggagcgaggcctgaagcattactggttcacatcctggcccgaccagaagaccccagaccgggcccccccactcctgcacctggtgcgggaggtggaggaggcagcccagcaggaggggccccactgtgcccccatcatcgtccactgcagtgcagggattgggaggaccggctgcttcattgccaccagcatctgctgccagcagctgcggcaggagggtgtrgtggacatcctgaagaccacgtgccagctccgtcaggacaggggcggcatgatccagacatgcgagcagtaccagtttgtgcaccacgtcatgagcctctacgaaaagcagctgtcccaccagtccccagaatgactgcgcttctcctacaaggttctctgggcactgcccagcctgagtctcggccctcacccagggccctgcctcgggtcctgggcctgctccccgcttcctccccttcagtcagctccctctgtcctctgtcagcctggcctgacccctaccctccagcattgctcttcctactgtacatattggggagtggggggcagggtcgggaagggacatgccaggccaggcctggggccccggggcctgacccacaccacgcagaccccgggctccagtttttaacgatggttccatcaatacctgatccagaatgtttccstgctacactttgtgtcctgctgcaatgtgttctgtctgtccatccatctctgccctctgtaccggacactgtgtctcctcagccaggaaggggtaatgagctccagcccctaagcaaccggacttgcctgcctcggcctcacccgcacttctcccaaaaggcagatgacggggagttaggcatggggagctccagaaggtcaccagagagctttcagctgagggagagttctctaggttggagtgggcatcacagccagggtggcctctgggtgtcagatgctctcaggagggtgcccagcctgtgaggcactggcaaggtagggggcagatggggcatggagaacccagaggatctaggccctgttggggaggggaggggagctcaaggtttgggtggggactcagcccagatctacgtgagacatttttctgtgtcactgtgggaaagccttcccagaagtctcactgcgtgttgctctgcgtgtgttcccatgtccatgcgtgtgttgagagcccatcaggagggcatgcatgactctttggcaacatgtattatcttggagccacgtgtttttattgctgactttaaatatttatcccacggcagacagagacatttggtgtctttttataattcgctcgtggtcattgaatagagcaataaacggagcattttgagcaaaactaacc

SEQ ID NO: 170 - DNA, 2993 bp, Homo sapiens
ggggtgccaaacccacccggcggctgcgccagcgactctgcagctgaagcgcatttggtgaggcggtcgggcgagggagcgcgcacggagcgcgggacggagcgccaggcggacggaccgaaggacggaggcaccgaaggacggacgcccccgcacacgcagacgcacagagctcggcgcggcccccgtcgcatacacactggcacagacacaagcagggacacacgcagacacacgcacactcgcgcgcgcatcctcccgccagcctgcccgcctgctcgccggcgcccggagcccgctctggccggagtgagagagagaaccacgctgctgatgactccgagggaggggccctggacatgtgctgcagtgagaggctaccgggtctcccccagccgatagtgatggaggcactggacgaggctgaagggctccaggactcacagagagagatgccgccaccccctcctccctcgccgccctcagatccagctcagaagccaccacctcgaggcgctgggagccactccctcactgtcaggagcagcctgtgcctgttcgctgcctcacagttcctgcttgcctgtggggtgctctggttcagcggttatggccacatctggtcacagaacgccacaaacctcgtctcctctttgctgacgctcctgaaacagctggaacccacggcctggcttgactctgggacgtggggagtccccagtctgctgctggtctttctgtccgtgggcctggtcctcgttaccaccctggtgtggcacctcctgaggacacccscagagccacccaccccactgccccctgaggacaggcgccagtcagtgagccgccagccctccttcacctactcagagtggatggaggagaagatcgaggatgacttcctggacctcgacccggtgcccgagactcctgtgtttgattgtgtgatggacatcaagcctgaggctgaccccacctcactcaccgtcaagtccatgggtctgcaggagaggaggggttccaatgtctccctgaccctggacatgtgcactccgggctgcaacgaggagggctttggctatctcatgtccccacgtgaggagtccgcccgcgagtacctgctcagcgcctcccgtgtcctccaagcagaagagcttcatgaaaaggccctggaccctttcctgctgcaggcggaattctttgaaatccccatgaactttgtggatccgaaagagtacgacatccctgggctggtgcggaagaaccggtacaaaaccatacttcccaaccctcacagcagagtgtgtctgacctcaccagaccctgacgaccctctgagttcctacatcaatgccaactacatccggggctatggtggrgaggagaaggtgtacatcgccactcagggacccatcgtcagcacggtcgccgacttctggcgcatggtgtggcaggagcacacgcccatcattgtcatgatcaccaacatcgaggagatgaacgagaaatgcaccgagtattggccggaggagcaggtggcgtacgacggtgttgagatcactgtgcagaaagtcattcacacggaggattaccggctgcgactcatctccctcaagagtgggactgaggagcgaggcctgaagcattactggttcacatcctggcccgaccagaagaccccagaccgggcccccccactcctgcacctggtgcgggaggtggaggaggcagcccagcaggaggggccccactgtgcccccatcatcgtccactgcagtgcagggattgggaggaccggctgcttcattgccaccagcatctgctgccagcagctgcggcaggagggtgtrgtggacatcctgaagaccacgtgccagctccgtcaggacaggggcggcatgatccagacatgcgagcagtaccagtttgtgcaccacgtcatgagcctctacgaaaagcagctgtcccaccagtccccagaatgactgcgcttctcctacaaggttctctgggcactgcccagcctgagtctcggccctcacccagggccctgcctcgggtcctgggcctgctccccgcttcctccccttcagtcagctccctctgtcctctgtcagcctggcctgacccctaccctccagcattgctcttcctactgtacatattggggagtggggggcagggtcgggaagggacatgccaggccaggcctggggccccggggcctgacccacaccacgcagaccccgggctccagtttttaacgatggttccatcaatacctgatccagaatgtttccstgctacactttgtgtcctgctgcaatgtgttctgtctgtccatccatctctgccctctgtaccggacactgtgtctcctcagccaggaaggggtaatgagctccagcccctaagcaaccggacttgcctgcctcggcctcacccgcacttctcccaaaaggcagatgacggggagttaggcatggggagctccagaaggtcaccagagagctttcagctgagggagagttctctaggttggagtgggcatcacagccagggtggcctctgggtgtcagatgctctcaggagggtgcccagcctgtgaggcactggcaaggtagggggcagatggggcatggagaacccagaggatctaggccctgttggggaggggaggggagctcaaggtttgggtggggactcagcccagatctacgtgagacatttttctgtgtcactgtgggaaagccttcccagaagtctcactgcgtgttgctctgcgtgtgttcccatgtccatgcgtgtgttgagagcccatcaggagggcatgcatgactctttggcaacatgtattatcttggagccacgtgtttttattgctgactttaaatatttatcccacggcagacagagacatttggtgtctttttataattcgctcgtggtcattgaatagagcaataaacggagcattttgagcaaaactaacc

SEQ ID NO: 171 - DNA, 3675 bp, Homo sapiens
agcgagaggggcatgtagaccccgcctcgtagggaggtggggagcggcaagccccgcctcagcccctctggcaggctcccgccagcgtcgctgcggctccggcccgggagcgagcgcccggagctcggaargatgcggcgcccgcggcggcctgggggtctcgggggatccgggggtctccggctgctcctctgcctcctgctgctgagcagccgcccggggggctgcagcgccgttagtgcccacggctgtctatttgaccgcaggctctgctctcacctggaagtctgtattcaggatggcttgtttgggcagtgccaggtgggagtggggcaggcccggccycttttgcaagtcacctccccagttctccaacgcttacaaggtgtgctccgacaactcatgtcccaaggattgtcctggcacgatgacctcacccagtatgtgatctctcaggagatggagcgcatccccaggcttcgccccccagagccccgtccaagggacaggtctggcttggcacccaagagacctggtcctgctggagagctgcttttacaggacatccccactggctccgcccctgctgcccagcatcggcttccacaaccaccagtgggcaaaggtggagctggggccagctcctctctgtcccctctgcaggctgagctgctcccgcctctcttggagcacctgctgctgcccccacagcctccccacccttcactgagttacgaacctgccttgctgcagccctacctgttccaccagtttggctcccgtgatggctccagggtctcagagggctccccagggatggtcagtgtcggccccctgcccaaggctgaagcccctgccctcttcagcagaactgcctccaagggcatatttggggaccaccctggccactcctacggggaccttccagggccttcacctgcccagctttttcaagactctgggctgctctatctggcccaggagttgccagcacccagcagggccagggtgccaaggctgccagagcaagggagcagcagccgggcagaggactccccagagggctatgagaaggaaggactaggggatcgtggagagaagcctgcttccccagctgtgcagccagatgcggctctgcagaggctggccgctgtgctggcgggctatggggtagagctgcgtcagctgacccctgagcagctctccacactcctgaccctgctgcagctactgcccaagggtgcaggaagaaatccgggaggggttgtaaatgttggagctgatatcaagaaaacaatggaggggccggtggagggcagagacacagcagagcttccagcccgcacatcccccatgcctggacaccccactgccagccctacctccagkgaagtccagcaggtgccaagccctgtctcctctgagcctcccaaagctgccagaccccctgtgacacctgtcctgctagagaagaaaagcccactgggccagagccagcccacggtggcaggacagccctcagcccgcccagcagcagaggaatatggctacatcgtcactgatcagaagcccctgagcctggctgcaggagtgaagctgctggagatcctggctgagcatgtgcacatgtcctcaggcagcttcatcaacatcagtgtggtgggaccagccctcaccttccgcatccggcacaatgagcagaacctgtctttggctgatgtgacccaacaagcagggctggtgaagtctgaactggaagcacagacagggctccaaatcttgcagacaggagtgggacagagggaggaggcagctgcagtccttccccaaactgcgcacagcacctcacccatgcgctyagtgctgctcactctggtggccctggcaggtgtggctgggctgctggtggctctggctgtggctctgtgtgtgcggcagcatgcgcggcagcaagacaaggagcgcctggcagccctggggcctgagggggcccatggtgacactacctttgagtaccaggacctgtgccgccagcacatggccacgaagtccttgttcaaccgggcagagggtccaccggagccttcacgggtgagcagtgtgtcctcccagttcagcgaygcagcccaggccagccccagctcccacagcagcaccccstcctggtgcgaggagccggcccaagccaacatggacatctccacgggacacatgattctggcatacatggaggatcacctgcggaaccgggaccgccttgccaaggagtggcaggccctctgtgcctaccaagcagagccaaacacctgtgccaccgcgcagggggagggcaacatcaaaaagaaccggcatcctgacttcctgccctatgaccatgcccgcataaaactgaaggtggagagcagcccttctcggagcgattacatcaacgccagccccattattgagcatgaccctcggatgccagcctacatagccacgcagggcccgctgtcccataccatcgcagacttctggcagatggtgtgggagagcggctgcaccgtcatcgtcatgctgaccccgctggtggaggatggtgtcaagcagtgtgaccgctactggccagatgagggtgcctccctctaccacgtatatgaggtgaacctggtgtcggagcacatctggtgcgaggactttctggtgcggagcttctacctgaagaacgtgcagacccaggagacgcgcacgctcacgcagttccacttcctcagctggccggcagagggcacaccggcctccacgcggcccctgctggacttccgcaggaaggtgaacaagtgctaccggggccgctcctgccccatcatcgtgcactgcagtgatggtgcggggaggaccggcacctacatcctcatcgacatggtcctgaaccgcatggcaaaaggagtgaaggagattgacatcgctgccaccctggagcatgtccgtgaccagcggcctggccttgtccgctctaaggaccagtttgaatttgccctgacagccgtggcggaggaagtgaatgccatcctcaaggccctgccccagtgagaccctggggccccttggcgggcagcccagcctctgtccctctttgcctgtgtgagcatctctgtgtacccactcctcactgccccaccagccacctcttgggcatgctcagcccttcctagaagagtcaggaagggaaagccagaaggggcacgcctgcccagcctcgcatgccagagcctggggcatcccagagcccagggcatcccatgggggtgctgcagccaggaggagaggaaaggacatgggtagcaattctacccagagccttctcctgcctacattccctggcctggctctcctgtagctctcctggggttctgggagttccctgaacatctgtgtgtgtccccctatgctccagtatggaagaatggggtggagggtcgccacacccggctccccctgcttytcagccccgggcctgcctytgactcacacttgggcgctctgccctccctggcctcacgcccagcctcctcccaccaccctcccmccatgcgctgctcaacctctctccttytggcgcaagagaacatttctagaaaaaactacttttgtaccagtgtgaataaagttagtgtgttgtctgtgcagctgcaa

SEQ ID NO: 172 - DNA, 3423 bp, Homo sapiens
ggatccgggggtctccggctgctcctctgcctcctgctgctgagcagccgcccggggggctgcagcgccgttagtgcccacgatggcttgtttgggcagtgccaggtgggagtggggcaggcccggccycttttgcaagtcacctccccagttctccaacgcttacaaggtgtgctccgacaactcatgtcccaaggattgtcctggcacgatgacctcacccagtatgtgatctctcaggagatggagcgcatccccaggcttcgccccccagagccccgtccaagggacaggtctggcttggcacccaagagacctggtcctgctggagagctgcttttacaggacatccccactggctccgcccctgctgcccagcatcggcttccacaaccaccagtgggcaaaggtggagctggggccagctcctctctgtcccctctgcaggctgagctgctcccgcctctcttggagcacctgctgctgcccccacagcctccccacccttcactgagttacgaacctgccttgctgcagccctacctgttccaccagtttggctcccgtgatggctccagggtctcagagggctccccagggatggtcagtgtcggccccctgcccaaggctgaagcccctgccctcttcagcagaactgcctccaagggcatatttggggaccaccctggccactcctacggggaccttccagggccttcacctgcccagctttttcaagactctgggctgctctatctggcccaggagttgccagcacccagcagggccagggtgccaaggctgccagagcaagggagcagcagccgggcagaggactccccagagggctatgagaaggaaggactaggggatcgtggagagaagcctgcttccccagctgtgcacagatgcggctctgcagaggctggccgctgtgctggcgggctatggggtagagctgcgtcagctgacccctgagcagctctccacactcctgaccctgctgcagctactgcccaagggtgcaggaagaaatccgggacaatggaggggccggtggagggcagagacacagcagagcttccagcccgcacatcccccatgcctggacaccccactgccagccctacctccagkgaagtccagcaggtgccaagccctgtctcctctgagcctcccaaagctgccagaccccctgtgacacctgtcctgctagagaagaaaagcccactgggccagagccagcccacggtggcaggacagccctcagcccgcccagcagcagaggaatatggctacatcgtcactgatcagaagcccctgagcctggctgcaggagtgaagctgctggagatcctggctgagcatgtgcacatgtcctcaggcagcttcatcaacatcagtgtggtgggaccagccctcaccttccgcatccggcacaatgagcagaacctgtctttggctgatgtgacccaacaagcagggctggtgaagtctgaactggaagcacagacagggctccaaatcttgcagacaggagtgggacagagggaggaggcagctgcagtccttccccaaactgcgcacagcacctcacccatgcgctyagtgctgctcactctggtggccctggcaggtgtggctgggctgctggtggctctggctgtggctctgtgtgtgcggcagcatgcgcggcagcaagacaaggagcgcctggcagccctggggcctgagggggcccatggtgacactacctttgagtaccaggacctgtgccgccagcacatggccacgaagtccttgttcaaccgggcagagggtccaccggagccttcacgggtgagcagtgtgtcctcccagttcagcgaygcagcccaggccagccccagctcccacagcagcaccccstcctggtgcgaggagccggcccaagccaacatggacatctccacgggacacatgattctggcatacatggaggatcacctgcggaaccgggaccgccttgccaaggagtggcaggccctctgtgcctaccaagcagagccaaacacctgtgccaccgcgcagggggagggcaacatcaaaaagaaccggcatcctgacttcctgccctatgaccatgcccgcataaaactgaaggtggagagcagcccttctcggagcgattacatcaacgccagccccattattgagcatgaccctcggatgccagcctacatagccacgcagggcccgctgtcccataccatcgcagacttctggcagatggtgtgggagagcggctgcaccgtcatcgtcatgctgaccccgctggtggaggatggtgtcaagcagtgtgaccgctactggccagatgagggtgcctccctctaccacgtatatgaggtgaacctggtgtcggagcacatctggtgcgaggactttctggtgcggagcttctacctgaagaacgtgcagacccaggagacgcgcacgctcacgcagttccacttcctcagctggccggcagagggcacaccggcctccacgcggcccctgctggacttccgcaggaaggtgaacaagtgctaccggggccgctcctgccccatcatcgtgcactgcagtgatggtgcggggaggaccggcacctacatcctcatcgacatggtcctgaaccgcatggcaaaaggagtgaaggagattgacatcgctgccaccctggagcatgtccgtgaccagcggcctggccttgtccgctctaaggaccagtttgaatttgccctgacagccgtggcggaggaagtgaatgccatcctcaaggccctgccccagtgagaccctggggccccttggcgggcagcccagcctctgtccctctttgcctgtgtgagcatctctgtgtacccactcctcactgccccaccagccacctcttgggcatgctcagcccttcctagaagagtcaggaagggaaagccagaaggggcacgcctgcccagcctcgcatgccagagcctggggcatcccagagcccagggcatcccatgggggtgctgcagccaggaggagaggaaaggacatgggtagcaattctacccagagccttctcctgcctacattccctggcctggctctcctgtagctctcctggggttctgggagttccctgaacatctgtgtgtgtccccctatgctccagtatggaagaatggggtggagggtcgccacacccggctccccctgcttytcagccccgggcctgcctytgactcacacttgggcgctctgccctccctggcctcacgcccagcctcctcccaccaccctcccmccatgcgctgctcaacctctctccttytggcgcaagagaacatttctagaaaaaactacttttgtaccagtgtgaataaagttagtgtgttgtctgtgcagctgcaa

SEQ ID NO: 173 - DNA, 2104 bp, Homo sapiens
ttgggagaagccgagggcagcttagccacggccggttcccgttccctccaggacgcgagggtcgccttgggtggggaacccgcgaccgggcgaggacctatcccggtgtggggcttcccgatttcgaaagaatctcgctgcacccccgcccagagttcagaccaagcgaaaagttatttgagaggcctcgggggcgcggggtgaggagtcgtggcggaggccttggtcggggcgccgtggatatccccgagtcaccgcgtccctctcctgcagctcccgcgtcgctgggaggagcgagggagcgagcgggaaggggtctagctggcctttgctcggccctccccagcgcccggctttgaacccgccctgcactgctgtctgggcgggtccggggactcagcactcgacccaaaggtgcaggcgcgcgagcacaacccatggctgcgctgggctgcgcgaggctgaggtgggcgctgcgaggggccggccgtggcctctgcccccacggggccagagccaaggccgcgatccctgccgccctcccctcggacaaggccaccggagctcccggagccgggcctggtgtccggcggcggcaacggagcttagaggagattccacgtctaggacagctgcgcttcttctttcagctgttcgttcaaggctatgccctgcaactgcaccagttacagggaaggacaccactggtaccagctgcgccaggctctgaaccagyggttgctgaagccagyggaagcagcgctctatacggatgctttcaatgaggtgattgatgactttatgactcgactggaccagctgcgggcakagagtgcttcggggaaccaggtgtcggacatggctcaactcttctactactttgccttggaagctatttgctacatcctgttcgagaaacgcattggctgcctgcagygatccatccccgaggacaccgtgaccttcgtcagatccatcgggttaatgttcyagaactcactctatgccaccttcctccccargtrgactcgccccgtgctgcctttctggaagcgatacctggatggttggaatgccatcttttcctttgggaagwagctgattgatgagaagctcgaagatatggargcccarctgcaggcagcagggccagatggcatccaggtgtctggctacctgcacttcttactggccagtggacagctcagtcctcgggaggccatgggcagcctgcctgagctgctcatggctggagtggacaygacatccaacacgctgacatgggccctgtaccacctctcaaaggrccctgagatccaggaggccttgcacgaggaagtggtgggtgtggtgccagccgggcaagtgccccagcacaaggactttgcccacatgcygttgctcaaagctgtgcttaaggagactctgyrtctctaccctgtggtccscacaaactcccggatcatagaaaaggaaattgaagttgatggcttcctcttccccaagaacacccagtttgtgttctgccactatgtggtgtcccgggaccccactgccttctctgagcctgaaagcttccagccccaccgctggctgagaaacagccagcctgctacccccaggatccagcacccatttggctctgtgccctttggctatggggtcyrggcctgcctgggcygcaggattgcagagctggagatgcagctactcctcgcaaggctgatccagaagtacaaggtggtcctggccccggagacgggggagttgaagagtgtggcccgcattgtcctggttcccaataagaaagtgggcctgcagttcctgcagagacagtgctgagctgagtctccgccttgctggggcttgtcctagaggctccagctctggcacagtggttcctggctgctgccatgtctcagatgaggagggagagaaggaggccgccagactcgagaggtgggaggaactccttgcacacaccctgagcttttgccacttctatcatttttgagcaactccctctcagctaaaaggccacccctttatcgcattgctgtccttgggtagaatataaaataaagggacttttatttcttattgg

SEQ ID NO: 174 - DNA, 2295 bp, Homo sapiens
ttgggagaagccgagggcagcttagccacggccggttcccgttccctccaggacgcgagggtcgccttgggtggggaacccgcgaccgggcgaggacctatcccggtgtggggcttcccgatttcgaaagaatctcgctgcacccccgcccagagttcagaccaagcgaaaagttatttgagaggcctcgggggcgcggggtgaggagtcgtggcggaggccttggtcggggcgccgtggatatccccgagtcaccgcgtccctctcctgcagctcccgcgtcgctgggaggagcgagggagcgagcgggaaggggtctagctggcctttgctcggccctccccagcgcccggctttgaacccgccctgcactgctgtctgggcgggtccggggactcagcactcgacccaaaggtgcaggcgcgcgagcacaacccatggctgcgctgggctgcgcgaggctgaggtgggcgctgcgaggggccggccgtggcctctgcccccacggggccagagccaaggccgcgatccctgccgccctcccctcggacaaggccaccggagctcccggagccgggcctggtgtccggcggcggcaacggagcttagaggagattccacgtctaggacagctgcgcttcttctttcagctgttcgttcaaggctatgccctgcaactgcaccagttacaggtgctttacaaggccaagtacggtccaatgtggatgtcctacttagggcctcagatgcacgtgaacctggccagtgccccgctcttggagcaagtgatgcggcaagagggmaagtacccagtayrgaacgacatggagctatggaaggagcaccgggaccagcacgacctgacctatgrgccrttcaccacggaaggacaccactggtaccagctgcgccaggctctgaaccagyggttgctgaagccagyggaagcagcgctctatacggatgctttcaatgaggtgattgatgactttatgactcgactggaccagctgcgggcakagagtgcttcggggaaccaggtgtcggacatggctcaactcttctactactttgccttggaagctatttgctacatcctgttcgagaaacgcattggctgcctgcagygatccatccccgaggacaccgtgaccttcgtcagatccatcgggttaatgttcyagaactcactctatgccaccttcctccccargtrgactcgccccgtgctgcctttctggaagcgatacctggatggttggaatgccatcttttcctttgggaagwagctgattgatgagaagctcgaagatatggargcccarctgcaggcagcagggccagatggcatccaggtgtctggctacctgcacttcttactggccagtggacagctcagtcctcgggaggccatgggcagcctgcctgagctgctcatggctggagtggacaygacatccaacacgctgacatgggccctgtaccacctctcaaaggrccctgagatccaggaggccttgcacgaggaagtggtgggtgtggtgccagccgggcaagtgccccagcacaaggactttgcccacatgcygttgctcaaagctgtgcttaaggagactctgyrtctctaccctgtggtccscacaaactcccggatcatagaaaaggaaattgaagttgatggcttcctcttccccaagaacacccagtttgtgttctgccactatgtggtgtcccgggaccccactgccttctctgagcctgaaagcttccagccccaccgctggctgagaaacagccagcctgctacccccaggatccagcacccatttggctctgtgccctttggctatggggtcyrggcctgcctgggcygcaggattgcagagctggagatgcagctactcctcgcaaggctgatccagaagtacaaggtggtcctggccccggagacgggggagttgaagagtgtggcccgcattgtcctggttcccaataagaaagtgggcctgcagttcctgcagagacagtgctgagctgagtctccgccttgctggggcttgtcctagaggctccagctctggcacagtggttcctggctgctgccatgtctcagatgaggagggagagaaggaggccgccagactcgagaggtgggaggaactccttgcacacaccctgagcttttgccacttctatcatttttgagcaactccctctcagctaaaaggccacccctttatcgcattgctgtccttgggtagaatataaaataaagggacttttatttcttattgg

SEQ ID NO: 175 - DNA, 2675 bp, Homo sapiens
gcggtatctcagcaaccgctgggcatccggaggatgtggggacgcggagctgagaggctccgggctagctaggtgtaggggtggacgggtcccaggaccctggtgagggttctctacttggccttcggtgggggtcaagacgcaggcacctacgccaaaggggagcaaagccgggctcggcccgaggcccccaggacctccatctcccaatgttggagtagagacagggttttgccctgttggccaagctggtcttgaactcctgacctcaagtgatccacccgcctcggcctcccaaagtgttgggattacaggcgtgagccatcgtgcccagccagattctccatttctaacaagttcccaggtgacgtcgatgaagctggaatccgacacgtgacggtctgtccgccgtctcagactagaggagcgctgtaarcgccatggctcccaagaagctgtcctgccttcgttccctgctgctgccgctcagcctgacgctactgctgccccaggcagacactcggtcgttcgtagtggataggggtcatgaccggtttctcctagacggggccccgttccgctatgtgtctggcagcctgcactactttcgggtaccgcgggtgctttgggccgaccggcttttgaagatgcgatggagcggcctcaacgccatacagttttatgtgccctggaactaccacgagccacagcctggggtctataactttaatggcagccgggacctcattgcctttctgaatgaggcagctctagcgaacctgttggtcatactgagaccaggaccttacatctgtgcagagtgggagatggggggtctcccatcctggttgcttcgaaaacctgaaattcatctaagaacctcagatccagacttccttgccgcagtggactcctggttcaaggtcttgctgcccaagatatatccatggctttatcacaatgggggcaacatcattagcattcagctgacaacatgaccaaaatctttaccctgcttcggaagtatgaaccccatgggccattggtaaactctgagtactacacaggctggctggattactggggccagaatcactccacacggtctgtgtcagctgtaaccaaaggactagagaacatgctcaagttgggagccagtgtgaacatgtacatgttccatggaggtaccaactttggatattggaatggtgccgataagaagggacgcttccttccgattactaccagctatgactatgatgcacctatatctgaagcaggggaccccacacctaagctttttgctcttcgagatgtcatcagcaagttccaggaagttcctttgggacctttacctcccccgagccccaagatgatgcttggacctgtgactctgcacctggttgggcatttactggctttcctagacttgctttgcccccgtgggcccattcattcaatcttgccaatgacctttgaggctgtcaagcaggaccatggcttcatgttgtaccgaacctatatgacccataccatttttgagccaacaccattctgggtgccaaataatggagtccatgaccgtgcctatgtgatggtggatggggtgttccagggtgttgtggagcgaaatatgagagacaaactatttttgacggggaaactggggtccaaactggatatcttggtggagaacatggggaggctcagctttgggtctaacagcagtgacttcaagggcctgttgaagccaccaattctggggcaaacaatccttacccagtggatgatgttccctctgaaaattgataaccttgtgaagtggtggtttcccctccagttgccaaaatggccatatcctcaagctccttctggccccacattctactccaaaacatttccaattttaggctcagttggggacacatttctatatctacctggatggaccaagggccaagtctggatcaatgggtttaacttgggccggtactggacaaagcaggggccacaacagaccctctacgtgccaagattcctgctgtttccyaggggagccctcaacaaaattacattgctggaactagaagatgtacctctccagccccaagtccaatttttggataagcctatcctcaatagcactagtactttgcacaggacacatatcaattccctttcagctgatacactgagtgcctctgaaccaatggagttaagtgggcactgaaaggtaggccrggcatggtggctcatgcctgtaatcccagcactttgggaggctgagacgggtggattacctgaggtcaggacttcaagaccagcctggccaacatggtgaaaccccgtctccactaaaaatacaaaaattagccgggcgtgatggtgggcacctctaatcccagctacttgggaggctgagggcaggagaattgcttgaatccaggaggcagaggttgcagtgagtggaggttgtaccactgcactccagcctggctgacagtgagacactccatctcaaaaaaaaaaaaaaaaaaaaaaagtaacccttggacctgggacatggagtgggcaggatcccttggtgctggccacggtgaccctaaggaactaaaggccacagtgcctctgaatgtaagtacaagtacacattccttgccaaactttattgkgat

SEQ ID NO: 176 - DNA, 2584 bp, Homo sapiens
gcggtatctcagcaaccgctgggcatccggaggatgtggggacgcggagctgagaggctccgggctagctaggtgtaggggtggacgggtcccaggaccctggtgagggttctctacttggccttcggtgggggtcaagacgcaggcacctacgccaaaggggagcaaagccgggctcggcccgaggcccccaggacctccatctcccaatgttggagtagagacagggttttgccctgttggccaagctggtcttgaactcctgacctcaagtgatccacccgcctcggcctcccaaagtgttgggattacaggcgtgagccatcgtgcccagccagattctccatttctaacaagttcccaggtgacgtcgatgaagctggaatccgacacgtgacggtctgtccgccgtctcagactagaggagcgctgtaarcgccatggctcccaagaagctgtcctgccttcgttccctgctgctgccgctcagcctgacgctactgctgccccaggcagacactcggtcgttcgtagtggataggggtcatgaccggtttctcctagacggggccccgttccgctatgtgtctggcagcctgcactactttcgggtaccgcgggtgctttgggccgaccggcttttgaagatgcgatggagcggcctcaacgccatacagttttatgtgccctggaactaccacgagccacagcctggggtctataactttaatggcagccgggacctcattgcctttctgaatgaggcagctctagcgaacctgttggtcatactgagaccaggaccttacatctgtgcagagtgggagatggtgagggggtctcccatcctggttgcttcgaaaacctgaaattcatctaagaacctcagatccagctgacaacatgaccaaaatctttaccctgcttcggaagtatgaaccccatgggccattggtaaactctgagtactacacaggctggctggattactggggccagaatcactccacacggtctgtgtcagctgtaaccaaaggactagagaacatgctcaagttgggagccagtgtgaacatgtacatgttccatggaggtaccaactttggatattggaatggtgccgataagaagggacgcttccttccgattactaccagctatgactatgatgcacctatatctgaagcaggggaccccacacctaagctttttgctcttcgagatgtcatcagcaagttccaggaagttcctttgggacctttacctcccccgagccccaagatgatgcttggacctgtgactctgcacctggttgggcatttactggctttcctagacttgctttgcccccgtgggcccattcattcaatcttgccaatgacctttgaggctgtcaagcaggaccatggcttcatgttgtaccgaacctatatgacccataccatttttgagccaacaccattctgggtgccaaataatggagtccatgaccgtgcctatgtgatggtggatggggtgttccagggtgttgtggagcgaaatatgagagacaaactatttttgacggggaaactggggtccaaactggatatcttggtggagaacatggggaggctcagctttgggtctaacagcagtgacttcaagggcctgttgaagccaccaattctggggcaaacaatccttacccagtggatgatgttccctctgaaaattgataaccttgtgaagtggtggtttcccctccagttgccaaaatggccatatcctcaagctccttctggccccacattctactccaaaacatttccaattttaggctcagttggggacacatttctatatctacctggatggaccaagggccaagtctggatcaatgggtttaacttgggccggtactggacaaagcaggggccacaacagaccctctacgtgccaagattcctgctgtttccyaggggagccctcaacaaaattacattgctggaactagaagatgtacctctccagccccaagtccaatttttggataagcctatcctcaatagcactagtactttgcacaggacacatatcaattccctttcagctgatacactgagtgcctctgaaccaatggagttaagtgggcactgaaaggtaggccrggcatggtggctcatgcctgtaatcccagcactttgggaggctgagacgggtggattacctgaggtcaggacttcaagaccagcctggccaacatggtgaaaccccgtctccactaaaaatacaaaaattagccgggcgtgatggtgggcacctctaatcccagctacttgggaggctgagggcaggagaattgcttgaatccaggaggcagaggttgcagtgagtggaggttgtaccactgcactccagcctggctgacagtgagacactccatctcaaaaaaaaaaaaaaaaaaaaaaagtaacccttggacctgggacatggagtgggcaggatcccttggtgctggccacggtgaccctaaggaactaaaggccacagtgcctctgaatgtaagtacaagtacacattccttgccaaactttattgkgat

SEQ ID NO: 177 - DNA, 1784 bp, Homo sapiens
acttccttgccgcagtggactcctggttcaaggtcttgctgcccaagatatatccatggctttatcacaatgggggcaacatcattagcattcagctgacaacatgaccaaaatctttaccctgcttcggaagtatgaaccccatgggccattggtaaactctgagtactacacaggctggctggattactggggccagaatcactccacacggtctgtgtcagctgtaaccaaaggactagagaacatgctcaagttgggagccagtgtgaacatgtacatgttccatggaggtaccaactttggatattggaatggtgccgataagaagggacgcttccttccgattactaccagctatgactatgatgcacctatatctgaagcaggggaccccacacctaagctttttgctcttcgagatgtcatcagcaagttccaggaagttcctttgggacctttacctcccccgagccccaagatgatgcttggacctgtgactctgcacctggttgggcatttactggctttcctagacttgctttgcccccgtgggcccattcattcaatcttgccaatgacctttgaggctgtcaagcaggaccatggcttcatgttgtaccgaacctatatgacccataccatttttgagccaacaccattctgggtgccaaataatggagtccatgaccgtgcctatgtgatggtggatggggtgttccagggtgttgtggagcgaaatatgagagacaaactatttttgacggggaaactggggtccaaactggatatcttggtggagaacatggggaggctcagctttgggtctaacagcagtgacttcaagggcctgttgaagccaccaattctggggcaaacaatccttacccagtggatgatgttccctctgaaaattgataaccttgtgaagtggtggtttcccctccagttgccaaaatggccatatcctcaagctccttctggccccacattctactccaaaacatttccaattttaggctcagttggggacacatttctatatctacctggatggaccaagggccaagtctggatcaatgggtttaacttgggccggtactggacaaagcaggggccacaacagaccctctacgtgccaagattcctgctgtttccyaggggagccctcaacaaaattacattgctggaactagaagatgtacctctccagccccaagtccaatttttggataagcctatcctcaatagcactagtactttgcacaggacacatatcaattccctttcagctgatacactgagtgcctctgaaccaatggagttaagtgggcactgaaaggtaggccrggcatggtggctcatgcctgtaatcccagcactttgggaggctgagacgggtggattacctgaggtcaggacttcaagaccagcctggccaacatggtgaaaccccgtctccactaaaaatacaaaaattagccgggcgtgatggtgggcacctctaatcccagctacttgggaggctgagggcaggagaattgcttgaatccaggaggcagaggttgcagtgagtggaggttgtaccactgcactccagcctggctgacagtgagacactccatctcaaaaaaaaaaaaaaaaaaaaaaagtaacccttggacctgggacatggagtgggcaggatcccttggtgctggccacggtgaccctaaggaactaaaggccacagtgcctctgaatgtaagtacaagtacacattccttgccaaactttattgkgat

SEQ ID NO: 178 - DNA, 2549 bp, Homo sapiens
agtgctgacatcatcagtccgcgccggcgtaacggcccgcggtatctcagcaaccgctgggcatccggaggatgtggggacgcggagctgagaggctccgggctagctaggtgtaggggtggacgggtcccaggaccctggtgagggttctctacttggccttcggtgggggtcaagacgcaggcacctacgccaaaggggagcaaagccgggctcggcccgaggcccccaggacctccatctcccaatgttggaggaatccgacacgtgacggtctgtccgccgtctcagactagaggagcgctgtaarcgccatggctcccaagaagctgtcctgccttcgttccctgctgctgccgctcagcctgacgctactgctgccccaggcagacactcggtcgttcgtagtggataggggtcatgaccggtttctcctagacggggccccgttccgctatgtgtctggcagcctgcactactttcgggtaccgcgggtgctttgggccgaccggcttttgaagatgcgatggagcggcctcaacgccatacagttttatgtgccctggaactaccacgagccacagcctggggtctataactttaatggcagccgggacctcattgcctttctgaatgaggcagctctagcgaacctgttggtcatactgagaccaggaccttacatctgtgcagagtgggagatggggggtctcccatcctggttgcttcgaaaacctgaaattcatctaagaacctcagatccagacttccttgccgcagtggactcctggttcaaggtcttgctgcccaagatatatccatggctttatcacaatgggggcaacatcattagcattcagctgacaacatgaccaaaatctttaccctgcttcggaagtatgaaccccatgggccattggtaaactctgagtactacacaggctggctggattactggggccagaatcactccacacggtctgtgtcagctgtaaccaaaggactagagaacatgctcaagttgggagccagtgtgaacatgtacatgttccatggaggtaccaactttggatattggaatggtgccgataagaagggacgcttccttccgattactaccagctatgactatgatgcacctatatctgaagcaggggaccccacacctaagctttttgctcttcgagatgtcatcagcaagttccaggaagttcctttgggacctttacctcccccgagccccaagatgatgcttggacctgtgactctgcacctggttgggcatttactggctttcctagacttgctttgcccccgtgggcccattcattcaatcttgccaatgacctttgaggctgtcaagcaggaccatggcttcatgttgtaccgaacctatatgacccataccatttttgagccaacaccattctgggtgccaaataatggagtccatgaccgtgcctatgtgatggtggatggggtgttccagggtgttgtggagcgaaatatgagagacaaactatttttgacggggaaactggggtccaaactggatatcttggtggagaacatggggaggctcagctttgggtctaacagcagtgacttcaagggcctgttgaagccaccaattctggggcaaacaatccttacccagtggatgatgttccctctgaaaattgataaccttgtgaagtggtggtttcccctccagttgccaaaatggccatatcctcaagctccttctggccccacattctactccaaaacatttccaattttaggctcagttggggacacatttctatatctacctggatggaccaagggccaagtctggatcaatgggtttaacttgggccggtactggacaaagcaggggccacaacagaccctctacgtgccaagattcctgctgtttccyaggggagccctcaacaaaattacattgctggaactagaagatgtacctctccagccccaagtccaatttttggataagcctatcctcaatagcactagtactttgcacaggacacatatcaattccctttcagctgatacactgagtgcctctgaaccaatggagttaagtgggcactgaaaggtaggccrggcatggtggctcatgcctgtaatcccagcactttgggaggctgagacgggtggattacctgaggtcaggacttcaagaccagcctggccaacatggtgaaaccccgtctccactaaaaatacaaaaattagccgggcgtgatggtgggcacctctaatcccagctacttgggaggctgagggcaggagaattgcttgaatccaggaggcagaggttgcagtgagtggaggttgtaccactgcactccagcctggctgacagtgagacactccatctcaaaaaaaaaaaaaaaaaaaaaaagtaacccttggacctgggacatggagtgggcaggatcccttggtgctggccacggtgaccctaaggaactaaaggccacagtgcctctgaatgtaagtacaagtacacattccttgccaaactttattgkgat

SEQ ID NO: 179 - DNA, 1690 bp, Homo sapiens
cgcggaaggagcttgcagtagcgggcggcagagctggagtgaagggagctagtgtttaggtagcagtcaccattatgctcaaagcggtgatcctgattggaggccctcaaaagggaactcgcttcagacctttgtyttttgaggtgcccaaaccattgtttcctgtggcaggggtccctatgatccaacaccatattgaagcctgtgcccaggtccctggaatgcaggagattctgctcattggcttctaccaacctgatgagyccctcacccagttcctagaagccgcccagcaggagtttaaccttccagtcaggtacctgcaggaatttgcccccctaggcacagggggtggtctttaccattttcgagaccagatcctggctgggagccccgaggcattcttcgtgctcaatgctgatgtctgctccgacttccccttgagtgctatgttggaagcccaccgacgccagcgtcaccctttcttactccttggcactacggctaacaggacgcaatccctcaactacggctgcatcgttgagaatccacagacacasgaggtattgcactatgtggagaaacccagcacatttatcagtgacatcatcaactgcggcatctacctcttttctcctgaagccttgaagcctcttcgggatgtcttccagcgtaatcagcaggatgggcaattggaggactcaccaggcttgtggccaggggcaggtacyatccgcctagagcaggatgtgttttcagccctggcagggcagggccagatatacgtgcatctcactgatggtatctggagtcagatcaagtccgcaggttcagccctctacgcctcccgcctctacctgagccgataccaggacactcacccagaacggctggccaagcacaccccagggggcccatggatccgaggtacccagcctgccccaattcctaacctttggcttccaccccagccctctgaaccaggattcttgacctcgagtccagagttaaagcctcaatccctgccccttcctgatcaaattcggtttgggatatttgcccccagggcctctcttctgcttctagggaatgtgtacatccacccgaccgccaaggtggccccctcggctgtgctgggccccaacgtctccatcgggaagggggtgaccgtgggtgagggtgtgcggctccgggagagcatcgtcctccatggagccactttgcaggagcacacgtgtgttctgcatagcatcgtgggctgggggagcacygtgggacgctgggcscgcgtggagggtacccccagtgaccctaaccccaacgatccccgagcccgcatggacagtgagagcctcttcaaggacgggaagctgctgcctgctatcaccatcctgggctgccgagtccggatccctgccgaggtgctcatcctgaactcgattgttctgccacacaaggagctgagccgaagcttcaccaaycagatcatcctytgagtagggctgccagaaggcccccagctcctacccactccccttgaggctgctgcctgcttggccagcctctgtccagaaaggaccagagaaagccaggctggatcgtcacatgccggggagcaatgtggatggcctggggactcctgggttttctccctcccgactccctaataaaccccgtgaaccttggagcc

SEQ ID NO: 180 - DNA, 1823 bp, Homo sapiens
gcggcagagctggagtgaagggagctagtggtaaagggagctggtggaggggtggcggcaggggtaaggggcaggggacaccctctagacggagagcgggctccgaggtcctggctggccctcggtgcgcccgcccctgtgttggtcccacaatccctggcaatgagaggccagggtttattggacagagtcagttgtggggttcagagggtcagcaatcaatcaatcctccgaatccagagatttagacccagtcgtccgtattaggactggaggggggtcaatargttcagtgtttgagatgccaagggaacctgtcttttgatttggggttcaacatacagagtttaggtagcagtcaccattatgctcaaagcggtgatcctgattggaggccctcaaaagggaactcgcttcagacctttgtyttttgaggtgcccaaaccattgtttcctgtggcaggggtccctatgatccaacaccatattgaagcctgtgcccaggtccctggaatgcaggagattctgctcattggcttctaccaacctgatgagyccctcacccagttcctagaagccgcccagcaggagtttaaccttccagtcaggtacctgcaggaatttgcccccctaggcacagggggtggtctttaccattttcgagaccagatcctggctgggagccccgaggcattcttcgtgctcaatgctgatgtctgctccgacttccccttgagtgctatgttggaagcccaccgacgccagcgtcaccctttcttactccttggcactacggctaacaggacgcaatccctcaactacggctgcatcgttgagaatccacagacacasgaggtattgcactatgtggagaaacccagcacatttatcagtgacatcatcaactgcggcatctacctcttttctcctgaagccttgaagcctcttcgggatgtcttccagcgtaatcagcaggatgggcaattggaggactcaccaggcttgtggccaggggcaggtacyatccgcctagagcaggatgtgttttcagccctggcagggcagggccagatatacgtgcatctcactgatggtatctggagtcagatcaagtccgcaggttcagccctctacgcctcccgcctctacctgagccgataccaggacactcacccagaacggctggccaagcacaccccagggggcccatggatccgagggaatgtgtacatccacccgaccgccaaggtggccccctcggctgtgctgggccccaacgtctccatcgggaagggggtgaccgtgggtgagggtgtgcggctccgggagagcatcgtcctccatggagccactttgcaggagcacacgtgtgttctgcatagcatcgtgggctgggggagcacygtgggacgctgggcscgcgtggagggtacccccagtgaccctaaccccaacgatccccgagcccgcatggacagtgagagcctcttcaaggacgggaagctgctgcctgctatcaccatcctgggctgccgagtccggatccctgccgaggtgctcatcctgaactcgattgttctgccacacaaggagctgagccgaagcttcaccaaycagatcatcctytgagtagggctgccagaaggcccccagctcctacccactccccttgaggctgctgcctgcttggccagcctctgtccagaaaggaccagagaaagccaggctggatcgtcacatgccggggagcaatgtggatggcctggggactcctgggttttctccctcccgactccctaataaaccccgtgaaccttggagcc

SEQ ID NO: 181 - DNA, 1822 bp, Homo sapiens
cgcggaaggagcttgcagtagcgggcggcagagctggagtgaagggagctagtgtttaggtagcagtcaccattatgctcaaagcggtgatcctgattggaggccctcaaaagggaactcgcttcagacctttgtyttttgaggtgcccaaaccattgtttcctgtggcaggggtccctatgatccaacaccatattgaagcctgtgcccaggtccctggaatgcaggagattctgctcattggcttctaccaacctgatgagyccctcacccagttcctagaagccgcccagcaggagtttaaccttccagtcaggtgtttgtgcacacactcgtatatsggggggtggggatgccctaggcctctgagttcttggaagtgggttgagtcagcatttgctggagttcatcctcgcctactagaaggattcttgtttggacatcaatgaatctctgagtatatagagtttctctgtgggccttgggcaggagtagtcctgggagcaagcggtggcggtcaggtgccctggctcatggtatctgtttcctaagatccactgagctggctctcgggtccctggggacaggtacctgcaggaatttgcccccctaggcacagggggtggtctttaccattttcgagaccagatcctggctgggagccccgaggcattcttcgtgctcaatgctgatgtctgctccgacttccccttgagtgctatgttggaagcccaccgacgccagcgtcaccctttcttactccttggcactacggctaacaggacgcaatccctcaactacggctgcatcgttgagaatccacagacacasgaggtattgcactatgtggagaaacccagcacatttatcagtgacatcatcaactgcggcatctacctcttttctcctgaagccttgaagcctcttcgggatgtcttccagcgtaatcagcaggatgggcaattggaggactcaccaggcttgtggccaggggcaggtacyatccgcctagagcaggatgtgttttcagccctggcagggcagggccagatatacgtgcatctcactgatggtatctggagtcagatcaagtccgcaggttcagccctctacgcctcccgcctctacctgagccgataccaggacactcacccagaacggctggccaagcacaccccagggggcccatggatccgagggcctctcttctgcttctagggaatgtgtacatccacccgaccgccaaggtggccccctcggctgtgctgggccccaacgtctccatcgggaagggggtgaccgtgggtgagggtgtgcggctccgggagagcatcgtcctccatggagccactttgcaggagcacacgtgtgttctgcatagcatcgtgggctgggggagcacygtgggacgctgggcscgcgtggagggtacccccagtgaccctaaccccaacgatccccgagcccgcatggacagtgagagcctcttcaaggacgggaagctgctgcctgctatcaccatcctgggctgccgagtccggatccctgccgaggtgctcatcctgaactcgattgttctgccacacaaggagctgagccgaagcttcaccaaycagatcatcctytgagtagggctgccagaaggcccccagctcctacccactccccttgaggctgctgcctgcttggccagcctctgtccagaaaggaccagagaaagccaggctggatcgtcacatgccggggagcaatgtggatggcctggggactcctgggttttctccctcccgactccctaataaaccccgtgaaccttggagcc

SEQ ID NO: 182 - DNA, 1531 bp, Homo sapiens
cgcggaaggagcttgcagtagcgggcggcagagctggagtgaagggagctagtgtttaggtagcagtcaccattatgctcaaagcggtgatcctgattggaggccctcaaaagggaactcgcttcagacctttgtyttttgaggtgcccaaaccattgtttcctgtggcaggggtccctatgatccaacaccatattgaagcctgtgcccaggtccctggaatgcaggagattctgctcattggcttctaccaacctgatgagyccctcacccagttcctagaagccgcccagcaggagtttaaccttccagtcaggtacctgcaggaatttgcccccctaggcacagggggtggtctttaccattttcgagaccagatcctggctgggagccccgaggcattcttcgtgctcaatgctgatgtctgctccgacttccccttgagtgctatgttggaagcccaccgacgccagcgtcaccctttcttactccttggcactacggctaacaggacgcaatccctcaactacggctgcatcgttgagaatccacagacacasgaggtattgcactatgtggagaaacccagcacatttatcagtgacatcatcaactgcggcatctacctcttttctcctgaagccttgaagcctcttcgggatgtcttccagcgtaatcagcaggatgggcaattggaggactcaccaggcttgtggccaggggcaggtacyatccgcctagagcaggatgtgttttcagccctggcagggcagggccagatatacgtgcatctcactgatggtatctggagtcagatcaagtccgcaggttcagccctctacgcctcccgcctctacctgagccgataccaggacactcacccagaacggctggccaagcacaccccagggggcccatggatccgagggaatgtgtacatccacccgaccgccaaggtggccccctcggctgtgctgggccccaacgtctccatcgggaagggggtgaccgtgggtgagggtgtgcggctccgggagagcatcgtcctccatggagccactttgcaggagcacacgtgtgttctgcatagcatcgtgggctgggggagcacygtgggacgctgggcscgcgtggagggtacccccagtgaccctaaccccaacgatccccgagcccgcatggacagtgagagcctcttcaaggacgggaagctgctgcctgctatcaccatcctgggctgccgagtccggatccctgccgaggtgctcatcctgaactcgattgttctgccacacaaggagctgagccgaagcttcaccaaycagatcatcctytgagtagggctgccagaaggcccccagctcctacccactccccttgaggctgctgcctgcttggccagcctctgtccagaaaggaccagagaaagccaggctggatcgtcacatgccggggagcaatgtggatggcctggggactcctgggttttctccctcccgactccctaataaaccccgtgaaccttggagcc

SEQ ID NO: 183 - DNA, 3477 bp, Homo sapiens
gccccgccggcggcgccccttcctccgttacccgccgcgagctcacttagggctccgcaggcacccctgggcaaggccagacacggggcctgggattccaataaccggtctcacgtcttacctcaggaacagcgacccgggtgattccagaggctccgccggctccgctcgrctcggctcggctcggcgcgacccgcggcgctaggccgggtgtctgccactcactgtcacccgcagccaggctggccaataagcacggggggcggagacacaacggccaattctcggcttcagggacgggactaaagtctcgaggcgggtcttggacagtcagcggcccaatagtgtgctctacgtggggcggggctcaggtgcggacgccgccggttgtcctcttcgctgctccgtagtgacgrggattgttgtgttgcagaaatccggcaatcgacctgaggacttgcgagccgctcagctcccgggacgtttggagctgctgctaaataatttctgctcagccatgtcgccggctccagatgcagccccggctcctgcgtcgatctccctgtttgacctcagcgcggatgctccggtctttcagggcctgagcctggtgagccacgcgcctggggaggctctggcccgggctccgcgtacttcctgttcaggctcaggggagagagaaagcccagaaagaaagctactccagggtcctatggatatttcagagaagttattttgttcaacttgtgaccagaccttccagaaccaccaagaacagagggaacattataagcttgactggcatcggtttaacctaaagcaacgtctcaaggacaagcctctcctgtctgccctggactttgaaaagcagagctccacaggagatctttccagcatctcgggatcagaagactcagactcagccastgaggaggacttgcagacactggatcgggagagggytacatttgagaagttgagccgacccccaggcttttaccctcatcgagttcttttccagaatgcccagggccagtttctttatgcctaccgctgtgtcctaggccctcatcaggcaagtgacagtacagaagaggcagaactgctgctacagaacctgcaaagtagaggtcccagagactgcgtggtgctcatggctgcagctgggcactttgctggtgctatatttcaaggaagagaagtggtgacacacaaaacttttcaccgctatacggttcgggccaagcggggcacagcccaggggcttcgggatgcccgaggtgggccatcacactctgctggagccaacctgaggcgctacaatgaagccacactatrtaaggatgttcgtgacctgctggcagggccaagctgggctaaggcgctggaggaggctggtacaatactgttgcgtgctccccgctctggccggtctttgttctttggaggcaagggagcacccctgcaaaggggggatccccgactttgggatatccccctcgccacccgcagacccaccttccaagagctacagcgtgtgctccataagctgaccactttgcatgtctatgaagaagaccctcgggaagcagtcagactgcactcacctcagacacactggaaaacagtaagagaggagagaaagaagcctactgaggaagaaataagaaagatctgcagggatgaaaaggaagcgctggggcagaatgaggaatctcccaaacagggttcagggtcggagggagaagatggctttcaggtagagttggagctagtggagttgactgtggggactctggatctttgtgagtctgaagtattgcccaagcggaggaggagaaaaaggaataagaaggagaaaagccgagaccaggaggctggggcacatcggactcttctccagcaaactcaagaagaggagccttccacacagtcatcccaggcagttgctgcccccttgggccctttgctggatgaggccaaagcccctggtcagccagagctctggaatgcactgcttgctgcttgccgagctggagatgttggagtgctaaagctgcagctarctcccagccctgcagaccctagagttctgtctctgctcagtgcccccttgggctccggtggctttactctcctgcatgcagcagctgcagctggaagaggctcagtggttcgtctgctgctggaagcaggtgctgaccccactgtgcaggactstcgggccyggccaccttatactgttgcrgctgacaaatcaacacgtaatgagttccgaaggttcatggagaagaatccagatgcctacgattacaacaaggctcaggtgccaggaccattgacaccagaaatggaggcacggcaggctacacggaaaagggagcagaaggcagcccggcggcaacgggaggaacagcagcagaggcagcaggagcaggaggagcgtgaacgagaagagcagcggcgatttgccgccctcagtgaccgagagaagagagctctggctgcagagcgccgactcgctgcccagttgggagcccctacctctcyaatccctgactctgcaatcgtcaatactcgacgctgctggagttgtggggcatccctccaaggcctgactccctttcactacctcgacttctctttytgctccacacgttgcctccaggatcatcgccgtcaggcagggaggccctcttcctgatctcttacagctctacctggggccaactcagggacctgagagggcacattcacagcagccctaggttttttyttccccgtgaaaccagagatgatttggaaratgggggtgaaggacactcgggaactagggcaaagacagggctaraggtatgtggagctggtactgtctctggaattttaatcmcaataaagtttggcaaggaatgtgtacttgtacttacattcagaggcactgtggcctttagttccttagggtcaccgtggccagcaccaagggatcctgcccactccatgtcccaggtccaagggttactttttttttttttttttttttttgagatggagtgtctcactgtcagccaggctggaagcgagactctgtctcaaaaaacacaaacaaacaaacaaaagaaatgtaaaatctcagatcctacctcagacctatagaatcagaatttgtattttaacaagattcccaggtgatcctaggcaccttcaaaattgagaagcatggctttacttgactgggctccctgaggacagggagtgccctgttcatctcaaatcctcagcctctagcacagggccgggtatatagtaggttaaatctggatgaatcaatgtcataaccaaaaggctaaaacaggttcagaaccaggggaaaccattggaaaatcttcagggtgatccggggtgtggaagggaggaaccaggtcacaagaaggacctctttcctggagagtcctgtttcagcaaaacagccattccctc

SEQ ID NO: 184 - DNA, 3265 bp, Homo sapiens
gccccgccggcggcgccccttcctccgttacccgccgcgagctcacttagggctccgcaggcacccctgggcaaggccagacacggggcctgggattccaataaccggtctcacgtcttacctcaggaacagcgacccgggtgattccagaggctccgccggctccgctcgrctcggctcggctcggcgcgacccgcggcgctaggccgggtgtctgccactcactgtcacccgcagccaggctggccaataagcacggggggcggagacacaacggccaattctcggcttcagggacgggactaaagtctcgaggcgggtcttggacagtcagcggcccaatagtgtgctctacgtggggcggggctcaggtgcggacgccgccggttgtcctcttcgctgctccgtagtgacgrggattgttgtgttgcagaaatccggcaatcgacctgaggacttgcgagccgctcagctcccgggacgtttggagctgctgctaaataatttctgctcagccatgtcgccggctccagatgcagccccggctcctgcgtcgatctccctgtttgacctcagcgcggatgctccggtctttcagggcctgagcctggtgagccacgcgcctggggaggctctggcccgggctccgcgtacttcctgttcaggctcaggggagagagaaagcccagaaagaaagctactccagggtcctatggatatttcagagaagttattttgttcaacttgtgaccagaccttccagaaccaccaagaacagagggaacattataagcttgactggcatcggtttaacctaaagcaacgtctcaaggacaagcctctcctgtctgccctggactttgaaaagcagagctccacaggagatctttccagcatctcgggatcagaagactcagactcagccastgaggaggacttgcagacactggatcgggagagggytacatttgagaagttgagccgacccccaggcttttaccctcatcgagttcttttccagaatgcccagggccagtttctttatgcctaccgctgtgtcctaggccctcatcaggatcccccagaagaggcagaactgctgctacagaacctgcaaagtagaggtcccagagactgcgtggtgctcatggctgcagctgggcactttgctggtgctatatttcaaggaagagaagtggtgacacacaaaacttttcaccgctatacggttcgggccaagcggggcacagcccaggggcttcgggatgcccgaggtgggccatcacactctgctggagccaacctgaggcgctacaatgaagccacactatrtaaggatgttcgtgacctgctggcagggccaagctgggctaaggcgctggaggaggctggtacaatactgttgcgtgctccccgctctggccggtctttgttctttggaggcaagggagcacccctgcaaaggggggatccccgactttgggatatccccctcgccacccgcagacccaccttccaagagctacagcgtgtgctccataagctgaccactttgcatgtctatgaagaagaccctcgggaagcagtcagactgcactcacctcagacacactggaaaacagtaagagaggagagaaagaagcctactgaggaagaaataagaaagatctgcagggatgaaaaggaagcgctggggcagaatgaggaatctcccaaacagggttcagggtcggagggagaagatggctttcaggtagagttggagctagtggagttgactgtggggactctggatctttgtgagtctgaagtattgcccaagcggaggaggagaaaaaggaataagaaggagaaaagccgagaccaggaggctggggcacatcggactcttctccagcaaactcaagaagaggagccttccacacagtcatcccaggcagttgctgcccccttgggccctttgctggatgaggccaaagcccctggtcagccagagctctggaatgcactgcttgctgcttgccgagctggagatgttggagtgctaaagctgcagctarctcccagccctgcagaccctagagttctgtctctgctcagtgcccccttgggctccggtggctttactctcctgcatgcagcagctgcagctggaagaggctcagtggttcgtctgctgctggaagcaggtgctgaccccactgtgcaggactstcgggccyggccaccttatactgttgcrgctgacaaatcaacacgtaatgagttccgaaggttcatggagaagaatccagatgcctacgattacaacaaggctcaggtgccaggaccattgacaccagaaatggaggcacggcaggctacacggaaaagggagcagaaggcagcccggcggcaacgggaggaacagcagcagaggcagcaggagcaggaggagcgtgaacgagaagagcagcggcgatttgccgccctcagtgaccgagagaagagagctctggctgcagagcgccgactcgctgcccagttgggagcccctacctctcyaatccctgactctgcaatcgtcaatactcgacgctgctggagttgtggggcatccctccaaggcctgactccctttcactacctcgacttctctttytgctccacacgttgcctccaggatcatcgccgtcaggcagggaggccctcttcctgatctcttacagctctacctggggccaactcagggacctgagagggcacattcacagcagccctaggttttttyttccccgtgaaaccagagatgatttggaaratgggggtgaaggacactcgggaactagggcaaagacagggctaraggtatgtggagctggtactgtctctggaattttaatcmcaataaagtttggcaaggaatgtgtacttgtacttacattcagaggcactgtggcctttagttccttagggtcaccgtggccagcaccaagggatcctgcccactccatgtcccaggtccaagggttactttttttttttttttttttttttgagatggagtgtctcactgtcagccaggctggagtgcagtggtacaacctccactcactgcaacctctgcctcctggattcaagcaattctcctgccctcagcctcccaagtagctgggattagaggtgcccaccatcacgcccggctaatttttgtatttttagtggagacggggtttcaccatgttggccaggctggtcttgaagtcctgacctcaggtaatccacc

SEQ ID NO: 185 - DNA, 3471 bp, Homo sapiens
gccccgccggcggcgccccttcctccgttacccgccgcgagctcacttagggctccgcaggcacccctgggcaaggccagacacggggcctgggattccaataaccggtctcacgtcttacctcaggaacagcgacccgggtgattccagaggctccgccggctccgctcgrctcggctcggctcggcgcgacccgcggcgctaggccgggtgtctgccactcactgtcacccgcagccaggctggccaataagcacggggggcggagacacaacggccaattctcggcttcagggacgggactaaagtctcgaggcgggtcttggacagtcagcggcccaatagtgtgctctacgtggggcggggctcaggtgcggacgccgccggttgtcctcttcgctgctccgtagtgacgrggattgttgtgttgcagaaatccggcaatcgacctgaggacttgcgagccgctcagctcccgggacgtttggagctgctgctaaataatttctgctcagccatgtcgccggctccagatgcagccccggctcctgcgtcgatctccctgtttgacctcagcgcggatgctccggtctttcagggcctgagcctggtgagccacgcgcctggggaggctctggcccgggctccgcgtacttcctgttcaggctcaggggagagagaaagcccagaaagaaagctactccagggtcctatggatatttcagagaagttattttgttcaacttgtgaccagaccttccagaaccaccaagaacagagggaacattataagcttgactggcatcggtttaacctaaagcaacgtctcaaggacaagcctctcctgtctgccctggactttgaaaagcagagctccacaggagatctttccagcatctcgggatcagaagactcagactcagccastgaggaggacttgcagacactggatcgggagagggytacatttgagaagttgagccgacccccaggcttttaccctcatcgagttcttttccagaatgcccagggccagtttctttatgcctaccgctgtgtcctaggccctcatcaggatcccccagaagaggcagaactgctgctacagaacctgcaaagtagaggtcccagagactgcgtggtgctcatggctgcagctgggcactttgctggtgctatatttcaaggaagagaagtggtgacacacaaaacttttcaccgctatacggttcgggccaagcggggcacagcccaggggcttcgggatgcccgaggtgggccatcacactctgctggagccaacctgaggcgctacaatgaagccacactatrtaaggatgttcgtgacctgctggcagggccaagctgggctaaggcgctggaggaggctggtacaatactgttgcgtgctccccgctctggccggtctttgttctttggaggcaagggagcacccctgcaaaggggggatccccgactttgggatatccccctcgccacccgcagacccaccttccaagagctacagcgtgtgctccataagctgaccactttgcatgtctatgaagaagaccctcgggaagcagtcagactgcactcacctcagacacactggaaaacagtaagagaggagagaaagaagcctactgaggaagaaataagaaagatctgcagggatgaaaaggaagcgctggggcagaatgaggaatctcccaaacagggttcagggtcggagggagaagatggctttcaggtagagttggagctagtggagttgactgtggggactctggatctttgtgagtctgaagtattgcccaagcggaggaggagaaaaaggaataagaaggagaaaagccgagaccaggaggctggggcacatcggactcttctccagcaaactcaagaagaggagccttccacacagtcatcccaggcagttgctgcccccttgggccctttgctggatgaggccaaagcccctggtcagccagagctctggaatgcactgcttgctgcttgccgagctggagatgttggagtgctaaagctgcagctarctcccagccctgcagaccctagagttctgtctctgctcagtgcccccttgggctccggtggctttactctcctgcatgcagcagctgcagctggaagaggctcagtggttcgtctgctgctggaagcaggtgctgaccccactgtgcaggactstcgggccyggccaccttatactgttgcrgctgacaaatcaacacgtaatgagttccgaaggttcatggagaagaatccagatgcctacgattacaacaaggctcaggtgccaggaccattgacaccagaaatggaggcacggcaggctacacggaaaagggagcagaaggcagcccggcggcaacgggaggaacagcagcagaggcagcaggagcaggaggagcgtgaacgagaagagcagcggcgatttgccgccctcagtgaccgagagaagagagctctggctgcagagcgccgactcgctgcccagttgggagcccctacctctcyaatccctgactctgcaatcgtcaatactcgacgctgctggagttgtggggcatccctccaaggcctgactccctttcactacctcgacttctctttytgctccacacgttgcctccaggatcatcgccgtcaggcagggaggccctcttcctgatctcttacagctctacctggggccaactcagggacctgagagggcacattcacagcagccctaggttttttyttccccgtgaaaccagagatgatttggaaratgggggtgaaggacactcgggaactagggcaaagacagggctaraggtatgtggagctggtactgtctctggaattttaatcmcaataaagtttggcaaggaatgtgtacttgtacttacattcagaggcactgtggcctttagttccttagggtcaccgtggccagcaccaagggatcctgcccactccatgtcccaggtccaagggttactttttttttttttttttttttttgagatggagtgtctcactgtcagccaggctggaagcgagactctgtctcaaaaaacacaaacaaacaaacaaaagaaatgtaaaatctcagatcctacctcagacctatagaatcagaatttgtattttaacaagattcccaggtgatcctaggcaccttcaaaattgagaagcatggctttacttgactgggctccctgaggacagggagtgccctgttcatctcaaatcctcagcctctagcacagggccgggtatatagtaggttaaatctggatgaatcaatgtcataaccaaaaggctaaaacaggttcagaaccaggggaaaccattggaaaatcttcagggtgatccggggtgtggaagggaggaaccaggtcacaagaaggacctctttcctggagagtcctgtttcagcaaaacagccattccctc

SEQ ID NO: 186 - DNA, 2610 bp, Homo sapiens
gcgccatgacgtcacgcctgcggagctgccgccgcgcgccggtggggcgcgagcgtgtgcggggcgcgggcgcgggcgcgggcgcgggcgcgtgcgggctgcgagccgggaggcggcggcggcgacggcgacggcggcggcatggcggagagcgaggccgagacccccagcaccccgggggagttcgagagcaagtacttcgagttccatggcgtgcggctgccgcccttctgccgcgggaagatggaggagatcgccaacttcccggtgcggcccagcgacgtgtggatcgtcacctaccccaagtccggcaccagcttgctgcaggaggtggtctacttggtgagccagggcgctgaccccgatgagatcggcttgatgaacatcgacgagcagctcccggtcctggagtacccacagccgggcctggacatcatcaaggaactgacctctccccgcctcatcaagagccacctgccctaccgctttctgccctctgacctccacaatggagactccaaggtcatctatatggctcgcaaccccaaggatctggtggtgtcttattatcagttccaccgctctctgcggaccatgagctaccgaggcacctttcaagaattctgccggaggtttatgaatgataagctgggctacggctcctggtttgagcacgtgcaggagttctgggagcaccgcatggactcgaacgtgctttttctcaagtatgaagacatgcatcgggacctggtgacgatggtggagcagctggccagattcctgggggtgtcctgtgacaaggcccagctggaagccctgacggagcactgccaccagctggtggaccagtgctgcaacgctgaggccctgcccgtgggccgggcacattgcgtctttgctcggaagatcttcttgagttggtgagaatgcagggccgagtagccagctgcattgcttagatttgattcatgtcacagcataaattgtcttgattccaaatcgaagagttgggctgtggaaggacatcttcaccgtctccatgaatgagaagtttgacttggtgtataaacagaagatgggaaagtgtgacctcacgtttgacttttatttataataacagaaacaacaacctgcatgctcacaatacccagacagtctactagccaaaagtcctgtatgcattcatttattccttgctggacaaactctggaagcagcgtgtgaaacagcgggggaagggaagagcggcgtgagcggagggagtgtgatgattcccaaccgaaagcagctgtctcgcctttagaacgtgcagcctctccatgtctgattacaaacagtctccacattgcagttccaatggcctggaccgtaaggataaagcctgtaatatatgcaactagaatgtctgccttttcaaccccgtattatttattgtattttatagagcttttcactggaaatctacataaatgtcagtaaaccaaataaaagttcatttccaaggggaatcaggagcgagccacaccckaatggtagaaagatctcagggttaactctttatttttgtagttttattatctaaggcacagccattctgttctcacttggttctgagatagtggtgagaacagaggatgagttgggtctgttggggggaatctggacacttgtttattctgacggagttcacttcttcagaaccttcctgaaatgagcagaaattgttcactaggtcttcagaatggacgtccytctgccagagacttccagcgggcggctccaaaggcccaatgcagaggagcccgcggagcatgtgctgagggaagtctgcctggtgaggctggcaggtgggagtctaatgcagtcaggagcatttgcatgcagtgggtggagagtcggccaccaaaggaccgagttgcgctcggaatttgagctgaattccacagccttactttgtttcctgaagtgatagcctactaatgctggcaagcagatgcttaatagtaaatttctaaaatccccgggtctttatcattcagtttgttctgtgcacctgaggcgctcagccgtgggaggaccattttgcgagtgtagccctgtttcactcggatcaggttggcacggccgcctgcgtgtctgtccacctcatccctccgtgtatctgagggagtaaaggtgaggtctttattgcttcactgcctaattttctcacccacattcgctgaagcgatggagagtcgggggccagtagccagccaaccccgtggggaccggggttgtctgtcatttatgtggctggaaagcacccaaagtggtggtcaggagkgtcgctgctgtggaaggggtctccgttcttggtgctgtatttgaaacgggtgtagagagaagcttgtgtttttgtttgtaatggggagaagcgtggccaggcaggtggcacgtggcatcgcatggtgggctcggcagcaccttgcctgtgtttctgtgagggaggctgctttctgtgaaatttcatttatatttttctatttttagtactgtatggatgttactgagcactacacatgatccttctgtgcttgcttgcatctttaataaagacatgttcccggc

SEQ ID NO: 187 - DNA, 2498 bp, Homo sapiens
gcgccatgacgtcacgcctgcggagctgccgccgcgcgccggtggggcgcgagcgtgtgcggggcgcgggcgcgggcgcgggcgcgggcgcgtgcgggctgcgagccgggaggcggcggcggcgacggcgacggcggcggcatggcggagagcgaggccgagacccccagcaccccgggggagttcgagagcaagtacttcgagttccatggcgtgcggctgccgcccttctgccgcgggaagatggaggagatcgccaacttcccggtgcggcccagcgacgtgtggatcgtcacctaccccaagtccggcaccagcttgctgcaggaggtggtctacttggtgagccagggcgctgaccccgatgagatcggcttgatgaacatcgacgagcagctcccggtcctggagtacccacagccgggcctggacatcatcaaggaactgacctctccccgcctcatcaagagccacctgccctaccgctttctgccctctgacctccacaatggagactccaaggtcatctatatggctcgcaaccccaaggatctggtggtgtcttattatcagttccaccgctctctgcggaccatgagctaccgaggcacctttcaagaattctgccggaggtttatgaatgataagctgggctacggctcctggtttgagcacgtgcaggagttctgggagcaccgcatggactcgaacgtgctttttctcaagtatgaagacatgcatcggacggcccttcctgcmcccataggccaagttcaaagggatccaggaatagatctgraatgttccagatccatttccaaggcttcctttagttcagtagctggccggacagcaagtggccccagcagttctcttgtttgcgtttcaggaagagttgggctgtggaaggacatcttcaccgtctccatgaatgagaagtttgacttggtgtataaacagaagatgggaaagtgtgacctcacgtttgacttttatttataataacagaaacaacaacctgcatgctcacaatacccagacagtctactagccaaaagtcctgtatgcattcatttattccttgctggacaaactctggaagcagcgtgtgaaacagcgggggaagggaagagcggcgtgagcggagggagtgtgatgattcccaaccgaaagcagctgtctcgcctttagaacgtgcagcctctccatgtctgattacaaacagtctccacattgcagttccaatggcctggaccgtaaggataaagcctgtaatatatgcaactagaatgtctgccttttcaaccccgtattatttattgtattttatagagcttttcactggaaatctacataaatgtcagtaaaccaaataaaagttcatttccaaggggaatcaggagcgagccacaccckaatggtagaaagatctcagggttaactctttatttttgtagttttattatctaaggcacagccattctgttctcacttggttctgagatagtggtgagaacagaggatgagttgggtctgttggggggaatctggacacttgtttattctgacggagttcacttcttcagaaccttcctgaaatgagcagaaattgttcactaggtcttcagaatggacgtccytctgccagagacttccagcgggcggctccaaaggcccaatgcagaggagcccgcggagcatgtgctgagggaagtctgcctggtgaggctggcaggtgggagtctaatgcagtcaggagcatttgcatgcagtgggtggagagtcggccaccaaaggaccgagttgcgctcggaatttgagctgaattccacagccttactttgtttcctgaagtgatagcctactaatgctggcaagcagatgcttaatagtaaatttctaaaatccccgggtctttatcattcagtttgttctgtgcacctgaggcgctcagccgtgggaggaccattttgcgagtgtagccctgtttcactcggatcaggttggcacggccgcctgcgtgtctgtccacctcatccctccgtgtatctgagggagtaaaggtgaggtctttattgcttcactgcctaattttctcacccacattcgctgaagcgatggagagtcgggggccagtagccagccaaccccgtggggaccggggttgtctgtcatttatgtggctggaaagcacccaaagtggtggtcaggagkgtcgctgctgtggaaggggtctccgttcttggtgctgtatttgaaacgggtgtagagagaagcttgtgtttttgtttgtaatggggagaagcgtggccaggcaggtggcacgtggcatcgcatggtgggctcggcagcaccttgcctgtgtttctgtgagggaggctgctttctgtgaaatttcatttatatttttctatttttagtactgtatggatgttactgagcactacacatgatccttctgtgcttgcttgcatctttaataaagacatgttcccggc

SEQ ID NO: 188 - DNA, 2492 bp, Homo sapiens
gcgccatgacgtcacgcctgcggagctgccgccgcgcgccggtggggcgcgagcgtgtgcggggcgcgggcgcgggcgcgggcgcgggcgcgtgcgggctgcgagccgggaggcggcggcggcgacggcgacggcggcggcatggcggagagcgaggccgagacccccagcaccccgggggagttcgagagcaagtacttcgagttccatggcgtgcggctgccgcccttctgccgcgggaagatggaggagatcgccaacttcccggtgcggcccagcgacgtgtggatcgtcacctaccccaagtccggcaccagcttgctgcaggaggtggtctacttggtgagccagggcgctgaccccgatgagatcggcttgatgaacatcgacgagcagctcccggtcctggagtacccacagccgggcctggacatcatcaaggaactgacctctccccgcctcatcaagagccacctgccctaccgctttctgccctctgacctccacaatggagactccaaggtcatctatatggctcgcaaccccaaggatctggtggtgtcttattatcagttccaccgctctctgcggaccatgagctaccgaggcacctttcaagaattctgccggaggtttatgaatgataagctgggctacggctcctggtttgagcacgtgcaggagttctgggagcaccgcatggactcgaacgtgctttttctcaagtatgaagacatgcatcgggacctggtgacgatggtggagcagctggccagattcctgggggtgtcctgtgacaaggcccagctggaagccctgacggagcactgccaccagctggtggaccagtgctgcaacgctgaggccctgcccgtgggccggggaagagttgggctgtggaaggacatcttcaccgtctccatgaatgagaagtttgacttggtgtataaacagaagatgggaaagtgtgacctcacgtttgacttttatttataataacagaaacaacaacctgcatgctcacaatacccagacagtctactagccaaaagtcctgtatgcattcatttattccttgctggacaaactctggaagcagcgtgtgaaacagcgggggaagggaagagcggcgtgagcggagggagtgtgatgattcccaaccgaaagcagctgtctcgcctttagaacgtgcagcctctccatgtctgattacaaacagtctccacattgcagttccaatggcctggaccgtaaggataaagcctgtaatatatgcaactagaatgtctgccttttcaaccccgtattatttattgtattttatagagcttttcactggaaatctacataaatgtcagtaaaccaaataaaagttcatttccaaggggaatcaggagcgagccacaccckaatggtagaaagatctcagggttaactctttatttttgtagttttattatctaaggcacagccattctgttctcacttggttctgagatagtggtgagaacagaggatgagttgggtctgttggggggaatctggacacttgtttattctgacggagttcacttcttcagaaccttcctgaaatgagcagaaattgttcactaggtcttcagaatggacgtccytctgccagagacttccagcgggcggctccaaaggcccaatgcagaggagcccgcggagcatgtgctgagggaagtctgcctggtgaggctggcaggtgggagtctaatgcagtcaggagcatttgcatgcagtgggtggagagtcggccaccaaaggaccgagttgcgctcggaatttgagctgaattccacagccttactttgtttcctgaagtgatagcctactaatgctggcaagcagatgcttaatagtaaatttctaaaatccccgggtctttatcattcagtttgttctgtgcacctgaggcgctcagccgtgggaggaccattttgcgagtgtagccctgtttcactcggatcaggttggcacggccgcctgcgtgtctgtccacctcatccctccgtgtatctgagggagtaaaggtgaggtctttattgcttcactgcctaattttctcacccacattcgctgaagcgatggagagtcgggggccagtagccagccaaccccgtggggaccggggttgtctgtcatttatgtggctggaaagcacccaaagtggtggtcaggagkgtcgctgctgtggaaggggtctccgttcttggtgctgtatttgaaacgggtgtagagagaagcttgtgtttttgtttgtaatggggagaagcgtggccaggcaggtggcacgtggcatcgcatggtgggctcggcagcaccttgcctgtgtttctgtgagggaggctgctttctgtgaaatttcatttatatttttctatttttagtactgtatggatgttactgagcactacacatgatccttctgtgcttgcttgcatctttaataaagacatgttcccggc

SEQ ID NO: 189 - DNA, 2924 bp, Homo sapiens
cccttgagttgcacaagaaggaaacattgcatagaatgaaaaatgacagcaaactgctgaggtcacttccccaggcccactgaatgagaatatcagttcctgtgctggagagaaaggcagtcagaggagaaaatgaggtccagctcgtccctggctctctctctctctcaggtcctgatgtcttttccaagtctggagagcagcgatgctgcctgtgccctgcgcagaaaaccgtgttccggctgcagctaaccaccgcaggctcaatgtctctgggtgtatctcagagataagcaggtggtggtgttccttgcttatcccacaagggcacctggccggaataatggagtcacttccctccactggcctgaccccactctttctctttcctggacacaggaggcatacacggaatacctgaggagcatccactatatctcccaggtgttactagaagaagtggaaaccactaaagaagctggggaaactgtgccccccgayacctccaagatgctgaarctagcacagcagtgtctggagagggcccagtcgacggccgccaagcttgggaaaacacgcctgaagccaaccatgcctgcagctgctcccatyccccagcctgccggccgacaccgccgtgtatactccgatgaaggaggaaagctctctccttttctgccacccgagatcttccagaagcttcagggggcagagtcacaaagctgtaagaaagagctgacgccactggaggaggcctccctgcagaatcagaagctgaaggctgcgtatgaggcccgaatggcgcggctagaccccagccaggccatgcagaagacatccctgaccctctctctacagcggcagatgatggagaacctagtgattgccaaagcccgggaggagacactccagagaaagatggaggagcgccggctgcggctccaggaggccgccaacaggaggttttgcagccaagtcgccctgaccccggaggaacgggagcagcgggccctttacgccgccatcctggagtacgaacaggaccatgactggccgaagcactggaaggccaagctcaagaggaatccgggggacctgtcactcgtraccagcctggtctcacacctgctcagcctccccgaccacccgatcgcgcagctcctgaggcggctgcagtgctccgtgtacagcgccctgtatcccgccgtgagcagagcagccgcgccagccccaggctgctgccccccgacccccaaccccggaagccgacggctgcggccctcgcagagcctccattgcatgctgtccccgcccgagcccagcgcagccccgcggccccaggacagtccccccacgcccccactccaacccggccccgtggggtctccctcacccctgggggacaccgcatctggattgccagacaaggacagctcgttcgaggacctggagcagttcctggggacgtctgagcggcagggccggggccgtggggtacagccggagccccagctgcagcagctgaagaccgcggtggaggagatccacaatgccgtagacaggctgctctcgctgacccttctggccttcgaaggcctaaacacagctgcctccaaggaccgctgcctggcctgcattgaggaaccctttttctccccgctgtggcctctgctgctggccctgtacaggagcgtgcaccgagcccgggaggctgccctgagcaggagcatggagctctacaggaatgcaccccccaccgccattggcatccccaccaagctcctcccccagaaccctgaggccaagggggccactggctacccctactgcgcggcggcccaggagctcggactgctggtcctggagagctgcccccagaagaagctggagtgcatagtgcggaccctgcggatcatctgtgtctgtgcggaagactactgccccaccccagaggccacaccccaggccgggcccccgcccatcgctgcagctgccattggtgccgatgacctgctgcccatcctgtccttcgtggtgctgaggagcggcctccctcagctggtgtcggagtgcgcggccctggaggagttcatccacgaggggtacctgatcggagaggagggctactgcctcacatcactgcagagtgccctgagctacgtggagctgctgccccrgggaggcctggccaagtagtacagctagagcccagggtccctgcagggcctggcctcgcctcccagggctgtctctcctacacctggagccatgggatctactgaggaccatcctggagcctcacgctgctctgcacatggtgggggcttgtccactgtggtgtgctctccagctcttcaccttcctcacctcacatctgaccctggagcttggggttggcacctctgccccgacagaatggggctgaatcagctccaggaggaaccaggccctgctctcctgtgtaggcctcagagaggccaagaagggaagctttgggcttcggtgggtgcaggctcagygatgaacatctggctggggcagctcctggggagcatcagggaagagggggccatgagccrgccagcagtggagacggcagtccagtttctctcccctctgacccctagaaggggagttgtagccccatgaactagtttcttgtctgggtcaggaacaagggccggctggggcctggggtgcagctggtgtcagggtatgctgtttgctgatgggcagggacacccctgcagggtctcgggctctgagcccaggacattccctgccccttrctcaccttggctgtgggctgtgaacattccgggaccctgggcatcttatctaggtccgtgcagcccaagggtcagccctcttgactgtcacatgctgcccccacccagcctaaaataaagagctcactgctgtgc

SEQ ID NO: 190 - DNA, 3891 bp, Homo sapiens
gcccgcggtgacagcgctcctcacgccgggtcccttctggccgagcccgcggccggggaggccgggccggcgacgccggcgtcacggagcgcgaggaaaaccgagccggccgcccagcgcctatcccgacgcagccccgagtccgctacgcccttggccgggtggaggagaggccgcgccggcttccgggcgtcagtgcggctcctcccacgagcaacccctgccgcgaccccaacccgccacgcccgggccgcggacccacctgcctcgtccgcgccgtcctcgcccgcgtccccgcaggaccccaccgggccccaggcgcgccgcgccgtcgccccgtccaccctcggcccaccgctaagggaagggcggccccgagtccggctgacgccgccgccgccgtccgaggccccgcactgtcgggacgacccaggagacaggaagcggcccagccggtcccgcttcatggcagcggaggacgccagcagaatcccgcgggtgctgcccggcccgaggttcctagaggacccggcgttaggctccgctcggcgcgctggaagcgaggcggggcgggggaggggcggagcgagaagcaaagcgaggcgggcggggcgggccaggggccaggggcgggaccccgccggccgaggttccacccgcggtgccagcgcccccgctcgtaccgctcccctctcgggcccgagggcggccgtgcccgcctctgtcgccaatggagcgctggcctggggcggggcggtgggcggaggggctcgccgacacctcacgacgagtcctccagggagaggcgacgcggccctcaccgcctcttaccgtgggagacggaggcgcggggcgggcaggcgccggcggaggccacgcggcgcgcaggtggcgggcgggctgcagaaaggggaggggggccggggtctcacgtagagaggggcctggctgccgcggttagacgcccatggcaactccgtgaggggcccttctcgccagccccgtctcaagacggcgaagaggcccggctccgtcgcgacaacccacccggactctgccgcccccgccactaacacccgtggggcccgcagtacgcgcggagggggcccgtcgccggaagtgcggccgcgtcccttcctgcggtccgctgctcgggcggctccagcaccagcgccggctgcgttccgggcctccggtcgcccgtccagcccctcggctaccgccgccgcctcccccgctcggcgccatggccgctgcggccggggacggcacggtgaagccgctgcagagcgccatgaagcttgccaacggggccatcgagctggacaccggcaaccggccccgggaggcatacacggaatacctgaggagcatccactatatctcccaggtgttactagaagaagtggaaaccactaaagaagctggggaaactgtgccccccgayacctccaagatgctgaarctagcacagcagtgtctggagagggcccagtcgacggccgccaagcttgggaaaacacgcctgaagccaaccatgcctgcagctgctcccatyccccagcctgccggccgacaccgccgtgtatactccgatgaaggaggaaagctctctccttttctgccacccgagatcttccagaagcttcagggggcagagtcacaaagctgtaagaaagagctgacgccactggaggaggcctccctgcagaatcagaagctgaaggctgcgtatgaggcccgaatggcgcggctagaccccagccaggccatgcagaagacatccctgaccctctctctacagcggcagatgatggagaacctagtgattgccaaagcccgggaggagacagcagcctttctgaccgccctgctccagagaaagatggaggagcgccggctgcggctccaggaggccgccaacaggaggttttgcagccaagtcgccctgaccccggaggaacgggagcagcgggccctttacgccgccatcctggagtacgaacaggaccatgactggccgaagcactggaaggccaagctcaagaggaatccgggggacctgtcactcgtraccagcctggtctcacacctgctcagcctccccgaccacccgatcgcgcagctcctgaggcggctgcagtgctccgtgtacagcgccctgtatcccgccgtgagcagagcagccgcgccagccccaggctgctgccccccgacccccaaccccggaagccgacggctgcggccctcgcagagcctccattgcatgctgtccccgcccgagcccagcgcagccccgcggccccaggacagtccccccacgcccccactccaacccggccccgtggggtctccctcacccctgggggacaccgcatctggattgccagacaaggacagctcgttcgaggacctggagcagttcctggggacgtctgagcggcagggccggggccgtggggtacagccggagccccagctgcagcagctgaagaccgcggtggaggagatccacaatgccgtagacaggctgctctcgctgacccttctggccttcgaaggcctaaacacagctgcctccaaggaccgctgcctggcctgcattgaggaaccctttttctccccgctgtggcctctgctgctggccctgtacaggagcgtgcaccgagcccgggaggctgccctgagcaggagcatggagctctacaggaatgcaccccccaccgccattggcatccccaccaagctcctcccccagaaccctgaggccaagggggccactggctacccctactgcgcggcggcccaggagctcggactgctggtcctggagagctgcccccagaagaagctggagtgcatagtgcggaccctgcggatcatctgtgtctgtgcggaagactactgccccaccccagaggccacaccccaggccgggcccccgcccatcgctgcagctgccattggtgccgatgacctgctgcccatcctgtccttcgtggtgctgaggagcggcctccctcagctggtgtcggagtgcgcggccctggaggagttcatccacgaggggtacctgatcggagaggagggctactgcctcacatcactgcagagtgccctgagctacgtggagctgctgccccrgggaggcctggccaagtagtacagctagagcccagggtccctgcagggcctggcctcgcctcccagggctgtctctcctacacctggagccatgggatctactgaggaccatcctggagcctcacgctgctctgcacatggtgggggcttgtccactgtggtgtgctctccagctcttcaccttcctcacctcacatctgaccctggagcttggggttggcacctctgccccgacagaatggggctgaatcagctccaggaggaaccaggccctgctctcctgtgtaggcctcagagaggccaagaagggaagctttgggcttcggtgggtgcaggctcagygatgaacatctggctggggcagctcctggggagcatcagggaagagggggccatgagccrgccagcagtggagacggcagtccagtttctctcccctctgacccctagaaggggagttgtagccccatgaactagtttcttgtctgggtcaggaacaagggccggctggggcctggggtgcagctggtgtcagggtatgctgtttgctgatgggcagggacacccctgcagggtctcgggctctgagcccaggacattccctgccccttrctcaccttggctgtgggctgtgaacattccgggaccctgggcatcttatctaggtccgtgcagcccaagggtcagccctcttgactgtcacatgctgcccccacccagcctaaaataaagagctcactgctgtgc

SEQ ID NO: 191 - DNA, 2948 bp, Homo sapiens
cccttgagttgcacaagaaggaaacattgcatagaatgaaaaatgacagcaaactgctgaggtcacttccccaggcccactgaatgagaatatcagttcctgtgctggagagaaaggcagtcagaggagaaaatgaggtccagctcgtccctggctctctctctctctcaggtcctgatgtcttttccaagtctggagagcagcgatgctgcctgtgccctgcgcagaaaaccgtgttccggctgcagctaaccaccgcaggctcaatgtctctgggtgtatctcagagataagcaggtggtggtgttccttgcttatcccacaagggcacctggccggaataatggagtcacttccctccactggcctgaccccactctttctctttcctggacacaggaggcatacacggaatacctgaggagcatccactatatctcccaggtgttactagaagaagtggaaaccactaaagaagctggggaaactgtgccccccgayacctccaagatgctgaarctagcacagcagtgtctggagagggcccagtcgacggccgccaagcttgggaaaacacgcctgaagccaaccatgcctgcagctgctcccatyccccagcctgccggccgacaccgccgtgtatactccgatgaaggaggaaagctctctccttttctgccacccgagatcttccagaagcttcagggggcagagtcacaaagctgtaagaaagagctgacgccactggaggaggcctccctgcagaatcagaagctgaaggctgcgtatgaggcccgaatggcgcggctagaccccagccaggccatgcagaagacatccctgaccctctctctacagcggcagatgatggagaacctagtgattgccaaagcccgggaggagacagcagcctttctgaccgccctgctccagagaaagatggaggagcgccggctgcggctccaggaggccgccaacaggaggttttgcagccaagtcgccctgaccccggaggaacgggagcagcgggccctttacgccgccatcctggagtacgaacaggaccatgactggccgaagcactggaaggccaagctcaagaggaatccgggggacctgtcactcgtraccagcctggtctcacacctgctcagcctccccgaccacccgatcgcgcagctcctgaggcggctgcagtgctccgtgtacagcgccctgtatcccgccgtgagcagagcagccgcgccagccccaggctgctgccccccgacccccaaccccggaagccgacggctgcggccctcgcagagcctccattgcatgctgtccccgcccgagcccagcgcagccccgcggccccaggacagtccccccacgcccccactccaacccggccccgtggggtctccctcacccctgggggacaccgcatctggattgccagacaaggacagctcgttcgaggacctggagcagttcctggggacgtctgagcggcagggccggggccgtggggtacagccggagccccagctgcagcagctgaagaccgcggtggaggagatccacaatgccgtagcagacaggctgctctcgctgacccttctggccttcgaaggcctaaacacagctgcctccaaggaccgctgcctggcctgcattgaggaaccctttttctccccgctgtggcctctgctgctggccctgtacaggagcgtgcaccgagcccgggaggctgccctgagcaggagcatggagctctacaggaatgcaccccccaccgccattggcatccccaccaagctcctcccccagaaccctgaggccaagggggccactggctacccctactgcgcggcggcccaggagctcggactgctggtcctggagagctgcccccagaagaagctggagtgcatagtgcggaccctgcggatcatctgtgtctgtgcggaagactactgccccaccccagaggccacaccccaggccgggcccccgcccatcgctgcagctgccattggtgccgatgacctgctgcccatcctgtccttcgtggtgctgaggagcggcctccctcagctggtgtcggagtgcgcggccctggaggagttcatccacgaggggtacctgatcggagaggagggctactgcctcacatcactgcagagtgccctgagctacgtggagctgctgccccrgggaggcctggccaagtagtacagctagagcccagggtccctgcagggcctggcctcgcctcccagggctgtctctcctacacctggagccatgggatctactgaggaccatcctggagcctcacgctgctctgcacatggtgggggcttgtccactgtggtgtgctctccagctcttcaccttcctcacctcacatctgaccctggagcttggggttggcacctctgccccgacagaatggggctgaatcagctccaggaggaaccaggccctgctctcctgtgtaggcctcagagaggccaagaagggaagctttgggcttcggtgggtgcaggctcagygatgaacatctggctggggcagctcctggggagcatcagggaagagggggccatgagccrgccagcagtggagacggcagtccagtttctctcccctctgacccctagaaggggagttgtagccccatgaactagtttcttgtctgggtcaggaacaagggccggctggggcctggggtgcagctggtgtcagggtatgctgtttgctgatgggcagggacacccctgcagggtctcgggctctgagcccaggacattccctgccccttrctcaccttggctgtgggctgtgaacattccgggaccctgggcatcttatctaggtccgtgcagcccaagggtcagccctcttgactgtcacatgctgcccccacccagcctaaaataaagagctcactgctgtgc

SEQ ID NO: 192 - DNA, 473 bp, Homo sapiens
aaatccttcttccaatgttcctcccctctctgtatgaaccctgtgttggggggcagaagatggaagcccttggcaagctcgatcgaaccaagctactaaattgctgagctcgttttaactgaagtgtgagaaggaggtttaaggcaagtagacaacatcctgttgttggggtgcttctctcttttttgcacatctggctgaactgggagtcaggtggttgacttgtgcctggctgcagtagcagcggcatctcccttgcacagttctcctcctcggcctgcccaagagtccaccaggccatkgacgcagtggctgtgtrtsatggcaaaatcagcagggaaaccggcgagaagctcctgcttgccactgggctggatrgcagstatttgcygasgkacagcgagagcgtgccaggcgtgtactgcctatgtgtgctayagcacctggggtacataaaagatatttccggaaaa

SEQ ID NO: 193 - DNA, 485 bp, Homo sapiens
aaatccttcttccaatgttcctcccctctctgtatgaaccctgtgttggggggcagaagatggaagcccttggcaagctcgatcgaaccaagctactaaattgctgagctcgttttaactgaagtgtgagaaggaggtttaaggcaagtagacaacatcctgttgttggggtgcttctctcttttttgcacatctggctgaactgggagtcaggtggttgacttgtgcctggctgcagtagcagcggcatctcccttgcacagttctcctcctcggcctgcccaagagtccaccaggccatkgacgcagtggctgtgtrtsatggcaaaatcagcagggaaaccggcgagaagctcctgcttgccactgggctggatrgcagstatttgcygasgkacagcgagagcgtgccaggcgtgtactgcctatgtgtgctcatytcagaagccagatcaaggcattgtaatacctctgcmgtawcyagk

SEQ ID NO: 194 - DNA, 2456 bp, Homo sapiens
aaatccttcttccaatgttcctcccctctctgtatgaaccctgtgttggggggcagaagatggaagcccttggcaagctcgatcgaaccaagctactaaattgctgagctcgttttaactgaagtgtgagaaggaggtttaaggcaagtagacaacatcctgttgttggggtgcttctctcttttttgcacatctggctgaactgggagtcaggtggttgacttgtgcctggctgcagtagcagcggcatctcccttgcacagttctcctcctcggcctgcccaagagtccaccaggccatkgacgcagtggctgtgtrtsatggcaaaatcagcagggaaaccggcgagaagctcctgcttgccactgggctggatrgcagstatttgcygasgkacagcgagagcgtgccaggcgtgtactgcctatgtgtgctgtatcacggttacatttatacataccgagtgtcccagacagaaacaggttcttrgagtgctgagayagcacctggggtacataaaagatatttccggaaaataaaaaatctcatttcagcatytcagaagccagatcaaggcattgtaatacctctgcmgtawcyagktgagaagaagtcctcagctagaagtacacaaggtactacagggataagagaagatcctgatgtctgcctgaaagccccatgaagaaaaataaaacaccttgtactttattttctataatttaaatatatgctaagtcttatatattgtagataatacagttcggtgagctacaaatgcatttctaaagccattgtagtcctgtaatggaagcatctagcatgtcgtcaaagctgaaatggacttttgtacatagtgaggagctttgaaacgaggattgggaaaaagtaattccgtaggttattttcagttattatatttacaaatgggaaacaaaaggataatgaatactttataaaggattaatgtcaattcttgccaaatataaataaaaataatcctcagtttttgtgaaaagctccatttttagtgaaatattattttatagctactaattttaaaatgtcttgcttgattgtatggtgggaagttggctggtgtcccttgtctttgccaagttctccactagctatggtgtcataggctcttttgggatttttgaagctgtatactgtgtgctaaaacaagcactaaacaaagagtgaaggatttatgtttaattctgaaagcaaccttcttgcctagtgttctgatattggacagtaaaatccacagaccaacctggagttgaaaatcttataatttaaaatatgctctaaacatgtttatcgtatttgatgctacaggatttgaaattgtattacaaatccaatgaaatgagtttttcttttcatttacctctgccccagttgtttctactacatggaagacctcattttgaagggaaatttcagcagctgcagctcatgagtaactgatttgtaacaagcctccttttaaagtaaccctacaaaaccactggaaagtttatggttgtattatttttaaaaaaaattccaagtgattgaaacctacacgagatacagaattttatgcggcattttcttctcacatttatatttttgtgattttgtgattgattatatgtcactttgctacagggctcacagaattcattcactcaacaaacataatagggcgctgagggcatagaagtaaaaacacctggtccctgctctcagttcactgtcttgttggacgagaaaacaataacgataaaagacagtgaaagaaaataacgataaaagacagtgaaagaaaataacaataaaagacaaggaaaaaataacaatgaaagttgataagtacatgataagcgaggttccccgtgtgtaggtagatctggtctttagaggcagatagataggtcagtgcaaatactctggtccatgggccatatgaaaaggctaagcttcactgtaaaataataactgggaattctggattgtgtatgggtgttggtgaacttggttttaattagtgaactgctgagagacagagctattctccatgtactggcaagacctgatttctgagcatttaatatggatgccgtgggagtacaaaagtggagtgtggcctgagtaatgcattatgggtggtttaccatttcttgaggtaaaagcatcacatgaacttgtaaaggaatttaaaaatcctactttcataataagttgcataggtttaataatttttaattatatggcttgagtttaaattgtaataggcgtaactaattttaactctataatgtgttcattctggaataatcctaaacatatgaattatgtttgcatgttcacttccaagagcctttttttgaaaaaaagctttttttgaatcatcaagtctttcacatttaaataaagtgtttgaaagctttatttacctaat

SEQ ID NO: 195 - DNA, 2426 bp, Homo sapiens
agtttcagtttccatttctgatttctgctctctgcgctgagcacagcggcaccaggctgagctaagcagggccgccttgggcaggcmtacstggtggtgcaggcgagacccaggctgggcaaggcgcagtttcagtttccrtcttgggtctctgagctgagcagagtggcaccaggctgagttaagtgggactgccctgggcagacctacctactagagcagaatggagcttcggtcctaccaatgggaggtgatcatgcctgccctggagggcaagaatatcatcatctggctgcccacgggtgccgggaagacccgggcggctgcttatgtggccaagcggcacctagagactgtggatggagccaaggtggttgtattggtcaacagggtgcacctggtgacccagcatggtgaagagttcaggcgyatgctggatggacgctggrccgtgacaaccctgagtggggacatgggaccacgtgctggctttggccacctggcccrgtgccatgacctgctcatctgcacagcagagcttctgcagatggcactgaccagccccgaggaggaggagcacgtggagctcactgtcttctccctgatcgtggtggatgagtgccaccacacgcacaaggacaccgtctacaacgtcatcatgagccagtacctagaacttaaactccagagggcacagccgctaccccaggtgctgggtctcacagcctccccaggcactggcggggcctccaaactcgatggggccatcaaccacgtcctgcagctctgtgccaacttggacacgtggtgcatcatgtcaccccagaactgctgcccccagctgcaggagcacagccaacagccttgcaaacagtacaacctctgccacaggcgcagccaggatccgtttggggacttgctgaagaagctcatggaccaaatccatgaccacctggagatgcctgagttgagccggaaatttgggacgcaaatgtatgagcagcaggtggtgaagctgagtgaggctgcggctttggctgggcttcaggagcaacgggtgtatgcgcttcacctgaggcgctacaatgacgcgctgctcatccatgacaccgtccgcgccgtggatgccttggctgcgctgcaggatttctatcacagggagcacgtcactaaaacccagatcctgtgtgccgagcgccggctgctggccctgttcgatgagggaccagcaagaagtgatccrgaagttccaagatggaaccctgaaccttctggtggccacgagtgtggcggaggaggggctggacatcccacattgcaatgtggtggtgcgttatgggctcttgaccartgaaatctccatggtccaggccaggggccgtgcccgggccgatcagagtgtatacgcgtttgtagcaactgaaggtagccgggagctgaagcgggagctgatcaacgaggcgctggagacgctgatggagcaggcagtggctgctgtgcagaaaatggaccaggccgagtaccaggccaagatccrggatctgcagcaggcagccttgaccaagcgggcggcccaggcagcccagcgggagaaccagcggcagcrgttcccagtggagcacgtgcagctactctgcatcaactgcatggtggctgtgggccatggcagcgacctgcggaaggtggagggcacccaccatgtcaatgtgaaccccaacttctcgaactactataatgtctccagggatcctgtggtcatcaacaaagtcttcaaggactggaagcctgggggtgtcatcagctgcaggaactgtggggaggtctggggtctgcagatgatctacaagtcagtgaagctgccagtgctcaaagtccgcagcatgctgctggagacccctcaggggcggatccaggccaaaaagtggtcccgcgtgcccttctccgtgcctgactttgacttcctgcagcattgtgccgagaacttgtcggacctctccctggactgaccacctcattgctgcagtgcccggtttgggctgtagggggcgggagagtctgcagcagactccaggcccctccttcctgaatcatcagctgtgggcatcaggcccaccagccacacaggagtcctgggcaccctggcttaggctcccgcaatgggaaaacaaccggagggccagagcttagtccagacctaccttgtacgcacatagacattttcatatgcactggatggagttagggaaactgaggcaaaagaatttgccatactgtactcagaatcacgacattccttccctaccaaggccacttctattttttgaggctcctcataaaaataaatgaaaaaatgggatagaaaatgtgtggtgtcttaattttgttggaatataattggtagaaaataaactgcttgtatagtgtgc

SEQ ID NO: 196 - DNA, 2680 bp, Homo sapiens
agtttcagtttccatttctgatttctgctctctgcgctgagcacagcggcaccaggctgagctaagcagggccgccttgggcaggcmtacstggtggtgcaggcgagacccaggctgggcaaggcgcagtttcagtttccrtcttgggtctctgagctgagcagagtggcaccaggctgagttaagtgggactgccctgggcagacctacctactagagcagaatggagcttcggtcctaccaatgggaggtgatcatgcctgccctggagggcaagaatatcatcatctggctgcccacgggtgccgggaagacccgggcggctgcttatgtggccaagcggcacctagagactgtggatggagccaaggtggttgtattggtcaacagggtgcacctggtgacccagcatggtgaagagttcaggcgyatgctggatggacgctggrccgtgacaaccctgagtggggacatgggaccacgtgctggctttggccacctggcccrgtgccatgacctgctcatctgcacagcagagcttctgcagatggcactgaccagccccgaggaggaggagcacgtggagctcactgtcttctccctgatcgtggtggatgagtgccaccacacgcacaaggacaccgtctacaacgtcatcatgagccagtacctagaacttaaactccagagggcacagccgctaccccaggtgctgggtctcacagcctccccaggcactggcggggcctccaaactcgatggggccatcaaccacgtcctgcagctctgtgccaacttggacacgtggtgcatcatgtcaccccagaactgctgcccccagctgcaggagcacagccaacagccttgcaaacagtacaacctctgccacaggcgcagccaggatccgtttggggacttgctgaagaagctcatggaccaaatccatgaccacctggagatgcctgagttgagccggaaatttgggacgcaaatgtatgagcagcaggtggtgaagctgagtgaggctgcggctttggctgggcttcaggagcaacgggtgtatgcgcttcacctgaggcgctacaatgacgcgctgctcatccatgacaccgtccgcgccgtggatgccttggctgcgctgcaggatttctatcacagggagcacgtcactaaaacccagatcctgtgtgccgagcgccggctgctggccctgttcgatgaccgcaagaatgagctggcccacttggcaactcatggcccagagaatccaaaactggagatgctggaaaagatcctgcaaaggcagttcagtagctctaacagccctcggggtatcatcttcacccgcacccgccaaagcgcacactccctcctgctctggctccagcagcagcagggcctgcagactgtggacatccgggcccagctactgattggggctgggaacagcagccagagcacccacatgacccagagggaccagcaagaagtgatccrgaagttccaagatggaaccctgaaccttctggtggccacgagtgtggcggaggaggggctggacatcccacattgcaatgtggtggtgcgttatgggctcttgaccartgaaatctccatggtccaggccaggggccgtgcccgggccgatcagagtgtatacgcgtttgtagcaactgaaggtagccgggagctgaagcgggagctgatcaacgaggcgctggagacgctgatggagcaggcagtggctgctgtgcagaaaatggaccaggccgagtaccaggccaagatccrggatctgcagcaggcagccttgaccaagcgggcggcccaggcagcccagcgggagaaccagcggcagcrgttcccagtggagcacgtgcagctactctgcatcaactgcatggtggctgtgggccatggcagcgacctgcggaaggtggagggcacccaccatgtcaatgtgaaccccaacttctcgaactactataatgtctccagggatcctgtggtcatcaacaaagtcttcaaggactggaagcctgggggtgtcatcagctgcaggaactgtggggaggtctggggtctgcagatgatctacaagtcagtgaagctgccagtgctcaaagtccgcagcatgctgctggagacccctcaggggcggatccaggccaaaaagtggtcccgcgtgcccttctccgtgcctgactttgacttcctgcagcattgtgccgagaacttgtcggacctctccctggactgaccacctcattgctgcagtgcccggtttgggctgtagggggcgggagagtctgcagcagactccaggcccctccttcctgaatcatcagctgtgggcatcaggcccaccagccacacaggagtcctgggcaccctggcttaggctcccgcaatgggaaaacaaccggagggccagagcttagtccagacctaccttgtacgcacatagacattttcatatgcactggatggagttagggaaactgaggcaaaagaatttgccatactgtactcagaatcacgacattccttccctaccaaggccacttctattttttgaggctcctcataaaaataaatgaaaaaatgggatagaaaatgtgtggtgtcttaattttgttggaatataattggtagaaaataaactgcttgtatagtgtgc

SEQ ID NO: 197 - DNA, 3065 bp, Homo sapiens
ttctgatttctgctctctgcgctgagcacagcggcaccaggctgagctaagcagggccgccttgggcaggcmtacstggtggtgcaggcgagacccaggctgggcaaggcgcaggtgtagcctgtgttactcccaccccccccccacccccaccttttggccacagcaggcttctgatgagttttgagggtgtccccccccccacctccctcaagtggggtggagtcctgggcaaagggaggtctctgtaccgactgctctggccaggagttgggatgagtggagggcccagtgggtctgagtcccctgccattcccagaatggagctgtggccctaccaatgggaggtgatcatgcctgccagggygctggcgcagcagcagtacttaaccggagtttgtactcacggcagttggcgatgactgttagcacaaacggttcttttctcttggttctttttcctggggcggggatgggagattcctaagtyggctcagctggctccttccctcagtttcagtttccrtcttgggtctctgagctgagcagagtggcaccaggctgagttaagtgggactgccctgggcagacctacctactagagcagaatggagcttcggtcctaccaatgggaggtgatcatgcctgccctggagggcaagaatatcatcatctggctgcccacgggtgccgggaagacccgggcggctgcttatgtggccaagcggcacctagagactgtggatggagccaaggtggttgtattggtcaacagggtgcacctggtgacccagcatggtgaagagttcaggcgyatgctggatggacgctggrccgtgacaaccctgagtggggacatgggaccacgtgctggctttggccacctggcccrgtgccatgacctgctcatctgcacagcagagcttctgcagatggcactgaccagccccgaggaggaggagcacgtggagctcactgtcttctccctgatcgtggtggatgagtgccaccacacgcacaaggacaccgtctacaacgtcatcatgagccagtacctagaacttaaactccagagggcacagccgctaccccaggtgctgggtctcacagcctccccaggcactggcggggcctccaaactcgatggggccatcaaccacgtcctgcagctctgtgccaacttggacacgtggtgcatcatgtcaccccagaactgctgcccccagctgcaggagcacagccaacagccttgcaaacagtacaacctctgccacaggcgcagccaggatccgtttggggacttgctgaagaagctcatggaccaaatccatgaccacctggagatgcctgagttgagccggaaatttgggacgcaaatgtatgagcagcaggtggtgaagctgagtgaggctgcggctttggctgggcttcaggagcaacgggtgtatgcgcttcacctgaggcgctacaatgacgcgctgctcatccatgacaccgtccgcgccgtggatgccttggctgcgctgcaggatttctatcacagggagcacgtcactaaaacccagatcctgtgtgccgagcgccggctgctggccctgttcgatgaccgcaagaatgagctggcccacttggcaactcatggcccagagaatccaaaactggagatgctggaaaagatcctgcaaaggcagttcagtagctctaacagccctcggggtatcatcttcacccgcacccgccaaagcgcacactccctcctgctctggctccagcagcagcagggcctgcagactgtggacatccgggcccagctactgattggggctgggaacagcagccagagcacccacatgacccagagggaccagcaagaagtgatccrgaagttccaagatggaaccctgaaccttctggtggccacgagtgtggcggaggaggggctggacatcccacattgcaatgtggtggtgcgttatgggctcttgaccartgaaatctccatggtccaggccaggggccgtgcccgggccgatcagagtgtatacgcgtttgtagcaactgaaggtagccgggagctgaagcgggagctgatcaacgaggcgctggagacgctgatggagcaggcagtggctgctgtgcagaaaatggaccaggccgagtaccaggccaagatccrggatctgcagcaggcagccttgaccaagcgggcggcccaggcagcccagcgggagaaccagcggcagcrgttcccagtggagcacgtgcagctactctgcatcaactgcatggtggctgtgggccatggcagcgacctgcggaaggtggagggcacccaccatgtcaatgtgaaccccaacttctcgaactactataatgtctccagggatcctgtggtcatcaacaaagtcttcaaggactggaagcctgggggtgtcatcagctgcaggaactgtggggaggtctggggtctgcagatgatctacaagtcagtgaagctgccagtgctcaaagtccgcagcatgctgctggagacccctcaggggcggatccaggccaaaaagtggtcccgcgtgcccttctccgtgcctgactttgacttcctgcagcattgtgccgagaacttgtcggacctctccctggactgaccacctcattgctgcagtgcccggtttgggctgtagggggcgggagagtctgcagcagactccaggcccctccttcctgaatcatcagctgtgggcatcaggcccaccagccacacaggagtcctgggcaccctggcttaggctcccgcaatgggaaaacaaccggagggccagagcttagtccagacctaccttgtacgcacatagacattttcatatgcactggatggagttagggaaactgaggcaaaagaatttgccatactgtactcagaatcacgacattccttccctaccaaggccacttctattttttgaggctcctcataaaaataaatgaaaaaatgggatagaaaatgtgtggtgtcttaattttgttggaatataattggtagaaaataaactgcttgtatagtgtgc

SEQ ID NO: 198 - DNA, 1750 bp, Homo sapiens
agtttcagtttccatttctgatttctgctctctgcgctgagcacagcggcaccaggctgagctaagcagggccgccttgggcaggcmtacstggtggtgcaggcgagacccaggctgggcaaggcgcagtttcagtttccrtcttgggtctctgagctgagcagagtggcaccaggctgagttaagtgggactgccctgggcagacctacctactagagcagaatggagcttcggtcctaccaatgggaggtgatcatgcctgccctggagggcaagaatatcatcatctggctgcccacgggtgccgggaagacccgggcggctgcttatgtggccaagcggcacctagagactgtggatggagccaaggtggttgtattggtcaacagggtgcacctggtgacccagcatggtgaagagttcaggcgyatgctggatggacgctggrccgtgacaaccctgagtggggacatgggaccacgtgctggctttggccacctggcccrgtgccatgacctgctcatctgcacagcagagcttctgcagatggcactgaccagccccgaggaggaggagcacgtggagctcactgtcttctccctgatcgtggtggatgagtgccaccacacgcacaaggacaccgtctacaacgtcatcatgagccagtacctagaacttaaactccagagggcacagccgctaccccaggtgctgggtctcacagcctccccaggcactggcggggcctccaaactcgatggggccatcaaccacgtcctgcagctctgtgccaacttggacacgtggtgcatcatgtcaccccagaactgctgcccccagctgcaggagcacagccaacagccttgcaaacagtacaacctctgccacaggcgcagccaggatccgtttggggacttgctgaagaagctcatggaccaaatccatgaccacctggagatgcctgagttgagccggaaatttgggacgcaaatgtatgagcagcaggtggtgaagctgagtgaggctgcggctttggctgggcttcaggagcaacgggtgtatgcgcttcacctgaggcgctacaatgacgcgctgctcatccatgacaccgtccgcgccgtggatgccttggctgcgctgcaggatttctatcacagggagcacgtcactaaaacccagatcctgtgtgccgagcgccggctgctggccctgttcgatgaccgcaagaatgagctggcccacttggcaactcatgtgcccttctccgtgcctgactttgacttcctgcagcattgtgccgagaacttgtcggacctctccctggactgaccacctcattgctgcagtgcccggtttgggctgtagggggcgggagagtctgcagcagactccaggcccctccttcctgaatcatcagctgtgggcatcaggcccaccagccacacaggagtcctgggcaccctggcttaggctcccgcaatgggaaaacaaccggagggccagagcttagtccagacctaccttgtacgcacatagacattttcatatgcactggatggagttagggaaactgaggcaaaagaatttgccatactgtactcagaatcacgacattccttccctaccaaggccacttctattttttgaggctcctcataaaaataaatgaaaaaatgggatagaaaatgtgtggtgtcttaattttgttggaatataattggtagaaaataaactgcttgtatagtgtgc

SEQ ID NO: 199 - DNA, 1006 bp, Homo sapiens
atgtctctaagacatcatggtgaaggtgaaggccagagtaaatagatttgggccatattgggcacctggtcaccagggctgcttttaactctagtaaagtggatattgtcaccatcaatgacccttcattgacctcaactacatggtctrcatgttccagtatttctacccatgrcaaattccaccacaccgtcaaggctgagaatgggaagcttgtcatcaatggaaatcccatcaccatcttccaggagcaagatcctaccaaaatcaaatgggrtgatgctgaagctgagtatgccgtggagtccactggcatcttcatgaccatagagaaggctggggctcacttaatgggggagccaaaagggtcatcatctctaccccctctgctgatgcccccatattcataatgggcatgatccctgagaagtctgaaaacagcctcaagatcatcagcaatgccttctgtaccaccaactgcttaatcccccggccaagcccatccatgacaactttggcattgtggaaggacttgtgaccacaatccatgctgccactcctgcccagaagactcgatggcctctgtgggaaactgtggcatatgtctgtggggctctccagaacatcatccctgcmtctactggtgttgccaaggctgtgggcaaggccatccccgagctgaacaggaagctcactagcatggccttccgtgtccttctgcaaacgtgttggttgtggacctgacctgccatctggagaaacctgccaaatatgatgacatcaaaaaggtggtgaagcaggcgtcagagggcccctcaagggcatcttgggstacactgaacaccaggttgtttcctctgactttaacagtgacactcactcttccactttcgatgctggggctgccattgccctcagtgaccactttgtcaagctcatttcctcgtacaacagtgaatttggctacagcaacagggtggtggcccatatggcctccaaggagtaa

SEQ ID NO: 200 - DNA, 2773 bp, Homo sapiens
acgcggggagacagcgggctacgtgctctgaaaagagccagccaggggccccggctacccttctccggctcgctmttcctctgaagtcctgtggacttggagtctgaaaattcctcgagtggtagagatgcctcagctaggatgacagcgtggggacggccggcggcgtcccctgccccaggccgcggtggcggcgccgcgaccccgccctctcgcgcctgtccttccctctgctcccagcctttgctgggcgccagacccggctttgccgtccggctattagcctactgtggctagtcacccccggggtcccggccttctcgggctggggccgccgccaccgcggcaggacggggaggcgggccatggcgtcctgcgtggggagccggaccctaagcaaggatgatgtgaactacaaaatgcatttccggatgatcaacgagcagcaagtggaggacatcaccattgacttcttctaccggccgcataccatcaccctgctcagcttcaccatcgtcagcctcatgtacttcgcctttaccagggatgactctgttccagaagacaacatctggagaggcatcctctctgttattttcttctttcttatcatcagtgtgttagctttccccaayggtccgttcactcgacctcatccagccttatggcgaatggtttttggactcagtgtgctctacttcctgttcctggtattcctactcttcctgaatttcgagcaggttaaatctctaatgtattggctagatccaaatcttcgatacgccacaagggaagcagatgtcatgsagtatgctgtgaactgccatgtgatcacctgggagaggattatcagccactttgatatttttgcatttggacatttctggggctgggccatgaaggccttgctgatccgtagttacggtctctgctggacaatcagtattacctgggagctgactgagctcttcttcatgcatctcctccccaattttgccgagtgctggtgggatcaagtcattctggacatcctgttgtgcaatggcggtggcatttggctgggcatggtcgtttgccggtttttagagatgaggacttaccactgggcaagcttcaaggacattcataccaccaccgggaagatcaagagagctgttctgcagttcactcctgctagctggacctatgttcgatggtttgaccccaaatcttcttttcagagagtagctggagtgtaccttttcatgatcatctggcagctgactgagttgaataccttcttcttgaagcatatctttgtgttccaagccagtcatccattaagttggggtagaattctctttattggtggcatcacagctcccacagtgagacagtactacgcttacctcaccgacacacagtgcaagcgcgtaggaacacaatgctgggtgtttggggtcattggtttcctggaggccattgtttgcataaaatttggacaagatctcttctctaagacccaaatactctatgttgtgctttggcttctttgcgtggctttcaccactttcctctgtctgtacggcatgatttggtatgcagaacactatggtcaccgagaaaagacctactcggagtgtgaagatggcacctacagtccagagatctcctggcatcacaggaaagggacaaaaggttctgaagacagcccacccaagcatgcaggcaacaacgaaagccattcttccaggagaaggaatcggcattccaagtcaaaagtcaccaatggcgttggaaagaaatgaaaaaccctggttaatcaaagatgttccagagtgcctagaactgagagggaaatggaactcatttggaactccccgtgaggaggtygaggcgcacagggcaagcaggaagaggcgagggcacttgggggtcattatttgagatcgtaagtcttgtttcccacagacctggccgcgtcargcagatcatcgcctggggggcctttgccaacgtggggtctcttctaacttcagcacttgacatgcggtcaccggtggcagcgcggtgtgttgaagggaaacggtagctattcattcacagttgccaagagcagctccgcgcctgctggatcgtggatgcagcgtaaacatcttccttcagacgaggcattaaccccatggttaatggactggtcaccagtttttattttatttttatgaatctacctttccattgattgatttaagttcaggccacttttctgtcttttatttggttactgttgttatttgtttttaagttaggatgctttttaacagcctttagaagccgctgctgaaattgatactgggggaagggttccccttccttctagagcagaaaagggagagargtgttgtattcctgtttggtaacctcagtctcctgtaagacctcctaccacatggcgagtatacaccaatcaggagagggtagctgcctgcataggagcctcgcttccgattattcccttcccaatattattcatccagacttagccacagtgcacaaaagcaaacctgctagagaggcagtgaacaccacagcttctccccagctwggtgccttttacatcgggtttgttctccttccatggtgtgttgctgacattgtcactgagtcccatgtgaggtgctggtgagtattacctttcatctgtgccatgctctagaaccttgaccttgatagttcaccacstctgatggatccctgttttaaataaaaacgattcactttaaagcctatcaaa

SEQ ID NO: 201 - DNA, 2603 bp, Homo sapiens
acgcggggagacagcgggctacgtgctctgaaaagagccagccaggggccccggctacccttctccggctcgctmttcctctgaagtcctgtggacttggagtctgaaaattcctcgagtggtagagatgcctcagctaggatgacagcgtggggacggccggcggcgtcccctgccccaggccgcggtggcggcgccgcgaccccgccctctcgcgcctgtccttccctctgctcccagcctttgctgggcgccagacccggctttgccgtccggctattagcctactgtggctagtcacccccggggtcccggccttctcgggctggggccgccgccaccgcggcaggacggggaggcgggccatggcgtcctgcgtggggagccggaccctaagcaaggatgatgtgaactacaaaatgcatttccggatgatcaacgagcagcaagtggaggacatcaccattgacttcttctaccggccgcataccatcaccctgctcagcttcaccatcgtcagcctcatgtacttcgcctttaccagggatgactctgttccagaagacaacatctggagaggcatcctctctgttattttcttctttcttatcatcagtgtgttagctttccccaaygsagtatgctgtgaactgccatgtgatcacctgggagaggattatcagccactttgatatttttgcatttggacatttctggggctgggccatgaaggccttgctgatccgtagttacggtctctgctggacaatcagtattacctgggagctgactgagctcttcttcatgcatctcctccccaattttgccgagtgctggtgggatcaagtcattctggacatcctgttgtgcaatggcggtggcatttggctgggcatggtcgtttgccggtttttagagatgaggacttaccactgggcaagcttcaaggacattcataccaccaccgggaagatcaagagagctgttctgcagttcactcctgctagctggacctatgttcgatggtttgaccccaaatcttcttttcagagagtagctggagtgtaccttttcatgatcatctggcagctgactgagttgaataccttcttcttgaagcatatctttgtgttccaagccagtcatccattaagttggggtagaattctctttattggtggcatcacagctcccacagtgagacagtactacgcttacctcaccgacacacagtgcaagcgcgtaggaacacaatgctgggtgtttggggtcattggtttcctggaggccattgtttgcataaaatttggacaagatctcttctctaagacccaaatactctatgttgtgctttggcttctttgcgtggctttcaccactttcctctgtctgtacggcatgatttggtatgcagaacactatggtcaccgagaaaagacctactcggagtgtgaagatggcacctacagtccagagatctcctggcatcacaggaaagggacaaaaggttctgaagacagcccacccaagcatgcaggcaacaacgaaagccattcttccaggagaaggaatcggcattccaagtcaaaagtcaccaatggcgttggaaagaaatgaaaaaccctggttaatcaaagatgttccagagtgcctagaactgagagggaaatggaactcatttggaactccccgtgaggaggtygaggcgcacagggcaagcaggaagaggcgagggcacttgggggtcattatttgagatcgtaagtcttgtttcccacagacctggccgcgtcargcagatcatcgcctggggggcctttgccaacgtggggtctcttctaacttcagcacttgacatgcggtcaccggtggcagcgcggtgtgttgaagggaaacggtagctattcattcacagttgccaagagcagctccgcgcctgctggatcgtggatgcagcgtaaacatcttccttcagacgaggcattaaccccatggttaatggactggtcaccagtttttattttatttttatgaatctacctttccattgattgatttaagttcaggccacttttctgtcttttatttggttactgttgttatttgtttttaagttaggatgctttttaacagcctttagaagccgctgctgaaattgatactgggggaagggttccccttccttctagagcagaaaagggagagargtgttgtattcctgtttggtaacctcagtctcctgtaagacctcctaccacatggcgagtatacaccaatcaggagagggtagctgcctgcataggagcctcgcttccgattattcccttcccaatattattcatccagacttagccacagtgcacaaaagcaaacctgctagagaggcagtgaacaccacagcttctccccagctwggtgccttttacatcgggtttgttctccttccatggtgtgttgctgacattgtcactgagtcccatgtgaggtgctggtgagtattacctttcatctgtgccatgctctagaaccttgaccttgatagttcaccacstctgatggatccctgttttaaataaaaacgattcactttaaagcctatcaaa

SEQ ID NO: 202 - DNA, 3253 bp, Homo sapiens
gcaaaaggagccgagcggcttctgctcaatggcggaaaagccgccggtgctctgacggcctcgttcccctagcagttgcgggggagtttcctgccggcgcggctggagtctctgattctcagggttcggtggttggaagatgctccagagagacgaggctgcggcggaggaggtggcggcggccgaatcggcaacggcgctagggtggagagaaggcggcakcggcggcggcggcggcgtgaggggccgggcggtgtaaacagccccggaggcggcggtcgagaccccgagggggaagcggcggctgagtcagggtcgcgcctccgttggaaacttgggctgagtaccgcggcgggcgcgagcgaggcgccctagacatcttctccctcccttgcctcagatttattgctraacatgggtgcatttttggataaacccaaaactgaaaaacataatgctcatggtgctgggaatggtttacgttatggcctgagcagcatgcaaggatggagagtggaaatggaagatgcacacacagctgttgtaggtattcctcacggcttggaagactggtcattttttgcagtttatgatggtcatgctggatcccgagtggcaaattactgctcaacacatttattagaacacatcactactaacgaagactttagggcagctggaaaatcaggatctgctcttgagctttcagtggaaaatgttaagaatggtatcagaactggatttttgaaaattgatgaatacatgcgtaacttttcagacctcagaaacgggatggacaggagtggttcaactgcagtgggagttatgatttcacctaagcatatctactttatcaactgtggtgattcacgtgctgttctgtrtaggaatggasaagtctgcttttctacccaggatcacaaaccttgcaatccaagggaaaaggagcgaatccaaaatgcaggaggcagcgtgatgatacaacgtgttaatggttcattagcagtatctcgtgctctgggggactatgattacaagtgtgttgatggcaagggcccaacagaacaacttgtttctccagagcctgaggtttatgaaattttaagagcagaagaggatgaatttatcatcttggcttgtgatgggatctgggatgttatgagtaatgaggagctctgtgaatatgttaaatctaggcttgaggtatctgatgacctggaaaatgtgtgcaattgggtagtggacacttgtttacacaagggaagtcgagataacatgagtattgtactagtttgcttttcaaatgctcccaaggtctcagatgaagcggtgaaaaaagattcagagttggataagcacttggaatcacgggttgaagagattatggagaagtctggcgaggaaggaatgcctgatcttgcccatgtcatgcgcatcttgtctgcagaaaatatcccaaatttgcctcctgggggaggtcttgctggcaagcgtaatgttattgaagctgtttatagtagactgaatccacatagagaaagtgatgggggtgctggagatctagaagacccatggtagccttaaaaaccttctaaaatgcttttgattctgaaaattgggggaaaaaacttttaatcacaattttcttcaatacaaggggaaaatattcttgcggattcccaacgttttgtgatatgagcagaaaatcattagcatttcccatcatttgttcatatttgtgttttctgacagttgccacttgtagcattgcctgtactacagtattttttgccaacctcaggcatactcgttacatctgtattgaactttcggccctagaaaccagtggagttatttcaccacaaatcaacaatgtgcctgaggtgcatgggaaatatagttagctatactctgaaaatacattatgttttttttctttaaacaaaacacacaacatgtaagcatgtaagagtaaagaattgtatgatatgttccttttttcagttcaccaagttggaagccttttgcagctctgtggcttggaatttcatttgagcaatttctataggatatgtatttattattgattgttatttaatttttttccaattttacctgtattaccaaactgggttctccaataatgtccaaattgtaatgttgccttgcttcaagataaagtgtatttgggaataatattataaacccttacaaattttatgcatgtatctactgcatccttcaactctcactagaaaatcttttgaaaccaaatggattaatttatggctatttataatttgctttgacatctcactgttggaaattttttaaagatgagatttgcctttataatgtaaattgtgatttttgttttacatgtgggtttctatagttttaattttttcagcttttaagatacgagttttgtgtaatttggtatttttaatcatttatgttattttaaaagctcagaatatcacattgaaattactataaatacatttaaataacttttcattttataacattgggcacggtacagagtgattgtcacataaggtacttgaagatttattagtttaattctatttttacagtaaccttgaattcttctgagttttgcatgtattaaattcaattaatgctgaacatgaagagtaaagtatttatctgaaagaagtttctgggttaggagaagtaatgaatgtatccatttgtacatggtttacatgttgtggatgctttgtaaacattttcctgtatgtttaaattgtgtttcagcaggatgtaattgcccttgtgtgtagttaaaatgagtcatcatctggtcctttgtgaaatggaattcatggtattttctgtaacgttttcctgaagctgtttctggagagccacacatttaaatacagacagctttcctgatcatttgatttattgtgcacctgatttttggtctaaaaggaattattgccacaatatattttatttattctttagattttagccttgtaagttaaagtgctttacatgatgatgtgaaaagctgtttgtccctttactgggtttggggggttgttaaaagatagggaatgaagaatgcaaaatggtttatcgttcaaactgtccactctgatccaaccctgtactgatagtacttcccagtatgatattgtgatgtttcatacaatgcagtgaacataaccaacttgttacctaaataaagaattgataaaaacagtgtgacatatta

SEQ ID NO: 203 - DNA, 3110 bp, Homo sapiens
gcaaaaggagccgagcggcttctgctcaatggcggaaaagccgccggtgctctgacggcctcgttcccctagcagttgcgggggagtttcctgccggcgcggctggagtctctgattctcagggttcggtggttggaagatgctccagagagacgaggctgcggcggaggaggtggcggcggccgaatcggcaacggcgctagggtggagagaaggcggcakcggcggcggcggcggcgtgaggggccgggcggtgtaaacagccccggaggcggcggtcgagaccccgagggggaagcggcggctgagtcagggtcgcgcctccgttggaaacttgggctgagtaccgcggcgggcgcgagcgaggcgccctagacatcttctccctcccttgcctcagatttattgctraacatgggtgcatttttggataaacccaaaactgaaaaacataatgctcatggtgctgggaatggtttacgttatggcctgagcagcatgcaaggatggagagtggaaatggaagatgcacacacagctgttgtaggtattcctcacggcttggaagactggtcattttttgcagtttatgatggtcatgctggatcccgagtggcaaattactgctcaacacatttattagaacacatcactactaacgaagactttagggcagctggaaaatcaggatctgctcttgagctttcagtggaaaatgttaagaatggtatcagaactggatttttgaaaattgatgaatacatgcgtaacttttcagacctcagaaacgggatggacaggagtggttcaactgcagtgggagttatgatttcacctaagcatatctactttatcaactgtggtgattcacgtgctgttctgtrtaggaatggasaagtctgcttttctacccaggatcacaaaccttgcaatccaagggaaaaggagcgaatccaaaatgcaggaggcagcgtgatgatacaacgtgttaatggttcattagcagtatctcgtgctctgggggactatgattacaagtgtgttgatggcaagggcccaacagaacaacttgtttctccagagcctgaggtttatgaaattttaagagcagaagaggatgaatttatcatcttggcttgtgatgggatctgggatgttatgagtaatgaggagctctgtgaatatgttaaatctaggcttgaggtatctgatgacctggaaaatgtgtgcaattgggtagtggacacttgtttacacaaggtatgtaaacttttttgtcattaaaataacatgttaattttgaaaagttacggtaggtaaagttaagctaacttaaaattttaaaacttttaatattttcacagaagctgtatattttgaagtactttaccagaaatgaaaccattgttttctttgccatccttgtttgtcccagccttctaatttgaaaattaagcttgataaatttgaggcatttgttgtcatttaagtacttcatagcttgttgctgtagcaaaagcatttacacagagtgactttttcttgacattggcagtaaccatcttatgcctgattatgaagcagcttgataaaatatgtatatagtagaattctgtactagatattactaaaagatcaagagccatgtgaaatattggaagatgtactagatgcctagcctgtataaaatttagtcctgagcctcctagcagtgaagacaaaaactgaaataaaaatatgggttgtatatttctcattgtcttctaaaagcagctcttatctggcaatacaatctaaaaaggatttacatgtggctctctaagtaatacatgacttggatagtatcttttgtagaagataaaattcttttcatatagatgtttttattatttctgattaaaaaccaaaggcttctataaaacataatcttgtgaaaaattcctgtggaacactaaagtttatttagatttgtaattttgtatgaatcattgcttgatacagtaatagaaaaaaagtccagagtaatagataattggcaatcctttgaatatctttaaaatactcagttgtttcaagtgggtttttgacagcatctatatataattcaattaaaatttgagttatctggccagtgtctggagtgtgtaagtatttgactgaaaagataccaaggtaaaactgacctttagttacatgaaataaataaagggtttgacttatttattctgtctagattagaaccactgtatctccctactccaaaatgtactgtggaaggtatgggcataaccagaaagtttttcagaaaggatctctgggtctctggaaatgcccagattttggttaaataccgatttctttttaatagaatggaaagaggcagttttaaaaacagaagatttaaaggccgttcttgtcagtggacagcctttttctgaaaggattttaatgatggtacctctagctcctctgatttttatttttaacacactgtatctttttacttctggatgagttaagtaaagaagtattgatggttgtcagtgatcaaatagtaagtgggtctaaaattatgtatttgtctttgaactctaaatgaagcaattctgacctgtagatttttgagacaagcataggcatatgtttgttgcctgactagctaatgaaaacagcattttccccaattataaaaaaaaggtatatacttactattggaaaaaaaatccagatgatgaagaaaatatagagaaacacccaaaattttgccatccaccctaagtcagctactttcattgttgtggtgtatattgttccagtcttttctgcctgcctgtgagtgtgtgtatttttataaaaccgagatgattatacttgttattctacagcctgccttttccaacaatatattgtagagagatctccatgcctataagtattgatctgtatcatttttcttggctgcgtagtattttattgaaagaatgaggttgtgagggaatagccaaaaaatctattaggtctgtaatttggactaaggaaagaagtttgtgttagtagattaactcacttatccattgaaaggatgctagtttttgagaattttgactcga

SEQ ID NO: 204 - DNA, 2209 bp, Homo sapiens
atttattgctraacatgggtgcatttttggataaacccaaaactgaaaaacataatgctcatggtgctgggaatggtttacgttatggcctgagcagcatgcaaggatggagagtggaaatggaagatgcacacacagctgttgtaggtattcctcacggcttggaagactggtcattttttgcagtttatgatggtcatgctggatcccgagtggcaaattactgctcaacacatttattagaacacatcactactaacgaagactttagggcagctggaaaatcaggatctgctcttgagctttcagtggaaaatgttaagaatggtatcagaactggatttttgaaaattgatgaatacatgcgtaacttttcagacctcagaaacgggatggacaggagtggttcaactgcagtgggagttatgatttcacctaagcatatctactttatcaactgtggtgattcacgtgctgttctgtrtaggaatggasaagtctgcttttctacccaggatcacaaaccttgcaatccaagggaaaaggagcgaatccaaaatgcaggaggcagcgtgatgatacaacgtgttaatggttcattagcagtatctcgtgctctgggggactatgattacaagtgtgttgatggcaagggcccaacagaacaacttgtttctccagagcctgaggtttatgaaattttaagagcagaagaggatgaatttatcatcttggcttgtgatgggatctgggatgttatgagtaatgaggagctctgtgaatatgttaaatctaggcttgaggtatctgatgacctggaaaatgtgtgcaattgggtagtggacacttgtttacacaagggaagtcgagataacatgagtattgtactagtttgcttttcaaatgctcccaaggtctcagatgaagcggtgaaaaaagattcagagttggataagcacttggaatcacgggttgaagagattatggagaagtctggcgaggaaggaatgcctgatcttgcccatgtcatgcgcatcttgtctgcagaaaatatcccaaatttgcctcctgggggaggtcttgctggcaagcgtaatgttattgaagctgtttatagtagactgaatccacatagagaaagtgatggggcctccgatgaagcagaggaaagtggatcacagggaaaattggtggaagctctcaggcaaatgagaattaatcataggggaaactaccgacaacttctggaggagatgctgactagttacaggctagctaaagtagagggagaagaaagccctgctgaaccagctgccacagctacttcttcgaacagtgatgctggaaacccagtgacaatgcaggaaagccatactgaatcagaaagtggtcttgctgaattagacagctctaatgaagatgcagggacaaagatgagtggtgaaaaaatatgactttcctttttggtaatatttttgtgatctttgatggtttttaacctaggaagtgtaatgtatgcatttatataactgttttgttatttgaatcttggaaaactagttttattatattcagatagccttgttttttaaaaaggcctttgcatacacctttatgagatagtgtaaaattgactatttatagtactatggatttaatgaaattatatgtcatttcacattgtatgccagaaattaggctaccaattatgaattaaagtcagtagttaaattaatactagatagaattagaaattttgattagagagattatgctatattatggaaaaacttgttaatgtagaattatactgcttcatattattttacctattagtacactcatagttagctttgtaataaatttatgttttctttaataattttagttcttcaaagaatggctgatgctggcctgtaatttttctttcaaggatgataatttgtgtgttgtttgatttgtttatattttacatctctgtagttttatttttagaagttgtgagatattggatgtgtggctatttttcctttctctgtattctttatgaaacataacttttgaaaaacctatgtattattcatacagctttggtttgtatattctgtatagcctaactacacacatcaaaatgtatgtcaaccaagtgtttagaatgaaattataagtgtttaagtccaaataaagcatgtgatgtggaataatctat

SEQ ID NO: 205 - DNA, 2397 bp, Homo sapiens
ggttgcaaaaggagccgagcggcttctgctcaatggcggaaaagccgccggtgctctgacggcctcgttcccctagcagttgcgggggagtttcctgccggcgcggctggagtctctgattctcagggttcggtggttggaagatgctccagagagacgaggctgcggcggaggaggtggcggcggccgaatcggcaacggcgctagggtggagagaaggcggcakcggcggcggcggcggcgtgaggggccgggcggtgtaaacagccccggaggcggcggtcgagaccccgagggggaagcggcggctgagtcagggtcgcgcctccgttggaaacttgggctgagtaccgcggcgggcgcgagcgaggcgccctagacatcttctccctcccttgcctcagggaagtcgagataacatgagtattgtactagtttgcttttcaaatgctcccaaggtctcagatgaagcggtgaaaaaagattcagagttggataagcacttggaatcacgggttgaagagattatggagaagtctggcgaggaaggaatgcctgatcttgcccatgtcatgcgcatcttgtctgcagaaaatatcccaaatttgcctcctgggggaggtcttgctggcaagcgtaatgttattgaagctgtttatagtagactgaatccacatagagaaagtgatgggggtgctggagatctagaagacccatggtagccttaaaaaccttctaaaatgcttttgattctgaaaattgggggaaaaaacttttaatcacaattttcttcaatacaaggggaaaatattcttgcggattcccaacgttttgtgatatgagcagaaaatcattagcatttcccatcatttgttcatatttgtgttttctgacagttgccacttgtagcattgcctgtactacagtattttttgccaacctcaggcatactcgttacatctgtattgaactttcggccctagaaaccagtggagttatttcaccacaaatcaacaatgtgcctgaggtgcatgggaaatatagttagctatactctgaaaatacattatgttttttttctttaaacaaaacacacaacatgtaagcatgtaagagtaaagaattgtatgatatgttccttttttcagttcaccaagttggaagccttttgcagctctgtggcttggaatttcatttgagcaatttctataggatatgtatttattattgattgttatttaatttttttccaattttacctgtattaccaaactgggttctccaataatgtccaaattgtaatgttgccttgcttcaagataaagtgtatttgggaataatattataaacccttacaaattttatgcatgtatctactgcatccttcaactctcactagaaaatcttttgaaaccaaatggattaatttatggctatttataatttgctttgacatctcactgttggaaattttttaaagatgagatttgcctttataatgtaaattgtgatttttgttttacatgtgggtttctatagttttaattttttcagcttttaagatacgagttttgtgtaatttggtatttttaatcatttatgttattttaaaagctcagaatatcacattgaaattactataaatacatttaaataacttttcattttataacattgggcacggtacagagtgattgtcacataaggtacttgaagatttattagtttaattctatttttacagtaaccttgaattcttctgagttttgcatgtattaaattcaattaatgctgaacatgaagagtaaagtatttatctgaaagaagtttctgggttaggagaagtaatgaatgtatccatttgtacatggtttacatgttgtggatgctttgtaaacattttcctgtatgtttaaattgtgtttcagcaggatgtaattgcccttgtgtgtagttaaaatgagtcatcatctggtcctttgtgaaatggaattcatggtattttctgtaacgttttcctgaagctgtttctggagagccacacatttaaatacagacagctttcctgatcatttgatttattgtgcacctgatttttggtctaaaaggaattattgccacaatatattttatttattctttagattttagccttgtaagttaaagtgctttacatgatgatgtgaaaagctgtttgtccctttactgggtttggggggttgttaaaagatagggaatgaagaatgcaaaatggtttatcgttcaaactgtccactctgatccaaccctgtactgatagtacttcccagtatgatattgtgatgtttcatacaatgcagtgaacataaccaacttgttacctaaataaagaattgataaaaacagtgtgacatatta

SEQ ID NO: 206 - DNA, 2609 bp, Homo sapiens
gcaaaaggagccgagcggcttctgctcaatggcggaaaagccgccggtgctctgacggcctcgttcccctagcagttgcgggggagtttcctgccggcgcggctggagtctctgattctcagggttcggtggttggaagatgctccagagagacgaggctgcggcggaggaggtggcggcggccgaatcggcaacggcgctagggtggagagaaggcggcakcggcggcggcggcggcgtgaggggccgggcggtgtaaacagccccggaggcggcggtcgagaccccgagggggaagcggcggctgagtcagggtcgcgcctccgttggaaacttgggctgagtaccgcggcgggcgcgagcgaggcgccctagacatcttctccctcccttgcctcagatttattgctraacatgggtgcatttttggataaacccaaaactgaaaaacataatgctcatggtgctgggaatggtttacgttatggcctgagcagcatgcaaggatggagagtggaaatggaagatgcacacacagctgttgtaggtattcctcacggcttggaagactggtcattttttgcagtttatgatggtcatgctggatcccgagtggcaaattactgctcaacacatttattagaacacatcactactaacgaagactttagggcagctggaaaatcaggatctgctcttgagctttcagtggaaaatgttaagaatggtatcagaactggatttttgaaaattgatgaatacatgcgtaacttttcagacctcagaaacgggatggacaggagtggttcaactgcagtgggagttatgatttcacctaagcatatctactttatcaactgtggtgattcacgtgctgttctgtrtaggaatggasaagtctgcttttctacccaggatcacaaaccttgcaatccaagggaaaaggagcgaatccaaaatgcaggaggcagcgtgatgatacaacgtgttaatggttcattagcagtatctcgtgctctgggggactatgattacaagtgtgttgatggcaagggcccaacagaacaacttgtttctccagagcctgaggtttatgaaattttaagagcagaagaggatgaatttatcatcttggcttgtgatgggatctgggatgttatgagtaatgaggagctctgtgaatatgttaaatctaggcttgaggtatctgatgacctggaaaatgtgtgcaattgggtagtggacacttgtttacacaagggaagtcgagataacatgagtattgtactagtttgcttttcaaatgctcccaaggtctcagatgaagcggtgaaaaaagattcagagttggataagcacttggaatcacgggttgaagagattatggagaagtctggcgaggaaggaatgcctgatcttgcccatgtcatgcgcatcttgtctgcagaaaatatcccaaatttgcctcctgggggaggtcttgctggcaagcgtaatgttattgaagctgtttatagtagactgaatccacatagagaaagtgatggggcctccgatgaagcagaggaaagtggatcacagggaaaattggtggaagctctcaggcaaatgagaattaatcataggggaaactaccgacaacttctggaggagatgctgactagttacaggctagctaaagtagagggagaagaaagccctgctgaaccagctgccacagctacttcttcgaacagtgatgctggaaacccagtgacaatgcaggaaagccatactgaatcagaaagtggtcttgctgaattagacagctctaatgaagatgcagggacaaagatgagtggtgaaaaaatatgactttcctttttggtaatatttttgtgatctttgatggtttttaacctaggaagtgtaatgtatgcatttatataactgttttgttatttgaatcttggaaaactagttttattatattcagatagccttgttttttaaaaaggcctttgcatacacctttatgagatagtgtaaaattgactatttatagtactatggatttaatgaaattatatgtcatttcacattgtatgccagaaattaggctaccaattatgaattaaagtcagtagttaaattaatactagatagaattagaaattttgattagagagattatgctatattatggaaaaacttgttaatgtagaattatactgcttcatattattttacctattagtacactcatagttagctttgtaataaatttatgttttctttaataattttagttcttcaaagaatggctgatgctggcctgtaatttttctttcaaggatgataatttgtgtgttgtttgatttgtttatattttacatctctgtagttttatttttagaagttgtgagatattggatgtgtggctatttttcctttctctgtattctttatgaaacataacttttgaaaaacctatgtattattcatacagctttggtttgtatattctgtatagcctaactacacacatcaaaatgtatgtcaaccaagtgtttagaatgaaattataagtgtttaagtccaaataaagcatgtgatgtggaataatctat

SEQ ID NO: 207 - DNA, 1388 bp, Homo sapiens
gcgattactatgtgctggacttcgtcgtagttgagatatattaccatcctaagttaaactataatcgtttattgttatctctaggtcttcctagatgaaatttttaccctaaaggatcgtaaagtcggcccaccggacgtcagtggggtcccctgttcagccctctcgttcttctggggatctctcgggacactgacgaggtggcaccgggacctacaggtgggccgcaagccccgcccccagygacggcttgtagccycgtcccccgacgcagcgcctctccargtttgccccgccctgcaggactgcagaatttcctttccggcggcgcgctgtcgtcacgcgtcccgcgcctcctcgcgcctgcgccgtggttggaaggtcgtcyctgtgaccggcttggcggttggagcggctgtcgccatgttgtcggtagcakcccgctcrggcccgttcgcgcccgtcctgtcggccacgtcccgcggggtggcgggcgcgctgcggcccttggtgcaggccacggtgcccgccaccccggagcagcctgtgttggacctgaagcggcccttcctcagccgggagtcgctgagcggccaggccgtgcgccggcctttggtcgcctccgtgggcctcaatgtccctgcttctgtttgttattcccacacagacatcaaggtgcctgacttctctgaataccgccgccttgaagttttagatagtacgaagtcttcaagagaaagcagcgaggctaggaaaggtttctcctatttggtaactggagtaactactgtgggtgtcgcatatgctgccaagaatgccgtcacccagttcgtttccagcatgagtgcttctgctgatgtgttggccctggcgaaaatcgaaatcaagttatccgatattccagaaggcaagaacatggctttcaaatggagaggcaaacccctgtttgtrcgtcatagaacccagaaggaaattragcaggaagctgcagttgaattatcacagttgagggacccacagcatgatctagatcgagtaaagaaacctgaatgggttatcctgataggtgtttgcactcatcttggytgtgtacccattgcaaatgcaggagattttggtggttattactgcccttgccatgggtcacactatgatgcatctggcaggatcagattgggtcctgctmctctcaaccttgaagtccccacgtatgagttcaccagtgacgatatggtgattgttggttaagagacttgractcaagtcataggcttctttaaatatgtaagaattgatgatgtatttgcaaacattaatgtgaaataaattgaatttaatgttgaatactttcaggcattcacttaataaagmcactgttaagcactgtt

SEQ ID NO: 208 - DNA, 1546 bp, Homo sapiens
gcgattactatgtgctggacttcgtcgtagttgagatatattaccatcctaagttaaactataatcgtttattgttatctctaggtcttcctagatgaaatttttaccctaaaggatcgtaaagtcggcccaccggacgtcagtggggtcccctgttcagccctctcgttcttctggggatctctcgggacactgacgaggtggcaccgggacctacaggtgggccgcaagccccgcccccagygacggcttgtagccycgtcccccgacgcagcgcctctccargtttgccccgccctgcaggactgcagaatttcctttccggcggcgcgctgtcgtcacgcgtcccgcgcctcctcgcgcctgcgccgtggttggaaggtcgtcyctgtgaccggcttggcggttggagcggctgtcgccatgttgtcggtagcakcccgctcrggcccgttcgcgcccgtcctgtcggccacgtcccgcggggtggcgggcgcgctgcggcccttggtgcaggccacggtgcccgccaccccggagcagcctgtgttggacctgaagcggcccttcctcagccgggagtcgctgagcggccaggccgtgcgccggcctttggtcgcctccgtgggcctcaatgtccctgcttctgtttgttattcccacacagacatcaaggtgcctgacttctctgaataccgccgccttgaagttttagatagtacgaagtcttcaagagaaagcagcgaggctaggaaaggtttctcctatttggtaactggagtaactactgtgggtgtcgcatatgctgccaagaatgccgtcacccagttcgtttccagcatgagtgcttctgctgatgtgttggccctggcgaaaatcgaaatcaagttatccgatattccagaaggcaagaacatggctttcaaatggagaggcaaacccctgtttgtrcgtcatagaacccagaaggaaattragcaggaagctgcagttgaattatcacagttgagggacccacagcatgatctagatcgagtaaagaaacctgaatgggttatcctgataggtgtttgcactcatcttggytgtgtacccattgcaaatgcaggagattttggtggttattactgcccttgccatgggtcacactatgatgcatctggcaggatcagattgggtcctgctmctctcaaccttgaagtccccacgtatgagttcaccagtgacgatatggtgattgttggttaagagacttgractcaagtcataggcttctttcagtctttatgtcacctcaggagacttatttgagaggaagccttctgtacttgaagttgatttgaaatatgtaagaattgatgatgtatttgcaaacattaatgtgaaataaattgaatttaatgttgaatactttcaggcattcacttaataaagmcactgttaagcactgttatgctcagtcatacacgcgaaaggtacaaygtcttttagctaattctaattaaaaattacagactggtgtacaagatacttgtgaaatctgtaa

SEQ ID NO: 209 - DNA, 1319 bp, Homo sapiens
ctcccaaaaaaggatcgagaaaatgttaaggaacttctctgctgttccatggaagaataccaacagtcccaggtgaagctacaggacttcttccagtgtggtacttatgtctgtcctttcatcagtgatgctttggtcctaagacggaccattcttcccacacaggtggaaaacatgcagcaaccaaatgcccacagaatatctcagcccatcaggcaaatcatctatgggcttcttttaaatgcctcaccacatctggacaagacatcctggaatgcattgcctcctcagcctctagctttcagtgaagtggaaaggattaataaaaatatcagaacctcaatcatkgatgcagtagaactggccaaggatcattctgacttaagcagattgactgagctctccttgaggaggcggcagatgcttctgttagaaaccctgaaggtgaaacagaccattctggagccaatccctacttcactgaagttgcccattgctgtcagttgctactggttgcagcacaccgagaccaaagcaaagctacatcatctacaatccttactgctcacaatgctagtggggcccttgattgccataatcaacagccctggtaaggaagagctgcaggaagatggtgctaagatgttgtatgcmgagttccaaagagtgaaggcgcagacacggctgggcacaagactggacttagacacagctcacatcttctgtcagtggcagtcctgtctccagatggggatgtatctcaaccagctgctgtccactcctctcccagagccagacctaactcgactgtacagtggaagcctggtgcacggactatgccagcaactgctagcatcgacctctgtagaaagtctcctgagcatatgtcctgaggctaagcaactttatgaatatctattcaatgccacaaggtcatatgcccccgctgaaatattcctaccaaaaggtagatcaaattcaaaaaaaaaaaggcagaagaaacagaataccagctgttctaagaacagagggagaaccactgcacacaccaagtgttggtatgagggaaacaaccggtttgggttgttaatggttgaaaacttagaggaacatagtgaggcctccaacattgaataaaactcagtttgcatcaaactagatgtatttaatataatccttacttaaaattcttccgttaccacccttgaaacaattagctttttctttaggactgacctgttaggggataaacatcacaataatctgaattccaagttattttgtattttgtttttaataaatacaacctgatttaagaa

SEQ ID NO: 210 - DNA, 2629 bp, Homo sapiens
caagctttcctagcctgacagcagccatttcggaacgtacgtcccagccctctttagctacttagcgcctctgggcccgagaacacctgctccttggctcagtctggcgccaccggcatcacggaactgtacttcccagagacgtcacaccgggagacttccgattcccgctcttgagattggactctcacgtgcaggagccagtcctcgctgggctctagcgggcttctgatggaggagctactcctctgggaggacagaaattagcagcagcctctgtcaccatccaaagattacaacccatgaaaccattgartttgtgccttgtatcagaaagcaaaggagaatgaaaaagcacagctaacattgcttgaggatctaggcgattaattctttagactgtcatcatgggtatccgaggactaatgagttttgtggaagatcatagtaatgagttcttcactgatttgaagttgcgggacacaaaaattgtcattgatggttatgctcttttccaccgtctttgcttcagttcaaacttggatctccggtatggaggggactatgattcttttgcagatgttgtacaaaaattctttgaatcactgtttgcttgtaatatatgcccatatgttgtattagatggaggatgtgacatttcagataaaaagcttacaactttaaaggatagagctagagagaagatccagatggcccattccctttctgttggtgggagtgggtaygtatgtcccttactcatccgggaagtattcatacaggttttgatcaagctgcgggtgtgttttgtccagtgcttttcagaagcagatcgggacattatgacacttgctaaccattggaattgccctgtgttatcatcagatagtgacttttgcatttttgacctgaaaactgggttttgcccattgaatagctttcagtggagaaatatgaacactattaagggcacacaaaactatatccctgccaaatgcttttcccttgatgcattctgccatcacttcagcaatatgaataaagctctactacctctctttgcggtgctatgtggaaatgaccatgttaatctacccatcatggagacattcttaagtaaagcgcgtcttcctcttggagctaccagttctaaagggaggagacaccaccgaatcctgggacttctgaattggttgtctcattttgccaaccctaccgaagcactagataatgttctgaaatacctcccaaaaaaggatcgagaaaatgttaaggaacttctctgctgttccatggaagaataccaacagtcccaggtgaagctacaggacttcttccagtgtggtacttatgtctgtccagatgccttgaatcttggtttaccagaatgggtattagtggctttagctaaaggccagctatctcctttcatcagtgatgctttggtcctaagacggaccattcttcccacacaggtggaaaacatgcagcaaccaaatgcccacagaatatctcagcccatcaggcaaatcatctatgggcttcttttaaatgcctcaccacatctggacaagacatcctggaatgcattgcctcctcagcctctagctttcagtgaagtggaaaggattaataaaaatatcagaacctcaatcatkgatgcagtagaactggccaaggatcattctgacttaagcagattgactgagctctccttgaggaggcggcagatgcttctgttagaaaccctgaaggtgaaacagaccattctggagccaatccctacttcactgaagttgcccattgctgtcagttgctactggttgcagcacaccgagaccaaagcaaagctacatcatctacaatccttactgctcacaatgctagtggggcccttgattgccataatcaacagccctggtaaggaagagctgcaggaagatggtgctaagatgttgtatgcmgagttccaaagagtgaaggcgcagacacggctgggcacaagactggacttagacacagctcacatcttctgtcagtggcagtcctgtctccagatggggatgtatctcaaccagctgctgtccactcctctcccagagccagacctaactcgactgtacagtggaagcctggtgcacggactatgccagcaactgctagcatcgacctctgtagaaagtctcctgagcatatgtcctgaggctaagcaactttatgaatatctattcaatgccacaaggtcatatgcccccgctgaaatattcctaccaaaaggtagatcaaattcaaaaaaaaaaaggcagaagaaacagaataccagctgttctaagaacagagggagaaccactgcacacaccaagtgttggtatgagggaaacaaccggtttgggttgttaatggttgaaaacttagaggaacatagtgaggcctccaacattgaataaaactcagtttgcatcaaactagatgtatttaatataatccttacttaaaattcttccgttaccacccttgaaacaattagctttttctttaggactgacctgttaggggataaacatcacaataatctgaattccaagttattttgtattttgtttttaataaatacaacctgatttaagaa

SEQ ID NO: 211 - DNA, 2470 bp, Homo sapiens
tgtcgagttatagcagtgctggattgggagctgtcaaccattggtcatcctttgtcagacttagctcatttttccctgttctacttttggccaaggacagttccaatgataaatcaaggttcttatagtgaaaactcagggataccatcaatggaagaactgatttcaatatattgccgctgcaggggaattaattctattcttcctaactggaatttctttcttgccctttcatattttaagatggctggaatagcacagggagtatatagcagatatcttctgggaaataattcatctgaggatagctttttatttgccaatattgtgcaacctctggcagaaactggactacaactctccaaacgaactttcagtactktactaccacagattgatactactggacagttgtttgtacagactcggaaaggtcaggaagttcttattaaggtgaagcatttcatgaaacaacacattcttccagctgaaaaggaggtaactgagttctatgttcaaaatgaaaattcagtggacaagtggggaaaacctttagtgattgataaactcaaggaaatggccaaagtcgagggtctctggaacttgtttttgccagctgtcagcggactcagccacgtggactatgccttgattgctgaagaaacaggaaaatgcttttttgctccagatgtctttaactgccaagcaccagacacagggaatatggaggttctgcacctgtatggaagtgaggaacagaagaaacagtggcttgagcctcttcttcaagggaacattacctcttgcttctgtatgacagaacctgatgtagcttcaagtgatgccacgaatattgaatgcagcatccaacgagatgaagatagctatgtaattaacggcaaaaaatggtggagcagtggagctgggaatcccaagtgcaaaattgcaattgttttgggaagaactcaaaatacttctctctccagacacaaacagcacagcatgattcttgttcccatgaacacacctggagtaaaaataataaggcctttgtcagtttttggctacacagataattttcatggaggacattttgagatccattttaatcaagtgcgagttcctgccacaaatctaatactaggtgaaggtaggggatttgaaatttcccaaggccgccttggacctggcagaatccaccactgtatgagaacagtaggtttggcggaacgcgmtttgcagatcatgtgtgagcgggcaacacaaaggatagctttcaagaagaagttgtatgcacatgaggttgtggctcactggattgctgaaagccgcattgccattgagaagatccgcttgttgactctgaaagctgctcacagcatggacactctgggcagtgctggcgctaagaaagagattgcaatgatcaaagtggctgccccacgggctgtcagcaaaatcgttgactgggccatccaggtgtgcggaggtgctggtgtttcccaggattaccctctggctaacatgtatgctataacccgagttttgcgtttagcagatggacctgacgaagttcatctttcagcaatygcaacaatggagctgcgggaccaagccaaaagactgacagccaagatataaggagggtggcactgccacatcccactggcagaaactctcctttatacaaacttcattggctccaacatttgaatctcatatttttgtagcagtttgagcacagggttaattattcatttgtggtaaagattatagcatctattttgatcagtgggttttattatttcaagggtcacacagggttaagttcagtaagaaatgctgtagctgttgtcattcaatctagtgcctccttgaggccaggagttcaggaccagcctgggcaacatagcgagacccccattgctacaaaaaatttaaaaatgaaacaagtgtggtggcacatgcttgtagtcctagctacttgggaggctgaggcaggaggattgcttgagtctaggagtttgaggttacagtaagctgtgatcgtgacatggcctccagcctgggtgaccgagtgagactgtttctaaaaataaaaacaaaaaataaatttcttcttgaggtggggtggaggtggggagcaagaatttgacctggctctgatccctggtgtgttgtgtgggcctctttaacgtttgccactgagccttaacctcactgtacttcactgtacttcacacgcattggtgttaacattttaatcttagaagaccctgacccactgagggtttgttgtgagaattgctgaagccacgtagaagcmccttgaaatctgtaaaaccacaagaaagtactttataaaaggtatccttatttgaagtggataaatcttgtaactcgaaaagttgtgatttagaagacaggattgtttttgaacattaggaattaaaggctatatctggtcctt

SEQ ID NO: 212 - DNA, 4325 bp, Homo sapiens
gctctttcggcttccttcctcgctgggccggctaaacccggccgcagcagcaccggggtgataagtgtccaggrcaggaggccagcgatgttgccttgctaaccgggtatctaagagaaacagggtctttttattcttaggctcgacagtctgacggccctttttctgaacgggaccctgcaggtcttccgcctgctgttgcattaaatttgggggtggaagaggcttctgcgttgttccttacccgcaacgatgaccatggctttgccttctttaaaattgaggcctccaactctgacgctgactggagaattgaaacccgaacacacattgggctcttttggcacttgactagagctaaaacctcgggattcagcgggcaagcgttgctcagcaacggcgcgtaggctgtgtgcggttggctggagccagaccccaccccggcctcggcccatgctctagaggggacgttgccccaatcctgaaggacttcggcactcgagacctgtggatgccgcgttgctgtggcctgcgggggtgatcatgaagccaggtgctactggcgagtccgatttggccgaagtgctgccccagcacaagttcgacagcaagtccctggaggcctacctaaaccagcacttgtctggctttggggccgaacgtgaggctacgctgaccattgcccagtacagagcaggaaagtccaatccaaccttttatctccagaagggctttcaaacatatgtgctcaggaaaaaaccaccaggttcacttcttcctaaagcacatcagattgatagagaatttaaagtccagaaagccttgttttcaattggattccccgttcccaagcctatactgtactgcagtgatacttctgtcattggaacagaattttacgtaatggaacatgtgcagggtcgaatcttccgtgatttaacaattcctggacttagcccagcagaacgttcagccatatatgtggccacggtagaaacattggctcagttacrttccttgaatatacagtcactgcagctggaaggatatggtataggtgctgggtactgcaaaagacaggtatcaacctggacaaagcaatatcaagctgcagctcatcaggacatccctgccatgcaacagctatcggagtggctaatgaagaacttgcccgataatgacaatgaagagaatttgattcatggagatttcagactagataacatagttttccaccctaaagagtgtcgagttatagcagtgctggattgggagctgtcaaccattggtcatcctttgtcagacttagctcatttttccctgttctacttttggccaaggacagttccaatgataaatcaaggttcttatagtgaaaactcagggataccatcaatggaagaactgatttcaatatattgccgctgcaggggaattaattctattcttcctaactggaatttctttcttgccctttcatattttaagatggctggaatagcacagggagtatatagcagatatcttctgggaaataattcatctgaggatagctttttatttgccaatattgtgcaacctctggcagaaactggactacaactctccaaacgaactttcagtactktactaccacagattgatactactggacagttgtttgtacagactcggaaaggtcaggaagttcttattaaggtgaagcatttcatgaaacaacacattcttccagctgaaaaggaggtaactgagttctatgttcaaaatgaaaattcagtggacaagtggggaaaacctttagtgattgataaactcaaggaaatggccaaagtcgagggtctctggaacttgtttttgccagctgtcagcggactcagccacgtggactatgccttgattgctgaagaaacaggaaaatgcttttttgctccagatgtctttaactgccaagcaccagacacagggaatatggaggttctgcacctgtatggaagtgaggaacagaagaaacagtggcttgagcctcttcttcaagggaacattacctcttgcttctgtatgacagaacctgatgtagcttcaagtgatgccacgaatattgaatgcagcatccaacgagatgaagatagctatgtaattaacggcaaaaaatggtggagcagtggagctgggaatcccaagtgcaaaattgcaattgttttgggaagaactcaaaatacttctctctccaggtaattaaacaawtctgattgagaaacctgtgtaggaatgagccagtcttcctcctatctaggtaatttacttaaaattcactgtttggactcacaaatcataatgtaagatatgagagtaaatgtcatatatttgtatttcacaagtattttctaacaggtgtttttggaaaacattatagggagtattgctgaacattcttcgctgtggaattttcagtattagaaagtgttgctaaattatcaaagctgtttggattaaattatcagacaaattttttcagacctgtgtaatgaagtgattagatgtttagatcaaaggcaataatcttgaaatgtttaattatatatataagttcccagttaccattgttgagcagtgagaagcttcaatcaaacaactcatttattttcaaatcattgtttctgttccagatcacagcctgcatcagactatgttggtgtacgtcttttacacagttcccattccagtcatcactgcttacatgactacatgaaaacatcaaaaagacaattgtgattctgcttattatctgttttatttttcttcttagcaaactttttctaatacaatttttcttttgactagacacaaacagcacagcatgattcttgttcccatgaacacacctggagtaaaaataataaggcctttgtcagtttttggctacacagataattttcatggaggacattttgagatccattttaatcaagtgcgagttcctgccacaaatctaatactaggtgaaggtaggggatttgaaatttcccaaggccgccttggacctggcagaatccaccactgtatgagaacagtaggtttggcggaacgcgmtttgcagatcatgtgtgagcgggcaacacaaaggatagctttcaagaagaagttgtatgcacatgaggttgtggctcactggattgctgaaagccgcattgccattgagaagatccgcttgttgactctgaaagctgctcacagcatggacactctgggcagtgctggcgctaagaaagagattgcaatgatcaaagtggctgccccacgggctgtcagcaaaatcgttgactgggccatccaggtgtgcggaggtgctggtgtttcccaggattaccctctggctaacatgtatgctataacccgagttttgcgtttagcagatggacctgacgaagttcatctttcagcaatygcaacaatggagctgcgggaccaagccaaaagactgacagccaagatataaggagggtggcactgccacatcccactggcagaaactctcctttatacaaacttcattggctccaacatttgaatctcatatttttgtagcagtttgagcacagggttaattattcatttgtggtaaagattatagcatctattttgatcagtgggttttattatttcaagggtcacacagggttaagttcagtaagaaatgctgtagctgttgtcattcaatctagtgcctccttgaggccaggagttcaggaccagcctgggcaacatagcgagacccccattgctacaaaaaatttaaaaatgaaacaagtgtggtggcacatgcttgtagtcctagctacttgggaggctgaggcaggaggattgcttgagtctaggagtttgaggttacagtaagctgtgatcgtgacatggcctccagcctgggtgaccgagtgagactgtttctaaaaataaaaacaaaaaataaatttcttcttgaggtggggtggaggtggggagcaagaatttgacctggctctgatccctggtgtgttgtgtgggcctctttaacgtttgccactgagccttaacctcactgtacttcactgtacttcacacgcattggtgttaacattttaatcttagaagaccctgacccactgagggtttgttgtgagaattgctgaagccacgtagaagcmccttgaaatctgtaaaaccacaagaaagtactttataaaaggtatccttatttgaagtggataaatcttgtaactcgaaaagttgtgatttagaagacaggattgtttttgaacattaggaattaaaggctatatctggtcctt

SEQ ID NO: 213 - DNA, 3360 bp, Homo sapiens
ggaagaggcttctgcgttgttccttacccgcaacgatgaccatggctttgccttctttaaaattgaggcctccaactctgacgctgactggagaattgaaacccgaacacacattgggctcttttggcacttgactagagctaaaacctcgggattcagcgggcaagcgttgctcagcaacggcgcgtaggctgtgtgcggttggctggagccagaccccaccccggctgctgccccagcacaagttcgacagcaagtccctggaggcctacctaaaccagcacttgtctggctttggggccgaacgtgaggctacgctgaccattgcccagtacagagcaggaaagtccaatccaaccttttatctccagaagggctttcaaacatatgtgctcaggaaaaaaccaccaggttcacttcttcctaaagcacatcagattgatagagaatttaaagtccagaaagccttgttttcaattggattccccgttcccaagcctatactgtactgcagtgatacttctgtcattggaacagaattttacgtaatggaacatgtgcagggtcgaatcttccgtgatttaacaattcctggacttagcccagcagaacgttcagccatatatgtggccacggtagaaacattggctcagttacrttccttgaatatacagtcactgcagctggaaggatatggtataggtgctgggtactgcaaaagacaggtatcaacctggacaaagcaatatcaagctgcagctcatcaggacatccctgccatgcaacagctatcggagtggctaatgaagaacttgcccgataatgacaatgaagagaatttgattcatggagatttcagactagataacatagttttccaccctaaagagtgtcgagttatagcagtgctggattgggagctgtcaaccattggtcatcctttgtcagacttagctcatttttccctgttctacttttggccaaggacagttccaatgataaatcaaggttcttatagtgaaaactcagggataccatcaatggaagaactgatttcaatatattgccgctgcaggggaattaattctattcttcctaactggaatttctttcttgccctttcatattttaagatggctggaatagcacagggagtatatagcagatatcttctgggaaataattcatctgaggatagctttttatttgccaatattgtgcaacctctggcagaaactggactacaactctccaaacgaactttcagtactktactaccacagattgatactactggacagttgtttgtacagactcggaaaggtcaggaagttcttattaaggtgaagcatttcatgaaacaacacattcttccagctgaaaaggaggtaactgagttctatgttcaaaatgaaaattcagtggacaagtggggaaaacctttagtgattgataaactcaaggaaatggccaaagtcgagggtctctggaacttgtttttgccagctgtcagcggactcagccacgtggactatgccttgattgctgaagaaacaggaaaatgcttttttgctccagatgtctttaactgccaagcaccagacacagggaatatggaggttctgcacctgtatggaagtgaggaacagaagaaacagtggcttgagcctcttcttcaagggaacattacctcttgcttctgtatgacagaacctgatgtagcttcaagtgatgccacgaatattgaatgcagcatccaacgagatgaagatagctatgtaattaacggcaaaaaatggtggagcagtggagctgggaatcccaagtgcaaaattgcaattgttttgggaagaactcaaaatacttctctctccagacacaaacagcacagcatgattcttgttcccatgaacacacctggagtaaaaataataaggcctttgtcagtttttggctacacagataattttcatggaggacattttgagatccattttaatcaagtgcgagttcctgccacaaatctaatactaggtgaaggtaggggatttgaaatttcccaaggccgccttggacctggcagaatccaccactgtatgagaacagtaggtttggcggaacgcgmtttgcagatcatgtgtgagcgggcaacacaaaggatagctttcaagaagaagttgtatgcacatgaggttgtggctcactggattgctgaaagccgcattgccattgagaagatccgcttgttgactctgaaagctgctcacagcatggacactctgggcagtgctggcgctaagaaagagattgcaatgatcaaagtggctgccccacgggctgtcagcaaaatcgttgactgggccatccaggtgtgcggaggtgctggtgtttcccaggattaccctctggctaacatgtatgctataacccgagttttgcgtttagcagatggacctgacgaagttcatctttcagcaatygcaacaatggagctgcgggaccaagccaaaagactgacagccaagatataaggagggtggcactgccacatcccactggcagaaactctcctttatacaaacttcattggctccaacatttgaatctcatatttttgtagcagtttgagcacagggttaattattcatttgtggtaaagattatagcatctattttgatcagtgggttttattatttcaagggtcacacagggttaagttcagtaagaaatgctgtagctgttgtcattcaatctagtgcctccttgaggccaggagttcaggaccagcctgggcaacatagcgagacccccattgctacaaaaaatttaaaaatgaaacaagtgtggtggcacatgcttgtagtcctagctacttgggaggctgaggcaggaggattgcttgagtctaggagtttgaggttacagtaagctgtgatcgtgacatggcctccagcctgggtgaccgagtgagactgtttctaaaaataaaaacaaaaaataaatttcttcttgaggtggggtggaggtggggagcaagaatttgacctggctctgatccctggtgtgttgtgtgggcctctttaacgtttgccactgagccttaacctcactgtacttcactgtacttcacacgcattggtgttaacattttaatcttagaagaccctgacccactgagggtttgttgtgagaattgctgaagccacgtagaagcmccttgaaatctgtaaaaccacaagaaagtactttataaaaggtatccttatttgaagtggataaatcttgtaactcgaaaagttgtgatttagaagacaggattgtttttgaacattaggaattaaaggctatatctggtcctt

SEQ ID NO: 214 - DNA, 3454 bp, Homo sapiens
gctctttcggcttccttcctcgctgggccggctaaacccggccgcagcagcaccggggtgataagtgtccaggrcaggaggccagcgatgttgccttgctaaccgggtatctaagagaaacagggtctttttattcttaggctcgacagtctgacggccctttttctgaacgggaccctgcaggtcttccgcctgctgttgcattaaatttgggggtggaagaggcttctgcgttgttccttacccgcaacgatgaccatggctttgccttctttaaaattgaggcctccaactctgacgctgactggagaattgaaacccgaacacacattgggctcttttggcacttgactagagctaaaacctcgggattcagcgggcaagcgttgctcagcaacggcgcgtaggctgtgtgcggttggctggagccagaccccaccccggcctcggcccatgctctagaggggacgttgccccaatcctgaaggacttcggcactcgagacctgtggatgccgcgttgctgtggcctgcgggggtgatcatgaagccaggtgctactggcgagtccgatttggccgaagtgctgccccagcacaagttcgacagcaagtccctggaggcctacctaaaccagcacttgtctggctttggggccgaacgtgaggctacgctgaccattgcccagtacagagcaggaaagtccaatccaaccttttatctccagaagggctttcaaacatatgtgctcaggaaaaaaccaccaggttcacttcttcctaaagcacatcagattgatagagaatttaaagtccagaaagccttgttttcaattggattccccgttcccaagcctatactgtactgcagtgatacttctgtcattggaacagaattttacgtaatggaacatgtgcagggtcgaatcttccgtgatttaacaattcctggacttagcccagcagaacgttcagccatatatgtggccacggtagaaacattggctcagttacrttccttgaatatacagtcactgcagctggaaggatatggtataggtgctgggtactgcaaaagacaggtatcaacctggacaaagcaatatcaagctgcagctcatcaggacatccctgccatgcaacagctatcggagtggctaatgaagaacttgcccgataatgacaatgaagagaatttgattcatggagatttcagactagataacatagttttccaccctaaagagggagtatatagcagatatcttctgggaaataattcatctgaggatagctttttatttgccaatattgtgcaacctctggcagaaactggactacaactctccaaacgaactttcagtactktactaccacagattgatactactggacagttgtttgtacagactcggaaaggtcaggaagttcttattaaggtgaagcatttcatgaaacaacacattcttccagctgaaaaggaggtaactgagttctatgttcaaaatgaaaattcagtggacaagtggggaaaacctttagtgattgataaactcaaggaaatggccaaagtcgagggtctctggaacttgtttttgccagctgtcagcggactcagccacgtggactatgccttgattgctgaagaaacaggaaaatgcttttttgctccagatgtctttaactgccaagcaccagacacagggaatatggaggttctgcacctgtatggaagtgaggaacagaagaaacagtggcttgagcctcttcttcaagggaacattacctcttgcttctgtatgacagaacctgatgtagcttcaagtgatgccacgaatattgaatgcagcatccaacgagatgaagatagctatgtaattaacggcaaaaaatggtggagcagtggagctgggaatcccaagtgcaaaattgcaattgttttgggaagaactcaaaatacttctctctccagacacaaacagcacagcatgattcttgttcccatgaacacacctggagtaaaaataataaggcctttgtcagtttttggctacacagataattttcatggaggacattttgagatccattttaatcaagtgcgagttcctgccacaaatctaatactaggtgaaggtaggggatttgaaatttcccaaggccgccttggacctggcagaatccaccactgtatgagaacagtaggtttggcggaacgcgmtttgcagatcatgtgtgagcgggcaacacaaaggatagctttcaagaagaagttgtatgcacatgaggttgtggctcactggattgctgaaagccgcattgccattgagaagatccgcttgttgactctgaaagctgctcacagcatggacactctgggcagtgctggcgctaagaaagagattgcaatgatcaaagtggctgccccacgggctgtcagcaaaatcgttgactgggccatccaggtgtgcggaggtgctggtgtttcccaggattaccctctggctaacatgtatgctataacccgagttttgcgtttagcagatggacctgacgaagttcatctttcagcaatygcaacaatggagctgcgggaccaagccaaaagactgacagccaagatataaggagggtggcactgccacatcccactggcagaaactctcctttatacaaacttcattggctccaacatttgaatctcatatttttgtagcagtttgagcacagggttaattattcatttgtggtaaagattatagcatctattttgatcagtgggttttattatttcaagggtcacacagggttaagttcagtaagaaatgctgtagctgttgtcattcaatctagtgcctccttgaggccaggagttcaggaccagcctgggcaacatagcgagacccccattgctacaaaaaatttaaaaatgaaacaagtgtggtggcacatgcttgtagtcctagctacttgggaggctgaggcaggaggattgcttgagtctaggagtttgaggttacagtaagctgtgatcgtgacatggcctccagcctgggtgaccgagtgagactgtttctaaaaataaaaacaaaaaataaatttcttcttgaggtggggtggaggtggggagcaagaatttgacctggctctgatccctggtgtgttgtgtgggcctctttaacgtttgccactgagccttaacctcactgtacttcactgtacttcacacgcattggtgttaacattttaatcttagaagaccctgacccactgagggtttgttgtgagaattgctgaagccacgtagaagcmccttgaaatctgtaaaaccacaagaaagtactttataaaaggtatccttatttgaagtggataaatcttgtaactcgaaaagttgtgatttagaagacaggattgtttttgaacattaggaattaaaggctatatctggtcctt

SEQ ID NO: 215 - DNA, 2973 bp, Homo sapiens
ctctagtcaagtgccaaaagagcccaatgtgtgttcgggtttcaattctccagtcagcgtcagagttggaggcctcaattttaaagaaggcaaagccatggtcatcgttgcgggtaaggaacaacgcagaagcctcttccacccccaaatttaatgcaacagcaggcggaagacctgcagggtcccgttcagaaaaagggccgtcagactgtcgagcctaagaataaaaagaccctgtttctcttagatacccggttagcaaggcaacatcgctggcctcctgycctggacacttatcaccccggtgctgctgcggccgggtttagccggcccagcgaggaaggaagccgaaagagccaggtttttgatgagggggagcgatgtctgcgacgcaccggaagcggctccgaggaaggcctgtgggagtctcggagacgtgtctgtctgtgaggcgctgggtgcacgtccccagggctctgggctaggaaggcagcggsgaggtgcctccccacgtacccctcgcgggcccagcmgagcaacgtggggcgaaggcggcggcgaaggcccgggctgggagcgttggcggccggagtcccagccatggcggagtctgtggagcgcctgcagcagcgggtccaggagctggagcgggaacttgcccaggagaggagtctgcaggtcccgaggagcggcgacggagggggcggccgggtccgcatcgagaagatgagctcagaggtggtggattcgaatccctacagccgcttgatggcattgaaacgaatgggaattgtaagcgactatgagaaaatccgtacctttgccgtagcaatagtaggtgttggtggagtaggtagtgtgactgctgaaatgctgacaagatgtggcattggtaagttgctactctttgattatgacaaggtggaactagccaatatgaatagacttttcttccaacctcatcaagcaggattaagtaaagttcaagcagcagaacatactctgaggaacattaatcctgatgttctttttgaagtacacaactataatataaccacagtggaaaactttcaacatttcatggatagaataagtaatggtgggttagaagaaggaaaacctgttgatctagttcttagctgtgtggacaattttgaagctcgaatgacaataaatacagcttgtaatgaacttggacaaacatggatggaatctggggtcagtgaaaatgcagtttcagggcatatacagcttataattcctggagaatctgcttgttttgygtgtgctccaccacttgtagttgctgcaaatattgatgaaaagactctgaaacgagaaggtgtttgtgcagccagtcttcctaccactatgggtgtggttgctgggatcttagtacaaaacgtgttaaagtttctgttaaattttggtactgttagtttttaccttggatacaatgcaatgcaggatttttttcctactatgtccatgaagccaaatcctcagtgtgatgacagaaattgcaggaagcagcaggaggaatataagaaaaaggtagcagcactgcctaaacaagaggttatacaagaagaggaagagataatccatgaagataatgaatggggtattgagctggtatctgaggtttcagaagaggaactgaaaaatttttcaggtccagttccagacttacctgaaggaattacagtggcatacacaattccaaaaaagcaagaagattctgtcactgagttaacagtggaagattctggtgaaagcttggaagacctcatggccaaaatgaagaatatgtagataatggastgggatatattgtatttctcatgttaaagcctcttcccttgaaattaaaaaaaaattttaactgataaaacttagggcaacattaattaatgtatattcttacctgaattgttatactttttgaaaatcctgtgacttgcctgtttctccccgctccaacgaaatcattaactctcctaaaatgtgtttcattctaataaatcttacttgaaaacatagctgttgaaatgttttggccttttggagtgggggaaggacaaatctgatcctgtaatctttttctttccagtaatcccttgtgtctgttgcatgaggacatggacaataaagtagtatatgatcctcagatacagggagaaggacaaggcatacagcttattgattagagctggcaagcatctkctcattatgtttggaattgctttctataagaaaattgcccactactactaacttgatcaacaatgaattcaaaatagttaacctatgaaataacatcctctcaaatgtttgctgatgaagtacaagttgaaatgtagttattggaaaagtctgtaacctgtggatcatatatattcaaagtgagacaaaggcaaataaaaagcagctattttcatgaatagacaaagttgatttcaggaagtataaattatattctgcaccgaacaaggaacagaaattattgcatctgtggaacatatatctggagttactatactttactgaagagcaaggcataaatttagactaaaatccatccagattacactcattctttaggctactcctggatacttcatttaaatttgattttcgaggtagtgagatgtcggcaaggtttgtcctgtatattaggaataaaggaaaagttctaaactgcctctgcaatgacttgtagtcagtggaagagtatcactttcccctgatcatgaccactaaactgtaaattgatataaattagttttctctcgagttacacccaagtaatgaagacttaagagaaccttggttgaaataaatttccaatagtttggagactcataaataccatgcaggtgtaaccactgccaataggctgtttctatgcttatttcctattttgatttttactttgaagataggaatatctaaattatatctctagggaga

SEQ ID NO: 216 - DNA, 3003 bp, Homo sapiens
ctctagtcaagtgccaaaagagcccaatgtgtgttcgggtttcaattctccagtcagcgtcagagttggaggcctcaattttaaagaaggcaaagccatggtcatcgttgcgggtaaggaacaacgcagaagcctcttccacccccaaatttaatgcaacagcaggcggaagacctgcagggtcccgttcagaaaaagggccgtcagactgtcgagcctaagaataaaaagaccctgtttctcttagatacccggttagcaaggcaacatcgctggcctcctgycctggacacttatcaccccggtgctgctgcggccgggtttagccggcccagcgaggaaggaagccgaaagagccaggtttttgatgagggggagcgatgtctgcgacgcaccggaagcggctccgaggaaggcctgtgggagtctcggagacgtgtctgtctgtgaggcgctgggtgcacgtccccagggctctgggctaggaaggcagcggsgaggtgcctccccacgtacccctcgcgggcccagcmgagcaacgtggggcgaaggcggcggcgaaggcccgggctgggagcgttggcggccggagtcccagccatggcggagtctgtggagcgcctgcagcagcgggtccaggagctggagcgggaacttgcccaggagaggagtctgcaggtcccgaggagcggcgacggagggggcggccgggtccgcatcgagaagatgagctcagaggtggtggattcgaatccctacagccgcttgatggcattgaaacgaatgggaattgtaagcgactatgagaaaatccgtacctttgccgtagcaatagtaggtgttggtggagtaggtagtgtgactgctgaaatgctgacaagatgtggcattggtaagttgctactctttgattatgacaaggtggaactagccaatatgaatagacttttcttccaacctcatcaagcaggattaagtaaagttcaagcagcagaacatactctgaggaacattaatcctgatgttctttttgaagtacacaactataatataaccacagtggaaaactttcaacatttcatggatagaataagtaatggtgggttagaagaaggaaaacctgttgatctagttcttagctgtgtggacaattttgaagctcgaatgacaataaatacagcttgtaatgaacttggacaaacatggatggaatctggggtcagtgaaaatgcagtttcagggcatatacagcttataattcctggagaatctgcttgttttgygtgtgctccaccacttgtagttgctgcaaatattgatgaaaagactctgaaacgagaaggtgtttgtgcagccagtcttcctaccactatgggtgtggttgctgggatcttagtacaaaacgtgttaaagtttctgttaaattttggtactgttagtttttaccttggatacaatgcaatgcaggatttttttcctactatgtccatgaagccaaatcctcagtgtgatgacagaaattgcaggaagcagcaggaggaatataagaaaaaggtagcagcactgcctaaacaagaggttatacaagaagaggaagagataatccatgaagataatgaatggggtattgagctggtatctgaggtttcagaagaggaactgaaaaatttttcaggtccagttccagacttacctgaaggaattacagtggcatacacaattccaaaaaagcaagaagattctgtcactgagttaacagtggaagattctggtgaaagcttggaagacctcatggccaaaatgaagaatatgtagataatggastgggatatattgtatttctcatgttaaagcctcttcccttgaaattaaaaaaaaattttaactgataaaacttagggcaacattaattaatgtatattcttacctgaattgttatactttttgaaaatcctgtgacttgcctgtttctccccgctccaacgaaatcattaactctcctaaaatgtgtttcattctagtaagaaaacctcaaaggatattgtaggatataaatcttacttgaaaacatagctgttgaaatgttttggccttttggagtgggggaaggacaaatctgatcctgtaatctttttctttccagtaatcccttgtgtctgttgcatgaggacatggacaataaagtagtatatgatcctcagatacagggagaaggacaaggcatacagcttattgattagagctggcaagcatctkctcattatgtttggaattgctttctataagaaaattgcccactactactaacttgatcaacaatgaattcaaaatagttaacctatgaaataacatcctctcaaatgtttgctgatgaagtacaagttgaaatgtagttattggaaaagtctgtaacctgtggatcatatatattcaaagtgagacaaaggcaaataaaaagcagctattttcatgaatagacaaagttgatttcaggaagtataaattatattctgcaccgaacaaggaacagaaattattgcatctgtggaacatatatctggagttactatactttactgaagagcaaggcataaatttagactaaaatccatccagattacactcattctttaggctactcctggatacttcatttaaatttgattttcgaggtagtgagatgtcggcaaggtttgtcctgtatattaggaataaaggaaaagttctaaactgcctctgcaatgacttgtagtcagtggaagagtatcactttcccctgatcatgaccactaaactgtaaattgatataaattagttttctctcgagttacacccaagtaatgaagacttaagagaaccttggttgaaataaatttccaatagtttggagactcataaataccatgcaggtgtaaccactgccaataggctgtttctatgcttatttcctattttgatttttactttgaagataggaatatctaaattatatctctagggaga

SEQ ID NO: 217 - DNA, 1423 bp, Homo sapiens
caagcaccgtgggaccttggctggcttctggggagcaagagatccatttatgaatacttgatttctgactgctgggaagcacggctgatgctccgaaggagggaagactgacccggtttctggacttcacccagctgatggacatggcatctgaatccgtaggaggaaaaattttatttgcaacagatgacttttttgctcctgcagaaaacctcataaagagtgacagcccgtgcttcaaagagcatgaatayacggagtttgggaaatggatggatggctgggagaccaggaggaaaaggattccaggtcacgactggtgtgtcctcaggctggggatccaaggagtcatccggggcttcgacgtggacgtttcttacttcacgggagattacgctcctcgagtgtccattcaagcagcaaacttggaagaagataaactaccagaaatcccagaaagaggaaccaggacaggagctgcagccactcctgaggagtttgaagccattgctgagctaaaatccgacgactggagttacttggttcccatgactgagcttaagccaggaaaccctgcttccggccacaactattttcttgtcaattcccagcagagatggactcatatcagactcaacattttcccagatggtggaattgcacgacttagagtattcggtactggacaaaaagactggactgcaactgaccccaaagaacctgcagacctagtggccatcgcttttgggggtgtctgtgtaggatttagtaatgctaagtttgggcacccaaacaatataataggagttggcggggcaaagtctatggcggatggttgggaaactgcaagaaggctggaccggccaccaatattagaaaatgatgagaatggcattctcttggttccgggttgtgaatgggcagttttccrattggcacatcctggagtaataactcgaattgaaattgacacaaaatattttgaaggcaatgctcctgacagcygtaaagtggatgggtgcatcctgacaactcaggaagaagaagccgtgatcaggcaaaagtggattctcccggcccacaagtggaaaccactgcttccagtgaccaagttgtctcccaaccaaagtcatctgttcgatagcctgaccctagagctccaagatgtcatcactcacgccaggctcaccatcgtccccgacgggggagtgagccgccttcggctccggggcttccccagctccatctgcctcctgaggccccgggagaagcccatgttgaagttctcggtgagcttcaaagcaaacccttaacacacacaaagccccggtgtcggacacacagcagtaatttcccagtcatagtcttcttttcaaatgttttgaacacctggtgatttaataaagtggtcgtctcacaaatt

SEQ ID NO: 218 - DNA, 1880 bp, Homo sapiens
agaatggcagtgatattactctcataacccggctcctgctgaatgactccctctaggatattttctagggttttatgccaatgaagtttttggttttatttgttgtaaatagcaagacttccattgttttaccaaaaaattttcagatcactcattttcactaaatttgtaaaataaaaacatatagggcatgttttagtacaatattttgattaaattaattttctatattaaaaatgcttggtttccaccttctagcaattaatattcgaagaaacaaaacattcgttctactagaatcagatgctgtgagttgattttggtagctatttgctgctctgcagacctaatttcaggctgctgtggttctcagcagcaatttgattttgtgaatattatcttttgtattctgaatcacattgctaagcagggtggtgttgtaaaaataaaaacataaggttctcttgtctgagtctgtgtgggagtcagcgatgcttatttctagcacgaaacattatctgtatggtgaatttcccgaatgctgtttgaccttggagttgttcatttaatgaaaaaaacttcaatgcctactatgtgcccagacctcttctaggtagagacgatacaagagtggtacagaagtgaacaacacaggtaagtggtctggcctacaaggatttcgcattctgggtattggagactgattttagcaggaacttaaaaagataatttcaggctgtgattagagctctggagtaaataacaaagagatatgataaaatgtaacctggggagtcaggcagtggctgaatggaggagggaggagacaacttcagagcatgagagggaagacttttctgaggccatgcctttaaggtgaggaacataagtaatcttttggagagctgggaaagttgttctggtacagggtaatatcaagtgcaaaggccctggggcagtgggcttgttgtatttgagaaacagcaggtgggtgtggccaaagcctaccaagagatgacactggagaagacaggagggtcctgtagtgtatgatacacaagcagccatttttacaaacaataactaaggcacctttccttttcagatggtggaattgcacgacttagagtattcggtactggacaaaaagactggactgcaactgaccccaaagaacctgcagacctagtggccatcgcttttgggggtgtctgtgtaggatttagtaatgctaagtttgggcacccaaacaatataataggagttggcggggcaaagtctatggcggatggttgggaaactgcaagaaggctggaccggccaccaatattagaaaatgatgagaatggcattctcttggttccgggttgtgaatgggcagttttccrattggcacatcctggagtaataactcgaattgaaattgacacaaaatattttgaaggcaatgctcctgacagcygtaaagtggatgggtgcatcctgacaactcaggaagaagaagccgtgatcaggcaaaagtggattctcccggcccacaagtggaaaccactgcttccagtgaccaagttgtctcccaaccaaagtcatctgttcgatagcctgaccctagagctccaagatgtcatcactcacgccaggctcaccatcgtccccgacgggggagtgagccgccttcggctccggggcttccccagctccatctgcctcctgaggccccgggagaagcccatgttgaagttctcggtgagcttcaaagcaaacccttaacacacacaaagccccggtgtcggacacacagcagtaatttcccagtcatagtcttcttttcaaatgttttgaacacctggtgatttaataaagtggtcgtctcacaaatt

SEQ ID NO: 219 - DNA, 3014 bp, Homo sapiens
tgtgattctgtaaacaaggaagtggactcaaagatctgatcaatttcttataggtgctgtagatcagcggtctccaacctattttggcaccagggactggctttgtggaagacaatttttccacagacttggggtggtgagggtggtttcaggatgattcaagcatgttacatttatagtacactttatttctattattattacattgtaatgaaataattatacaactcactgtaatgtatagaatcagtgggagccctgagcttgttttcctgcacctaggtggtcccatttggggatgatgggagacatcatcaggcattagactctcataaggagcacacaacctagatcccttacatgggcagttcacgatagtgttcacattcttaagagaatctgttgcggccactgatctgacaggaggtggagctcaggcagtaatgtgagtggtggggagcatctgtaaatacagatgaagctttactcacttgcccactgctcatctcctggtgtgtgatccaggtcctaacaggccacagagtagtaccggtccatggcccaggggttggggaccgctgccatagatgactgttgtctctcctgccttgggaactgggatgcagagccctttatcactttctgtctcatccaccatttttaatatatggaagcaagctgcttttatatttaagaaataaaactttgattaaatttctttgtcattgaaccatagcttttaacctaacagtgtaatagattgttaattatataactgaagacagcatctagctatcttagttaagatacaaaaagctttaaacattattcttactcttttgtttaatatcccccatcgcccagtttacttcattttagccatttatagaataattaaagtgaaatcaaagtttggctttaaatgataccatgcactgaaaaagagttcctgcgtaatccttagcaccaaaggatgaccttacacagctgaagaacatcatgtaattgtgagagatgaaaaggaagtatattatgtaaaagagggaagaagcaactaggaggtattctgaaagaatggaaacaaccatgctgagttttgactcsatattatttttatttctcaccttaatgcttactgaatagtgttagctaccaaaaggatgcatggctaaagaattgtggggcagtaggtttattgggctaatttgcttatatcctgagattttacatttggtgatggtagcttctgttttccctccttcagggcatccaattttgtttactgaagttcactccttartttcttggggtatctttgtggtagtagaatggaagttacatattcaggccagctgtatatgtgtttcttgggttcacaaccaccttctgttcctgctacactgaatccttcaggggtttaggtgggactgggctatatacatcttaatggggtgggccctcattttttcctttttttttcctcggcatgcctactcaagattcatttggttttgtatgactttgagttgccccagaaggtctggactagacctcttgagctcttgtggtagaatctggcatgtatgtagagaggtgtgtgccccactatgcctcctcttttcccttcattagtttgtcatcattttcatagtgttatttgttcagacaacaagcattcgtaggcctgctcataggtttataggtgctattagtatcctaggtgctgaagtatcttatacaagagaaataagtcacttcttacagactactgggatgttcaagatgcacatacataaaagttaagtaacattttcaggcagtatgtgattatgtgctaaatgtgtgctatagcaataattactctgggaggcagtgacttagcaggtgtctaatacatttattttttatttattattgttattattatttttgagacagtgtcttgctctgttgcccaggctggagtgcagtggagcgatctcagctcattgcaaccttcacctcctgggctcaagcgattctcctgcctcagcctcctgagtagctgggattacagatgctcgcctccaagcccagctaattttttgtattgttagtagagatggggtttcaccatgttggccaggctggtctcgaattcctgacctcaagtgatctgcccaccttggcctctcaaagtgctgagattataggcatgagccaccacacccggccacattaattaaattaattaattaatgtatttatttattttcgagacagagtctcgctctgtcaccccggctagagtgcaatggtgcaatctcggctcactgcaacctctgcctcttgggttctagcgattctcctgcctcagcctccggagtagctggctttacagcttgaaggatgccaatgatgtaccaatccaatgtgaaatctctcctcttatctcctatgctggagaaggattagaargttatgtggcagataaagaattccatgcacctctaatcatcgatgagaatggagttcatgagctggtgaaaaatggtatttgaaccagataccaagttttgtttgccacgataggaatagcttttatttttgatagaccaactgtgaacctacaagacgtcttggacaactgaagtttaaatatccacagggttttattttgcttgttgaactcttagagctattgcaaacttcccaagatccagatgactgaatttcagatagcatttttatgattcccaactcattgaaggtcttatttatataattttttccaagccaaggagaccattggccatccaggaaatttcgtacagctgaaatataggcaggatgttcaacatcagtttacttgcagctggaagcatttgtttttgaagttgtacatagtaataatatgtcattgtacatgttgaaaggtttctatggtactaaaagtttgttttattttatcaaacattaagcttttttaagaaaataattgggcagtgaaataaatgtatcttcttgtctctgga

SEQ ID NO: 220 - DNA, 2403 bp, Homo sapiens
atccctagccccgccccggcgccccgggccgcggccgcctccgcgtccgcgtcgtcgtctgtgctcccggcgctgacgtgtctgggcggtcggcttccactccttcaggcgtcggcagccactagtcgtggcgagaggggcggggtggccggggctggcgctccacttggcccccgctcccggcccgccccgccgccgcggccccccgcatgagggtatatattcggagcgagcgcgggacgccgatgagtggccgcgcggaaggagctggagacggtcgtagctgcggtcgcgccgagaaaggtttacaggtacatacattacacccctatttctacaaagcttggctattagagcattatgaacattaatgacctcaaactcacgttgtccaaagctgggcaagagcacctactacgtttctggaatgagcttgaagaagcccaacaggtagaactttatgcagagctccaggccatgaactttgaggagctgaacttctttttccaaaaggccattgaaggttttaaccagtcttctcaccaaaagaatgtggatgcacgaatggaacctgtgcctcgagaggtattaggcagtgctacaagggatcaagatcagctccaggcctgggaaagtgaaggacttttccagatttctcagaataaagtagcagttcttcttctagctggtgggcaggggacaagactcggcgttgcatatcctaaggggatgtatgatgttggtttgccatcccgtaagacactttttcagattcaagcagagcgtatcctgaagctacagcaggttgctgaaaaatattatggcaacaaatgcattattccatggtatataatgaccagtggcagaacaatggaatctacaaaggagttcttcaccaagcacaagtactttggtttaaaaaaagagaatgtaatcttttttcagcaaggaatgctccccgccatgagttttgatgggaaaattattttggaagagaagaacaaagtttctatggctccagatgggaatggtggtctttatcgggcacttgcagcccagaatattgtggaggatatggagcaaagaggcatttggagcattcatgtctattgtgttgacaacatattagtaaaagtggcagacccacggttcattggattttgcattcagaaaggagcagactgtggagcaaaggtggtagagaaaacgaaccctacagaaccagttggagtggtttgccgagtggatggagtttaccaggtggtagaatatagtgagatttccctggcaacagctcaaaaacgaagctcagacggacgactgctgttcaatgcrgggaacattgccarccatttcttcactgtaccatttctgagagatgttgtcaatgtttatgaacctcagttgcagcaccatgtggctcaaaagaagattccttatgtggatacccaaggacagttaattaagccagacaaacccaatggaataaagatggaaaaatttgtctttgacatcttccagtttgcaaagmagtttgtggtatatgaagtattgcgagaagatgagttttccccactaaagaatgctgatagtcagaatgggaaagacaaccmtactactgcaagrcatgctttgatgtcccttcatcattgctgggtcctcaatgcagggggccatttcatagatgaaaatggctctcgccttccagcaattccccgcagtgctacaaatgggaagtcagagaccatcacagctgatgtcartcacaacttgaaggatgccaatgatgtaccaatccaatgtgaaatctctcctcttatctcctatgctggagaaggattagaargttatgtggcagataaagaattccatgcacctctaatcatcgatgagaatggagttcatgagctggtgaaaaatggtatttgaaccagataccaagttttgtttgccacgataggaatagcttttatttttgatagaccaactgtgaacctacaagacgtcttggacaactgaagtttaaatatccacagggttttattttgcttgttgaactcttagagctattgcaaacttcccaagatccagatgactgaatttcagatagcatttttatgattcccaactcattgaaggtcttatttatataattttttccaagccaaggagaccattggccatccaggaaatttcgtacagctgaaatataggcaggatgttcaacatcagtttacttgcagctggaagcatttgtttttgaagttgtacatagtaataatatgtcattgtacatgttgaaaggtttctatggtactaaaagtttgttttattttatcaaacattaagcttttttaagaaaataattgggcagtgaaataaatgtatcttcttgtctctgga

SEQ ID NO: 221 - DNA, 2352 bp, Homo sapiens
atccctagccccgccccggcgccccgggccgcggccgcctccgcgtccgcgtcgtcgtctgtgctcccggcgctgacgtgtctgggcggtcggcttccactccttcaggcgtcggcagccactagtcgtggcgagaggggcggggtggccggggctggcgctccacttggcccccgctcccggcccgccccgccgccgcggccccccgcatgagggtatatattcggagcgagcgcgggacgccgatgagtggccgcgcggaaggagctggagacggtcgtagctgcggtcgcgccgagaaaggtttacaggtacatacattacacccctatttctacaaagcttggctattagagcattatgaacattaatgacctcaaactcacgttgtccaaagctgggcaagagcacctactacgtttctggaatgagcttgaagaagcccaacaggtagaactttatgcagagctccaggccatgaactttgaggagctgaacttctttttccaaaaggccattgaaggttttaaccagtcttctcaccaaaagaatgtggatgcacgaatggaacctgtgcctcgagaggtattaggcagtgctacaagggatcaagatcagctccaggcctgggaaagtgaaggacttttccagatttctcagaataaagtagcagttcttcttctagctggtgggcaggggacaagactcggcgttgcatatcctaaggggatgtatgatgttggtttgccatcccgtaagacactttttcagattcaagcagagcgtatcctgaagctacagcaggttgctgaaaaatattatggcaacaaatgcattattccatggtatataatgaccagtggcagaacaatggaatctacaaaggagttcttcaccaagcacaagtactttggtttaaaaaaagagaatgtaatcttttttcagcaaggaatgctccccgccatgagttttgatgggaaaattattttggaagagaagaacaaagtttctatggctccagatgggaatggtggtctttatcgggcacttgcagcccagaatattgtggaggatatggagcaaagaggcatttggagcattcatgtctattgtgttgacaacatattagtaaaagtggcagacccacggttcattggattttgcattcagaaaggagcagactgtggagcaaaggtggtagagaaaacgaaccctacagaaccagttggagtggtttgccgagtggatggagtttaccaggtggtagaatatagtgagatttccctggcaacagctcaaaaacgaagctcagacggacgactgctgttcaatgcrgggaacattgccarccatttcttcactgtaccatttctgagagatgttgtcaatgtttatgaacctcagttgcagcaccatgtggctcaaaagaagattccttatgtggatacccaaggacagttaattaagccagacaaacccaatggaataaagatggaaaaatttgtctttgacatcttccagtttgcaaagmagtttgtggtatatgaagtattgcgagaagatgagttttccccactaaagaatgctgatagtcagaatgggaaagacaaccmtactactgcaagrcatgctttgatgtcccttcatcattgctgggtcctcaatgcagggggccatttcatagatgaaaatggctctcgccttccagcaattccccgcttgaaggatgccaatgatgtaccaatccaatgtgaaatctctcctcttatctcctatgctggagaaggattagaargttatgtggcagataaagaattccatgcacctctaatcatcgatgagaatggagttcatgagctggtgaaaaatggtatttgaaccagataccaagttttgtttgccacgataggaatagcttttatttttgatagaccaactgtgaacctacaagacgtcttggacaactgaagtttaaatatccacagggttttattttgcttgttgaactcttagagctattgcaaacttcccaagatccagatgactgaatttcagatagcatttttatgattcccaactcattgaaggtcttatttatataattttttccaagccaaggagaccattggccatccaggaaatttcgtacagctgaaatataggcaggatgttcaacatcagtttacttgcagctggaagcatttgtttttgaagttgtacatagtaataatatgtcattgtacatgttgaaaggtttctatggtactaaaagtttgttttattttatcaaacattaagcttttttaagaaaataattgggcagtgaaataaatgtatcttcttgtctctgga

SEQ ID NO: 222 - DNA, 1942 bp, Homo sapiens
aaagcctgcttccttcaaccctttccaaaatccccaaataaaagcccaaaatctgtakaggatcttcctaacatcctcgtgctgagatgccctgaaattctccataactcatgactgagtaataaaaccaacttgcttaattaaagttggtttcttgtagtcctggccggaggacattgacttacaaaaatataggattagtatcttcaaaataaatagacagtaaacatcaacaaggattcacaccccaataatgaaattgggcagaaaaaggaaaaataatcatgaaatgcacagtaaagatggctccataatattgaaaamaattttacttcaaatgcataaaatgatgcttctgattcagctggtgcgacatttatttcacatttgagttcagctgcwcctgatgtctctttcctgaaaatttcaatactaagagctcgagaaaccctgtatttggggaagcttatccttcaccatcaactttrggggtaggggtcagagggaacaagggtggaaaggccgcgctgaatggggccgaagctccgcccctcagcgataagtccagattcctgcggccgacgtggtcctccgagggagcagcagagccgccgaggctggcgagtcccaggggaaggatgttctagccggagtctactcgatggtagggcaggaagccgccttgtctctgggcgcggccatgttggaggctccgggcccgagtgatggctgcgagctcagcaaccccagcgccagcagagtcagctgtgccgggcagatgctggaagtgcagccaggattgtatttcggtggggccgcggccgtcgcggagccagatcacctgagggaagmgggcatcacggccgtgctaacagtggactcggaggagcccagcttcaaggcggggcctggggtcgaggatctatggcgcctcttcgtgccagcgctggacaaacccgagacggacctactcagccatctggaccggtgcgtggccttcatcggtcaggcccgcgctgagggccgtgcggtgttggtgcactgtcatgcaggagtcagtcgaagtgtggccataataactgcttttctcatgaagactgaccaacttccctttgaaaaagcctatgaaaagctccagattctcaaaccagaggctaagatgaatgaggggtttgagtggcaactgaaattataccaggcaatgggataygaagtggatacctctagtgcaatttataagcaatatcgtttacaaaaggttacagagaagtatccagaattgcagaatttacctcaagaactctttgctgttgacccaactacygtttcacaaggattgaaagatgaggttctctacaagtgtagaaagtgcaggcgatcattatttcgaagttctagtattctggatcaccgtgaaggaagtggacctatagcctttgcccacaagagaatgacaccatcttccatgcttaccacagggaggcaagctcaatgtacatcttatttcattgaacctgtacagwggatggaatctgctttgttgggagtgatggatggacagcttctttgcccaaaatgcagtgccaagttgggttccttcaactggtatggtgaacagtgctcttgtggtaggtggataacacctgcttttcaaatacataagaatagagtggatgaaatgaaaatattgcctgttttgggatcacaaacaggaaaaatatgaacatgatattttatagcttgggaagaaacttgcagatgatatgtgctgcctttgcttcttatcattcatggcagattgtttgtgctttcaacatttcatttgaaatgggagaagataaaatcacttgatgtaacctggaaactatgctttacatggcaatcaaagccttttgatcatgtacattttatttgatattaaaatcttttataaccasatact

SEQ ID NO: 223 - DNA, 1497 bp, Homo sapiens
caagtgaaattgaagggggcagaggaggtctccgtgcaccgtggaggggaagggaagtatccgcgggacgtggaggagggaggggagatctccatggaggctggagggggaagggaggtgaccacagctctgcttcctcctcagggaaggggagtggcccagtgtggctccaaccaccaggcttcacctgtgccctcggccccaccacaggcagagcctgttgctggacttccagttcacttttgttcaggcaagtttattaaactcaaaatgtctaaaaaaatcagtggcggttctgtggtagagatgcaaggagatgaaatgacacaaatcatttgggaattgaataaagagaaactcatttttccctatgtggaactggatgtacatagctatgatttaggcatagagtactgtgatgccaccaacgaccaggtcaccaaggatgctgcagaagctataaagaagtataacgttggtgtcaagtgtgccactatcactgctgatgagaaaagggttgaggagttcaagttgaaacaaatgtggaaatcgccaaatggcaccatccaaaatattctggttggcacggtcctcagagaagccattatctgcaaaaatatcccccagcttgtgagtggatgggtaaaatccatcatcgtaggtcgcattgcttatggggatcaatacagagcagctgattttgttgttcctgggcctggaaaagtagagataacctacacactaagtgacagaacccaaaaggtgacatacctgctgagcaccaaaaacactattctgaagaaatatgatggacgttttaaagacatctttcaggagatatatgacaagcagtacaagtcccagtttgaagcccaaaagatctggtatgagcataggctcgctgatgacatggtggcccaagctatgaaatcagaaggaggcttcatctgggcctgtaaaaactatgatggtgacatgcagtcagactytgtggcccaagggtatggctctcttggcatgatgaccagcatgctagtgtgtccacatggcaagacagtagaagcagaggctgcccactggactgtaacccgtcactwctgcatgtaccagaaaggccaggagatatccaccaatcccattgcttccatttttgcctggaccagagggttggccctccgagcaaagactgataacaataaagagcttgccttttttgcaaatgctttggaagaagtctgtattgagacaattgaggctggtttcatgaccaaggacttggctgcttgcattaaaggtttacccagtgcgcaatgttctgactacttgaatacttttgagttcatggacaaacttggagaaaacttgaagatcaaactggctcaggccaaactttamgttcatacctgggctgaggaggataagtgtcttttgataactaggtctacaggttttcatttttctgtgtcacactcaaggataaaggcaaaatcgattgtg

SEQ ID NO: 224 - DNA, 1593 bp, Homo sapiens
atgtctaaaaaaatcagtggcggttctgtggtagagatgcaaggagatgaaatgacacaaatcatttgggaattgaataaagagaaactcatttttccctatgtggaactggatgtacatagctatgatttaggcatagagtactgtgatgccaccaacgaccaggtcaccaaggatgctgcagaagctataaagaagtataacgttggtgtcaagtgtgccactatcactgctgatgagaaaagggttgaggagttcaagttgaaacaaatgtggaaatcgccaaatggcaccatccaaaatattctggttggcacggtcctcagagaagccattatctgcaaaaatatcccccagcttgtgagtggatgggtaaaatccatcatcgtaggtcgcattgcttatggggatcaatacagagcagctgattttgttgttcctgggcctggaaaagtagagataacctacacactaagtgacagaacccaaaaggtgacatacctggtacataacttggaagagggtggtggtgttgccatagggatgtataatcaagataagtcaatcgaagattttgcacacagttccttccaaatggctctaaggattggcctttgtagctgagcaccaaaaacactattctgaagaaatatgatggacgttttaaagacatctttcaggagatatatgacaagcagtacaagtcccagtttgaagcccaaaagatctggtatgagcataggctcgctgatgacatggtggcccaagctatgaaatcagaaggaggcttcatctgggcctgtaaaaactatgatggtgacatgcagtcagactytgtggcccaagggtatggctctcttggcatgatgaccagcatgctagtgtgtccacatggcaagacagtagaagcagaggctgcccactggactgtaacccgtcactwctgcatgtaccagaaaggccaggagatatccaccaatcccattgcttccatttttgcctggaccagagggttggccctccgagcaaagactgataacaataaagagcttgccttttttgcaaatgctttggaagaagtctgtattgagacaattgaggctggtttcatgaccaaggacttggctgcttgcattaaaggtttacccagtgcgcaatgttctgactacttgaatacttttgagttcatggacaaacttggagaaaacttgaagatcaaactggctcaggccaaactttamgttcatacctgggctgaggaggataagtgtcttttgataactaggtctacaggttttcatttttctgtgtcacactcaaggataaaggcaaaatcgattgtgtaatttgtttagaagcyagagtttatctttwttgtaagtttatagacatatatatatatacagttattgccaccgttgtgaatatgggaagggactttaaattttattttctggtagcagcctaggaattcggttagtactcatttgtattcactgtcactgtttctcatgtyctaatataaatgaccaaaatcaagagtgctcaaagggtaagtgatagccacagtattgttccctaaaatatgcataa

SEQ ID NO: 225 - DNA, 1085 bp, Homo sapiens
ggcggaaaagcgcgcgagcaagatggccaccaccaagcgcgtcttgtacgtgggtggactggcagaggaagtggaygacaaagttcttcatgctgcgttcattccttttggagacatcacagatattcagattcctctggattatgaaacagaaaagcaccgaggatttgcttttgttgaatttgagttggcagaggatgctgcagcagctatcgacaacatgaatgaatctgagctttttggacgtacaattcgtgtcaatttggccaaaccaatgagaattaaggaaggctcttccaggccagtttggtcagatgatgactggttgaagaagttttctgggaagacgcttgaagagaataaagaggaagaagggtcagagcctcccaaagcagagacccaggagggagagcccattgctaaaaaggcccgctcaaatcctcaggtgtacatggacatcaagattgggaacaagccggctggccgcatccagatgctcctgcgttctgatgtcgtgcccatgacagcagagaatttccgctgcctgtgcactcatgaaaagggctttggctttaagggaagcagcttccaccgcatcatcccccagttcatgtgccagggcggtgatttcacaaaccacaatggcactgggggcaagtccatctatgggaagaagttcgatgatgaaaactttatcctcaagcatacgggaccaggtctactatccatggccaactctggcccaaacaccaatggctctcagttcttcctgacatgtgacaagacagactggctggatggcaagcatgtggtgtttggagaggtcaccgaaggcctagatgtcttgcggcaaattgagaaacaagragagtcagcaattaccagccagccraggtcctggaagctgacgtagagctcgtgccgacggcagacctgccggccgtgggagccgyggacgtcatctgcagggacagaaggggcaaggtcttttctggggttcctrctgtgtgcagctactatggggtaccagggtgggggatgccctgatgagcacatttgtcaaataaatgaatgacaggaaacca

SEQ ID NO: 226 - DNA, 1685 bp, Homo sapiens
ggcggaaaagcgcgcgagcaagatggccaccaccaagcgcgtcttgtacgtgggtggactggcagaggaagtggaygacaaagttcttcatgctgcgttcattccttttggagacatcacagatattcagattcctctggattatgaaacagaaaagcaccgaggatttgcttttgttgaatttgagttggcagaggatgctgcagcagctatcgacaacatgaatgaatctgagctttttggacgtacaattcgtgtcaatttggccaaaccaatgagaattaaggaaggctcttccaggccagtttggtcagatgatgactggttgaagaagttttctgggaagacgcttgaagagaataaagaggaagaagggtcagagcctcccaaagcagagacccaggagggagagcccattgctaaaaaggcccgctcaaatcctcaggtgtacatggacatcaagattgggaacaagccggctggccgcatccagatgctcctgcgttctgatgtcgtgcccatgacagcagagaatttccgctgcctgtgcactcatgaaaagggctttggctttaagggaagcagcttccaccgcatcatcccccagttcatgtgccagggcggtgatttcacaaaccacaatggcactgggggcaagtccatctatgggaagaagttcgatgatgaaaactttatcctcaagcatacgggaccaggtctactatccatggccaactctggcccaaacaccaatggctctcagttcttcctgacatgtgacaagacagactggctggatggcaagcatgtggtgtttggagaggtcaccgaaggcctagatgtcttgcggcaaattgaggcccagggcagcaaggacgggaagccaaagcagaaggtgatcatcgccgactgtggggagtacgtgtgaggcggcactctctctgcttccccctccgctcttgaccytgcatatccaggaaggaactgccagcctcagaggaggcagcaccgagggtgcctgtttgaagcaagcagcatttgggatatgtgcccttcctcagggtctgcttggagcagctcctctgcaggcacagcctggactattcccaggcacagctgtgggcccaggagccagctcaggtgctcccctccaccatgggcaggctgtgcaaaaagccacyggcttttctcagcatttgctgctgggcctctcctgggactaccagtgtggctcttacgtgttttctttgctaaaataaaccctagttcttatattgctcttcctgctagttcttgggagttgtcagagattgtgtctgtggctaagctggacctctgaggcaggctggtgagtggggagagcagagcatctttttcacagctttcatttcctcccttgggccgatccccttagatgtcaggtgatgtatcttcacaccaggcatcgatgtcagggcaacggaaattaaagactggaaagctccggtcttctgctgcctctgctcctaaacccagctgccggccttacagccagcaagtgtactctcagtggttcatttgtttatttgttcactttcaccctacagattttaaaaaatgaaatttttataactcaaagtgccttctctgtgccaagtactatgcctatttgtcaggagacaggaagccaacaaactacatgtgcc

SEQ ID NO: 227 - DNA, 2319 bp, Homo sapiens
caaagtttgcccctcttgttaccctcaggcaaatgattgatttagaaaggccccaggggctattttttgcaggaacggtcactccctaaatccaggcarggaaagggaggagtctgagccgagtcacgccccttctcctgtaaacttgggtcgcctctagcttagcgagcgctggagtttgaagagcgggcagtggctgcacacgccaaactttccctatggcttcggtgaccagggccgtgtttggagagctgccctcgggaggagggacagtggagaagttccagctgcagtcagacctcttgagagtggacatcatctcctggggctgcacgatcacagccctagaggtcaaagacaggcargggagagcctcggacgtggtgcttggcttcgccgagttggaaggatacctccaaaagcagccatactttggagcagttattgggagggtggccaaccgaatcgccaaaggaaccttcaaggtggatgggaaggagtatcacctggccattaacaaggaacccaacagtctgcatggaggagtcagagggtttgataaagtgctctggacccctcgggtgctgtcaaatggcgtccagttctcgcgcatcagtccagatggtgaagaaggctaccccggagagttaaaagtctgggtgacatacaccctggatggcggagagctcatagtcaactacagagcacaagccagtcaggccacaccagtcaacctgaccaaccattcttacttcaacctggcaggccaggcttccccaaatatawatgaccatgaagtcaccatagaagcggatacttatttgcctgtggatgaaaccctgattcctacaggagaagttgccccagtgcaaggcactgcattcgacctgagaaagccagtggagcttggaaaacacctgcaggacttccatctcaatggttttgaccacaatttctgtctgaagggatctaaagaaaagcatttttgtgcaagggtgcatcatgctgcaagcgggcgggtactagaagtatacaccacccagcccggggtccagttttacacgggcaacttcctggatggcacattaaagggcaagaatggagctgtctatcccaagcactccggtttctgcctggagactcagaactggcctgatgcagtcaatcagccccgcttccctcctgtgctgctgaggcctggtgaggagtatgaccacaccacctggttcaagttttctgtggcttaaggaagtrtgaagatatgatccagtccagggctaggctcagccacctgtctcctgtccagaaaaaaggtgaagattaagaagctttcagaatgattctatggattaaaatcatacaaatggtggctgttctgagaatcagtctgggtattgatttccttttccagtgactggctccaggccatgtctaatgaccagctcgattccctgtgcagttcagagrgcaagtgaacccaaccaacaatgtcgtcatctaagccctraccctagccagggactcccatgctgctgttggctccatctctccacactgcctctttcttttcaactttttgcccttcctttctttaaagctattctcacattgcttttatttcctcctccttcacctccaaccactgtcagcagcactctggagttttcaaatgtcacattagcctcaccctgcatgctaggagatggacctgtctctatacagcagtagatgattgataagtgaggaaactgaggcttacagaggttgaagaccaacaagctaataaataaaaagttgaggccgggcacggtggctcacgcctgtaatcccagcactttggaaggccgaggcaggcggatcacgaggtcaggagatcgagaccatcctggctaacacggtgaaaccccgtctctacataaaaaattagctgggtgtggtagcacgcaccygtagtyccagctacttgggaggctgaagcaggagaatcgcttgaacctgggaggtggaggttgcagtgagccgagatcatgccactgcactgggcaacagagcaaaactcgatctcaaaaaaaaaaaaaaaaaaaaaggaaaaaaaagcagctctctctctcgggagagggaggggacttccgagaggaaaaggcctgcaagagcctttgggttaactgagaaagcacagcccggccaacgcttgggaagaaagacaggcaagcactggaaacaggagctattagggtgaggagagagccttgcctttcacagcacagtgaggatgacattgcaccagggacagagattgtatgtgacaaggctggggct

SEQ ID NO: 228 - DNA, 2696 bp, Homo sapiens
attcggtagatatgtgtctttagataagtgacttaactttcccgaattttagagtcctcatctaaagattctaataccttcctgacagactgtgaccctgataccgcgtggtgtgctccgaacacatggtgcccagaacgaaggcggcgtccagaagccctaggtcccagmggtccgctcagcggcaggcgcataaggcggggccggcgcgggcctttccttccatcggaaccgttctcccggggctgagtccctgcccggactccgaacgccgaagaccaggggccggaagcgcgcgccgccactgccrcgcygtgtcagtcgggagggagggagcgagcaggcgaagccgcggaggacggggtgaagatggcggccttctccgagatgggtgtaatgcctgagattgcacaagctgtggaagagatggattggctcctcccaactgatatccaggctgaatctatcccaytgatcttaggaggaggtgatgtacttatggctgcagaaacaggaagtggcaaaactggtgcttttagtattccagttatccagatagtttatgaaactctgaaagaccaacaggaaggcaaaaaaggaaaaacaacaattaaaactggtgcttcagtgctgaacaaatggcagatgaacccatatgacagaggatctgcttttgcaattgggtcagatggtctttgttgtcaaagcagagaagtaaaggaatggcatgggtgtagagctactaaaggattaatgaaagggaaacactactatgaagtatcctgtcaygaccaagggttatgcagggtcgggtggtctaccatgcaggcctctttggacctaggtactgacaagtttggatttggctttggtggaacaggaaagaaatcccataacaaacaatttgataattatggagaggaattcactatgcatgataccattggatgttacctggatatagataagggacatgtcaagttctccaaaaatggaaaagatcttggtctggcatttgaaataccaccacatatgaaaaaccaagccctctttcctgcctgtgttttgaagaatgctgaactgaartttaacttcggtgaagaggaatttaagtttccaccaaaagatggctttgttgctctttccaaggcaccggatggttacattgtcaaatcacagcactcaggtaatgcacaggtgacacaaacaaagtttctccccaatgctccgaaagctctcattgttgaaccttcccgggagttagctgaacaaactttgaayaacatcaagcagtttaagaaatacattgataatcctaaattaagggagcttctgataattggaggtgttgcagcccgggatcagctctctgttttggaaaatggagtagatatagttgtaggtactccgggaagactagatgacttggtgtcaactggaaagctgaacttatctcaagttagattcctggtcctggatgaagctgatgggcttctttctcaaggttattctgattttataaataggatgcacaatcagattcctcaggttacctctgatggaaaaagacttcaggtgattgtttgctctgccactttgcattctttcgatgtaaagaaactgtccgagaagataatgcattttcctacatgggttgacttaaaaggagaagactctgttccagatactgtacaccatgttgttgtcccagtaaatcccaaaactgacagactctgggaaaggcttggaaagagccacattagaactgatgatgtacatgcaaaagataacacaagacctggtgctaatagtccagagatgtggtctgaagctattaaaatcctgaaaggggagtatgctgtccgggcaatcaaggaacataagatggatcaagcaattatcttctgtagaaccaaaattgactgtgataacttggagcagtactttatacaacaaggaggaggacctgataaaaaaggacaccagttctcatgtgtttgtcttcatggtgacagaaagcctcatgagagaaagcaaaacttggaaagatttaagaaaggagatgtaagattcttgatttgcacagatgtagctgctagaggaattgatatccacggtgttccttatgttataaatgtcactctgcccgatgaaaagcaaaactacgtacatcgaattggcagagtaggaagagctgaaaggatgggtctggcaatttccctggtggcaacagaaaaagaaaaggtttggtaccatgtatgtagcagccgtggaaaagggtgttataacacaagactcaaggaagatggaggctgtaccatatggtacaacgagatgcagttactatctgagatagaagaacacctgaactgtaccatttctcaggttgagccggatataaaggtaccagtggatgaatttgatgggaaagttacctacggtcagaaaagggctgctggtggtggaagctataaaggccatgtggatattttggcacctactgttcaagagttggctgcccttgaaaaggaggcgcagacatctttcctgcatcttggctaccttcctaaccagctgttcagaaccttctgtgaataagatttgagtaatgaaagtctgtagtcttaaaactctaaaacagttgtactgcttccaagcagcagtatttatagtaacgtaagctattaatgctaact

SEQ ID NO: 229 - DNA, 2788 bp, Homo sapiens
attcggtagatatgtgtctttagataagtgacttaactttcccgaattttagagtcctcatctaaagattctaataccttcctgacagactgtgaccctgataccgcgtggtgtgctccgaacacatggtgcccagaacgaaggcggcgtccagaagccctaggtcccagmggtccgctcagcggcaggcgcataaggcggggccggcgcgggcctttccttccatcggaaccgttctcccggggctgagtccctgcccggactccgaacgccgaagaccaggggccggaagcgcgcgccgccactgccrcgcygtgtcagtcgggagggagggagcgagcaggcgaagccgcggaggacggggtgaagatggcggccttctccgagatgggtgtaatgcctgagattgcacaagctgtggaagagatggattggctcctcccaactgatatccaggctgaatctatcccaytgatcttaggaggaggtgatgtacttatggctgcagaaacaggaagtggcaaaactggtgcttttagtattccagttatccagatagtttatgaaactctgaaagaccaacaggaaggcaaaaaaggaaaaacaacaattaaaactggtgcttcagtgctgaacaaatggcagatgaacccatatgacagaggatctgcttttgcaattgggtcagatggtctttgttgtcaaagcagagaagtaaaggaatggcatgggtgtagagctactaaaggattaatgaaagggaaacactactatgaagtatcctgtcaygaccaagggttatgcagggtcgggtggtctaccatgcaggcctctttggacctaggtactgacaagtttggatttggctttggtggaacaggaaagaaatcccataacaaacaatttgataattatggagaggaattcactatgcatgataccattggatgttacctggatatagataagggacatgtcaagttctccaaaaatggaaaagatcttggtctggcatttgaaataccaccacatatgaaaaaccaagccctctttcctgcctgtgttttgaagaatgctgaactgaartttaacttcggtgaagaggaatttaagtttccaccaaaagatggctttgttgctctttccaaggcaccggatggttacattgtcaaatcacagcactcaggtaatgcacaggtgacacaaacaaagtttctccccaatgctccgaaagctctcattgttgaaccttcccgggagttagctgaacaaactttgaayaacatcaagcagtttaagaaatacattgataatcctaaattaagggagcttctgataattggaggtgttgcagcccgggatcagctctctgttttggaaaatggagtagatatagttgtaggtactccgggaagactagatgacttggtgtcaactggaaagctgaacttatctcaagttagattcctggtcctggatgaagctgatgggcttctttctcaaggttattctgattttataaataggatgcacaatcagattcctcaggttacctctgatggaaaaagacttcaggtgattgtttgctctgccactttgcattctttcgatgtaaagaaactgtccgagaagataatgcattttcctacatgggttgacttaaaaggagaagactctgttccagatactgtacaccatgttgttgtcccagtaaatcccaaaactgacagactctgggaaaggcttggaaagagccacattagaactgatgatgtacatgcaaaagataacacaagacctggtgctaatagtccagagatgtggtctgaagctattaaaatcctgaaaggggagtatgctgtccgggcaatcaaggaacataagatggatcaagcaattatcttctgtagaaccaaaattgactgtgataacttggagcagtactttatacaacaaggaggaggacctgataaaaaaggacaccagttctcatgtgtttgtcttcatggtgacagaaagcctcatgagagaaagcaaaacttggaaagatttaagaaaggagatgtaagattcttgatttgcacagatgtagctgctagaggaattgatatccacggtgttccttatgttataaatgtcactctgcccgatgaaaagcaaaactacgtacatcgaattggcagagtaggaagagctgaaaggatgggtctggcaatttccctggtggcaacagaaaaagaaaaggtttggtaccatgtatgtagcagccgtggaaaagggtgttataacacaagactcaaggaagatggaggctgtaccatatggtacaacgagatgcagttactatctgagatagaagaacacctgaactgtaccatttctcaggttgagccggatataaaggtaccagtggatgaatttgatgggaaagttacctacggtcagaaaagggctgctggtggtggaagctataaaggccatgtggatattttggcacctactgttcaagagttggctgcccttgaaaaggaggcgcagacatctttcctgcatcttggctaccttcctaaccagctgttcagaaccttctgatttttacatttactgaataagatttgagtaatgaaagtctgtagtcttaaaactctaaaacagttgtactgcttccaagcagcagtatttatagtaacgtaagctattaatgctaactcttgcatgtcaagaaacattagtcttaggaattcttcaaaaaatggcatcccaatgaaaataaatttgatgactatat

SEQ ID NO: 230 - DNA, 2699 bp, Homo sapiens
ctgtgaccctgataccgcgtggtgtgctccgaacacatggtgcccagaacgaaggcggcgtccagaagccctaggtcccagmggtccgctcagcggcaggcgcataaggcggggccggcgcgggcctttccttccatcggaaccgttctcccggggctgagtccctgcccggactccgaacgccgaagaccaggggccggaagcgcgcgccgccactgccrcgcygtgtcagtcgggagggagggagcgagcaggcgaagccgcggaggacggggtgaagatggcggccttctccgagatgggtgtaatgcctgagattgcacaagctgtggaagagatggattggctcctcccaactgatatccaggctgaatctatcccaytgatcttaggaggaggtgatgtacttatggctgcagaaacaggaagtggcaaaactggtgcttttagtattccagttatccagatagtttatgaaactctgaaagaccaacaggaaggcaaaaaaggaaaaacaacaattaaaactggtgcttcagtgctgaacaaatggcagatgaacccatatgacagaggatctgcttttgcaattgggtcagatggtctttgttgtcaaagcagagaagtaaaggaatggcatgggtgtagagctactaaaggattaatgaaagggaaacactactatgaagtatcctgtcaygaccaagggttatgcagggtcgggtggtctaccatgcaggcctctttggacctaggtactgacaagtttggatttggctttggtggaacaggaaagaaatcccataacaaacaatttgataattatggagaggaattcactatgcatgataccattggatgttacctggatatagataagggacatgtcaagttctccaaaaatggaaaagatcttggtctggcatttgaaataccaccacatatgaaaaaccaagccctctttcctgcctgtgttttgaagaatgctgaactgaartttaacttcggtgaagaggaatttaagtttccaccaaaagatggctttgttgctctttccaaggcaccggatggttacattgtcaaatcacagcactcaggtaatgcacaggtgacacaaacaaagtttctccccaatgctccgaaagctctcattgttgaaccttcccgggagttagctgaacaaactttgaayaacatcaagcagtttaagaaatacattgataatcctaaattaagggagcttctgataattggaggtgttgcagcccgggatcagctctctgttttggaaaatggagtagatatagttgtaggtactccgggaagactagatgacttggtgtcaactggaaagctgaacttatctcaagttagattcctggtcctggatgaagctgatgggcttctttctcaaggttattctgattttataaataggatgcacaatcagattcctcaggttacctctgatggaaaaagacttcaggtgattgtttgctctgccactttgcattctttcgatgtaaagaaactgtccgagaagataatgcattttcctacatgggttgacttaaaaggagaagactctgttccagatactgtacaccatgttgttgtcccagtaaatcccaaaactgacagactctgggaaaggcttggaaagagccacattagaactgatgatgtacatgcaaaagataacacaagacctggtgctaatagtccagagatgtggtctgaagctattaaaatcctgaaaggggagtatgctgtccgggcaatcaaggaacataagatggatcaagcaattatcttctgtagaaccaaaattgactgtgataacttggagcagtactttatacaacaaggaggaggacctgataaaaaaggacaccagttctcatgtgtttgtcttcatggtgacagaaagcctcatgagagaaagcaaaacttggaaagatttaagaaaggagatgtaagattcttgatttgcacagatgtagctgctagaggaattgatatccacggtgttccttatgttataaatgtcactctgcccgatgaaaagcaaaactacgtacatcgaattggcagagtaggaagagctgaaaggatgggtctggcaatttccctggtggcaacagaaaaagaaaaggtttggtaccatgtatgtagcagccgtggaaaagggtgttataacacaagactcaaggaagatggaggctgtaccatatggtacaacgagatgcagttactatctgagatagaagaacacctgaactgtaccatttctcaggttgagccggatataaaggtaccagtggatgaatttgatgggaaagttacctacggtcagaaaagggctgctggtggtggaagctataaaggccatgtggatattttggcacctactgttcaagagttggctgcccttgaaaaggaggcgcagacatctttcctgcatcttggctaccttcctaaccagctgttcagaaccttctgatttttacatttactgaataagatttgagtaatgaaagtctgtagtcttaaaactctaaaacagttgtactgcttccaagcagcagtatttatagtaacgtaagctattaatgctaactcttgcatgtcaagaaacattagtcttaggaattcttcaaaaaatggcatcccaatgaaaataaatttgatgactatat

SEQ ID NO: 231 - DNA, 3811 bp, Homo sapiens
gagtgtacacgaacgaaaagcactggctggagatcatctatgtggaatgtggacagggcaaggtgcccgtagcccctatggctgacagagaggactggaatgaaattgaccccattaaaaagaaagaccttcatcacagcaatggagaagagaaagcacaaagcatggagaccctccctccagggaaagtacggtggccagactttaaccaggaagcttatgttggagggacgatggtccgctccgggcaggacccttacgcccgcaacaagttcaaccaggtggagagtgataagcttcgaatggacagagccatccctgacacccggcatgaccagtgtcagcggaagcagtggygggtggatctgccggccaccagcgtggtgatcacgtttcacaatgaagccaggtcggccctactcaggaccgtggtcagcgtgcttaagaaaagcccrccccatctcataaaagaaatcatcttggtggatgactacagcaatgatcctgaggacggggctctcttggggaaaattgagaaagtgcgagttcttagaaatgatcgacgagaaggcctcatgcgctcacgggttcggggggccgatgctgcccaagccaaggtcctgaccttcctggacagtcactgcgagtgtaatgagcactggctggagcccctcctggaaagggtggcggaggacaggactcgggttgtgtcacccatcatcgatgtcattaatatggacaactttcagtatgtgggggcatctgctgacttgaagggcggttttgaytggaacttggtattcaagtgggattacatgacrcctgagcagagaaggtcccggcaggggaacccagtcgcccctataaaaacccccatgattgctggtgggctgtttgtgatggataagttctattttgaagaactggggaagtacgacatgatgatggatgtgtggggaggagagaacctagagatctcgttccgcgtgtggcagtgtggtggcagcctggagatcatcccgtgcagccgtgtgggacacgtgttccggaagcagcacccctacacgttcccgggtggcagtggcactgtctttgcccgaaacacccgccgggcagcagaggtctggatggatgaatacaaaaatttctattatgcagcagtgccttctgctagaaacgttccttatggaaatattcagagcagattggagcttaggaagaaactcagctgcaagcctttcaaatggtaccttgaaaatgtctatccagagttaagggttccagaccatcaggatatagcttttggggccttgcagcagggaactaactgcctcgacactttgggacactttgctgatggtgtggttggagtttatgaatgtcacaatgctgggggaaaccaggaatgggccttgacgaaggagaagtcrgtgaagcacatggatttgtgccttactgtggtggaccgggcaccgggctctcttataaagctgcagggctgccgagaaaatgacagcagacagaaatgggaacagatcgagggcaactccaagctgaggcacgtgggcagcaacctgtgcctggacagtcgcacggccaagagcgggggcctaagcgtggagrtgtgtggcccggccctttcgcagcagtggaagttcacgctcaacctgcagcagtaggagggtcygggaggccctgccgtcctgtctcctgcaccaytgggtggagtctggtgatcacattattgattatgtttcttaaactttcygcgaaactaatatacctcagtattccatcatggtctgaaagtcaaacttcggcaaggcacggacgactgtgcagacacagcagcggcaagaagcgagaactgccctccccctcctctcggtgcagcccagccgggcccccttccccaggccggagcgcccctcttccttccagctttcacttctgccggctccgcaactgagtgacacccagcgacaaccgactggggagtggtagaagcaactgaacggatgcgtgcgagctgaggacagggcgggaggagggggcacacatgccccakgggagcgaggagaactcttgaaatctccattttcaatcccttcgaaatcacgtatggtttccacaaagccgagtcgtgtcacgtggcaggtttacgtcaatagtccctctctctgctcctccattcgcaagtgtcttcctgggccagactcccctccacctcatgtacttgctatattgaggatgaagttttctatggtgggacactaaatataaagctatatagagaaagaatgtacggtcagttccctatggtttctgtagatcatcgtcatcttgtatattccccacaaagccgttcgcagcttccgggagaaggggccagagcccgktggggccagtttctcacagagggaggaggtggcctttgtcccctggagcccgatcagccagttggtgctactgctgtggccagctggggggcttcctccagaccaccggcctcrgccccggcatccctgttgggcgtcagcctgagagtccctactgtgcgtcagaatccaccttgcgtgctgtgcgtatctgtgaacctggagcggttacttattttgacagatatcggcgacagggcagaccaatgatgccaggcagctgtcacacgctagtattggcttcattgtgatctgagccctgcmygctgggccttcagaattaatggccagcagtgtcagggatgagcccgtcagccagggcacaggcctggctcacagtcctkcacacctgctggcctggggagctccagccaggcagcgagtcctgccccgcccgcagctccctcccacaccccgcctggccaagatgactgcttcagggggctttggggaaagaattaggaagggtcagaaccaaacaatacctgctcatttacactgaggattcagggcgggagacaggagccttggggtcctgttaaaccacagacagttatgaactgaaagtcataacggggagaggtgcctggcttctacctgggtgctcaggaatgttcctcgtcacccctgccactctgtggtcggtgccctgcttcctcctccactcctggccgccttctccagcgccrcacacacagatgctcrgtctcagagaggctggcacggcctggcagtctgagaaaagcgtcagttaggcacacctgcaggcccctcggtgggacagcggcggccttggagttaggagccaccctgggaggttgtgccggtgccatgctcctccctgtgtcttgtatgaaaggggtcctttgcggtgagctatgtttacatgacacagtgtgccaaagtgacttactgcggttgcgttagtttytartcatcaggactatctcaccctcccactcctgtttttaaaactcagaattctttcctaagagcccttcgagcaaagcgtgccgaagttagttgtcttctctgtgstggtcctttcttatgtcctcataaaagctcagatgatggtatctgtgagtatgttttgcaaattcaaaatatagtttggtaatttttttttccagttgatttttaaaaagaactgctgtacagagcttgtactttgtccattttatagatggaaaccatccttgaaaattgtttaacttaaataaagagaagatactttctagataccgctctttgctggccagagtctgtcctggtgtgtgagggctgggtggggtgggtgtggggactgggattggggtcagccttctgcagctcctgctcagtggctgtttcttatcaccttytgcagatgy

SEQ ID NO: 232 - DNA, 3973 bp, Homo sapiens
gagtgtacacgaacgaaaagcactggctggagatcatctatgtggaatgtggacagggcaaggtgcccgtagcccctatggctgacagagaggactggaatgaaattgaccccattaaaaagaaagaccttcatcacagcaatggagaagagaaagcacaaagcatggagaccctccctccagggaaagtacggtggccagactttaaccaggaagcttatgttggagggacgatggtccgctccgggcaggacccttacgcccgcaacaagttcaaccaggtggagagtgataagcttcgaatggacagagccatccctgacacccggcatgaccagtgtcagcggaagcagtggygggtggatctgccggccaccagcgtggtgatcacgtttcacaatgaagccaggtcggccctactcaggaccgtggtcagcgtgcttaagaaaagcccrccccatctcataaaagaaatcatcttggtggatgactacagcaatgatcctgaggacggggctctcttggggaaaattgagaaagtgcgagttcttagaaatgatcgacgagaaggcctcatgcgctcacgggttcggggggccgatgctgcccaagccaaggtcctgaccttcctggacagtcactgcgagtgtaatgagcactggctggagcccctcctggaaagggtggcggaggacaggactcgggttgtgtcacccatcatcgatgtcattaatatggacaactttcagtatgtgggggcatctgctgacttgaagggcggttttgaytggaacttggtattcaagtgggattacatgacrcctgagcagagaaggtcccggcaggggaacccagtcgcccctataaaaacccccatgattgctggtgggctgtttgtgatggataagttctattttgaagaactggggaagtacgacatgatgatggatgtgtggggaggagagaacctagagatctcgttccgcgtgtggcagtgtggtggcagcctggagatcatcccgtgcagccgtgtgggacacgtgttccggaagcagcacccctacacgttcccgggtggcagtggcactgtctttgcccgaaacacccgccgggcagcagaggtctggatggatgaatacaaaaatttctattatgcagcagtgccttctgctagaaacgttccttatggaaatattcagagcagattggagcttaggaagaaactcagctgcaagcctttcaaatggtaccttgaaaatgtctatccagagttaagggttccagaccatcaggatatagcttttggggccttgcagcagggaactaactgcctcgacactttgggacactttgctgatggtgtggttggagtttatgaatgtcacaatgctgggggaaaccaggaatgggccttgacgaaggagaagtcrgtgaagcacatggatttgtgccttactgtggtggaccgggcaccgggctctcttataaagctgcagggctgccgagaaaatgacagcagacagaaatgggaacagatcgagggcaactccaagctgaggcacgtgggcagcaacctgtgcctggacagctccgcaactgagtgacacccagcgacaaccgactggggagtggtagaagcaactgaacggatgcgtgcgagctgaggacagggcgggaggagggggcacacatgccccakgggagcgaggagaactcttgaaatctccattttcaatcccttcgaaatcacgtatggtttccacaaagccgagtcgtgtcacgtggcaggtttacgtcaatagtccctctctctgctcctccattcgcaagtgtcttcctgggccagactcccctccacctcatgtacttgctatattgaggatgaagttttctatggtgggacactaaatataaagctatatagagaaagaatgtacggtcagttccctatggtttctgtagatcatcgtcatcttgtatattccccacaaagccgttcgcagcttccgggagaaggggccagagcccgktggggccagtttctcacagagggaggaggtggcctttgtcccctggagcccgatcagccagttggtgctactgctgtggccagctggggggcttcctccagaccaccggcctcrgccccggcatccctgttgggcgtcagcctgagagtccctactgtgcgtcagaatccaccttgcgtgctgtgcgtatctgtgaacctggagcggttacttattttgacagatatcactttgggtctttttacattaaatttcttttctctaaggaatataagacataccccatagctctgygtgagccagcaataccgctgccccctggcgacagggcagaccaatgatgccaggcagctgtcacacgctagtattggcttcattgtgatctgagccctgcmygctgggccttcagaattaatggccagcagtgtcagggatgagcccgtcagccagggcacaggcctggctcacagtcctkcacacctgctggcctggggagctccagccaggcagcgagtcctgccccgcccgcagctccctcccacaccccgcctggccaagatgactgcttcagggggctttggggaaagaattaggaagggtcagaaccaaacaatacctgctcatttacactgaggattcagggcgggagacaggagccttggggtcctgttaaaccacagacagttatgaactgaaagtcataacggggagaggtgcctggcttctacctgggtgctcaggaatgttcctcgtcacccctgccactctgtggtcggtgccctgcttcctcctccactcctggccgccttctccagcgccrcacacacagatgctcrgtctcagagaggctggcacggcctggcagtctgagaaaagcgtcagttaggcacacctgcaggcccctcggtgggacagcggcggccttggagttaggagccaccctgggaggttgtgccggtgccatgctcctccctgtgtcttgtatgaaaggggccactgtgtgtcttcctccccggcgggagcccyacrtgtgtgcactgtaggacagcggccccgaggtggaagcctggctggagggctgccctataggtcttctcttcccgcctcccctgccatgcaaccagatgtgttstgagtgggcagcgtgcccccacgctggagtaactccgcacgcttctgtctttcacggtgggcgctcggggggagcctgaggaaaacccccttaggtacctgtgcgaggctgtggagtgcaggccagagcagggtgtgcgtagcccccagcacccaggttcttctgtcagaccctgtgacctgcgagctgctactactgtaaggagggaaatggatgaatctggctcgttttaaaatcrcgttttctgacgaatcctttgccccttcacctttrccccgcccgcacccctaggccctctcagccttcctatcatcycacgtgtctacccagacccttgygcggcccatgcccygggggcggcgtcctgtccctgagctgggaggcggctttggatggtccgggcgtcaagagcaggggtgggccggggaggggtcctttgcggtgagctatgtttacatgacacagtgtgccaaagtgacttactgcggttgcgttagtttytartcatcaggactatctcaccctcccactcctgtttttaaaactcagaattctttcctaagagcccttcgagcaaagcgtgccgaagttagttgtcttctctgtgstggtcctttcttatgtcctcataaaagctcagatgatggtatctgtgagtatgttttgcaaattcaaaatatagtttggtaatttttttttccagttgatttttaaaaagaactgctgtacagagcttgtactttgtccattttatagatggaaaccatccttgaaaattgtttaacttaaataaagagaagatactttctag

SEQ ID NO: 233 - DNA, 4474 bp, Homo sapiens
gagtgtacacgaacgaaaagcactggctggagatcatctatgtggaatgtggacagggcaaggtgcccgtagcccctatggctgacagagaggactggaatgaaattgaccccattaaaaagaaagaccttcatcacagcaatggagaagagaaagcacaaagcatggagaccctccctccagggaaagtacggtggccagactttaaccaggaagcttatgttggagggacgatggtccgctccgggcaggacccttacgcccgcaacaagttcaaccaggtggagagtgataagcttcgaatggacagagccatccctgacacccggcatgaccagtgtcagcggaagcagtggygggtggatctgccggccaccagcgtggtgatcacgtttcacaatgaagccaggtcggccctactcaggaccgtggtcagcgtgcttaagaaaagcccrccccatctcataaaagaaatcatcttggtggatgactacagcaatgatcctgaggacggggctctcttggggaaaattgagaaagtgcgagttcttagaaatgatcgacgagaaggcctcatgcgctcacgggttcggggggccgatgctgcccaagccaaggtcctgaccttcctggacagtcactgcgagtgtaatgagcactggctggagcccctcctggaaagggtggcggaggacaggactcgggttgtgtcacccatcatcgatgtcattaatatggacaactttcagtatgtgggggcatctgctgacttgaagggcggttttgaytggaacttggtattcaagtgggattacatgacrcctgagcagagaaggtcccggcaggggaacccagtcgcccctataaaaacccccatgattgctggtgggctgtttgtgatggataagttctattttgaagaactggggaagtacgacatgatgatggatgtgtggggaggagagaacctagagatctcgttccgcgtgtggcagtgtggtggcagcctggagatcatcccgtgcagccgtgtgggacacgtgttccggaagcagcacccctacacgttcccgggtggcagtggcactgtctttgcccgaaacacccgccgggcagcagaggtctggatggatgaatacaaaaatttctattatgcagcagtgccttctgctagaaacgttccttatggaaatattcagagcagattggagcttaggaagaaactcagctgcaagcctttcaaatggtaccttgaaaatgtctatccagagttaagggttccagaccatcaggatatagcttttggggccttgcagcagggaactaactgcctcgacactttgggacactttgctgatggtgtggttggagtttatgaatgtcacaatgctgggggaaaccaggaatgggccttgacgaaggagaagtcrgtgaagcacatggatttgtgccttactgtggtggaccgggcaccgggctctcttataaagctgcagggctgccgagaaaatgacagcagacagaaatgggaacagatcgagggcaactccaagctgaggcacgtgggcagcaacctgtgcctggacagtcgcacggccaagagcgggggcctaagcgtggagrtgtgtggcccggccctttcgcagcagtggaagttcacgctcaacctgcagcagtaggagggtcygggaggccctgccgtcctgtctcctgcaccaytgggtggagtctggtgatcacattattgattatgtttcttaaactttcygcgaaactaatatacctcagtattccatcatggtctgaaagtcaaacttcggcaaggcacggacgactgtgcagacacagcagcggcaagaagcgagaactgccctccccctcctctcggtgcagcccagccgggcccccttccccaggccggagcgcccctcttccttccagctttcacttctgccggctccgcaactgagtgacacccagcgacaaccgactggggagtggtagaagcaactgaacggatgcgtgcgagctgaggacagggcgggaggagggggcacacatgccccakgggagcgaggagaactcttgaaatctccattttcaatcccttcgaaatcacgtatggtttccacaaagccgagtcgtgtcacgtggcaggtttacgtcaatagtccctctctctgctcctccattcgcaagtgtcttcctgggccagactcccctccacctcatgtacttgctatattgaggatgaagttttctatggtgggacactaaatataaagctatatagagaaagaatgtacggtcagttccctatggtttctgtagatcatcgtcatcttgtatattccccacaaagccgttcgcagcttccgggagaaggggccagagcccgktggggccagtttctcacagagggaggaggtggcctttgtcccctggagcccgatcagccagttggtgctactgctgtggccagctggggggcttcctccagaccaccggcctcrgccccggcatccctgttgggcgtcagcctgagagtccctactgtgcgtcagaatccaccttgcgtgctgtgcgtatctgtgaacctggagcggttacttattttgacagatatcactttgggtctttttacattaaatttcttttctctaaggaatataagacataccccatagctctgygtgagccagcaataccgctgccccctggcgacagggcagaccaatgatgccaggcagctgtcacacgctagtattggcttcattgtgatctgagccctgcmygctgggccttcagaattaatggccagcagtgtcagggatgagcccgtcagccagggcacaggcctggctcacagtcctkcacacctgctggcctggggagctccagccaggcagcgagtcctgccccgcccgcagctccctcccacaccccgcctggccaagatgactgcttcagggggctttggggaaagaattaggaagggtcagaaccaaacaatacctgctcatttacactgaggattcagggcgggagacaggagccttggggtcctgttaaaccacagacagttatgaactgaaagtcataacggggagaggtgcctggcttctacctgggtgctcaggaatgttcctcgtcacccctgccactctgtggtcggtgccctgcttcctcctccactcctggccgccttctccagcgccrcacacacagatgctcrgtctcagagaggctggcacggcctggcagtctgagaaaagcgtcagttaggcacacctgcaggcccctcggtgggacagcggcggccttggagttaggagccaccctgggaggttgtgccggtgccatgctcctccctgtgtcttgtatgaaaggggccactgtgtgtcttcctccccggcgggagcccyacrtgtgtgcactgtaggacagcggccccgaggtggaagcctggctggagggctgccctataggtcttctcttcccgcctcccctgccatgcaaccagatgtgttstgagtgggcagcgtgcccccacgctggagtaactccgcacgcttctgtctttcacggtgggcgctcggggggagcctgaggaaaacccccttaggtacctgtgcgaggctgtggagtgcaggccagagcagggtgtgcgtagcccccagcacccaggttcttctgtcagaccctgtgacctgcgagctgctactactgtaaggagggaaatggatgaatctggctcgttttaaaatcrcgttttctgacgaatcctttgccccttcacctttrccccgcccgcacccctaggccctctcagccttcctatcatcycacgtgtctacccagacccttgygcggcccatgcccygggggcggcgtcctgtccctgagctgggaggcggctttggatggtccgggcgtcaagagcaggggtgggccggggaggggtcctttgcggtgagctatgtttacatgacacagtgtgccaaagtgacttactgcggttgcgttagtttytartcatcaggactatctcaccctcccactcctgtttttaaaactcagaattctttcctaagagcccttcgagcaaagcgtgccgaagttagttgtcttctctgtgstggtcctttcttatgtcctcataaaagctcagatgatggtatctgtgagtatgttttgcaaattcaaaatatagtttggtaatttttttttccagttgatttttaaaaagaactgctgtacagagcttgtactttgtccattttatagatggaaaccatccttgaaaattgtttaacttaaataaagagaagatactttctagataccgctctttgctggccagagtctgtcctggtgtgtgagggctgggtggggtgggtgtggggactgggattggggtcagccttctgcagctcctgctcagtggctgtttcttatcaccttytgcagatgy

SEQ ID NO: 234 - DNA, 4588 bp, Homo sapiens
ggcccccaccgcgcccgcggccggcccaggcagcactcgcgagcagcggcggccccgccggcggccgagttgggagaatgcggcggcgctcgcggatgctgctctgcttcgccttcctgtgggtgctgggcatcgcctactacatgtactcggggggcggctctgcgctggccgggggcgcgggcggcggcgccggcaggaaggaggactggaatgaaattgaccccattaaaaagaaagaccttcatcacagcaatggagaagagaaagcacaaagcatggagaccctccctccagggaaagtacggtggccagactttaaccaggaagcttatgttggagggacgatggtccgctccgggcaggacccttacgcccgcaacaagttcaaccaggtggagagtgataagcttcgaatggacagagccatccctgacacccggcatgaccagtgtcagcggaagcagtggygggtggatctgccggccaccagcgtggtgatcacgtttcacaatgaagccaggtcggccctactcaggaccgtggtcagcgtgcttaagaaaagcccrccccatctcataaaagaaatcatcttggtggatgactacagcaatgatcctgaggacggggctctcttggggaaaattgagaaagtgcgagttcttagaaatgatcgacgagaaggcctcatgcgctcacgggttcggggggccgatgctgcccaagccaaggtcctgaccttcctggacagtcactgcgagtgtaatgagcactggctggagcccctcctggaaagggtggcggaggacaggactcgggttgtgtcacccatcatcgatgtcattaatatggacaactttcagtatgtgggggcatctgctgacttgaagggcggttttgaytggaacttggtattcaagtgggattacatgacrcctgagcagagaaggtcccggcaggggaacccagtcgcccctataaaaacccccatgattgctggtgggctgtttgtgatggataagttctattttgaagaactggggaagtacgacatgatgatggatgtgtggggaggagagaacctagagatctcgttccgcgtgtggcagtgtggtggcagcctggagatcatcccgtgcagccgtgtgggacacgtgttccggaagcagcacccctacacgttcccgggtggcagtggcactgtctttgcccgaaacacccgccgggcagcagaggtctggatggatgaatacaaaaatttctattatgcagcagtgccttctgctagaaacgttccttatggaaatattcagagcagattggagcttaggaagaaactcagctgcaagcctttcaaatggtaccttgaaaatgtctatccagagttaagggttccagaccatcaggatatagcttttggggccttgcagcagggaactaactgcctcgacactttgggacactttgctgatggtgtggttggagtttatgaatgtcacaatgctgggggaaaccaggaatgggccttgacgaaggagaagtcrgtgaagcacatggatttgtgccttactgtggtggaccgggcaccgggctctcttataaagctgcagggctgccgagaaaatgacagcagacagaaatgggaacagatcgagggcaactccaagctgaggcacgtgggcagcaacctgtgcctggacagtcgcacggccaagagcgggggcctaagcgtggagrtgtgtggcccggccctttcgcagcagtggaagttcacgctcaacctgcagcagtaggagggtcygggaggccctgccgtcctgtctcctgcaccaytgggtggagtctggtgatcacattattgattatgtttcttaaactttcygcgaaactaatatacctcagtattccatcatggtctgaaagtcaaacttcggcaaggcacggacgactgtgcagacacagcagcggcaagaagcgagaactgccctccccctcctctcggtgcagcccagccgggcccccttccccaggccggagcgcccctcttccttccagctttcacttctgccggctccgcaactgagtgacacccagcgacaaccgactggggagtggtagaagcaactgaacggatgcgtgcgagctgaggacagggcgggaggagggggcacacatgccccakgggagcgaggagaactcttgaaatctccattttcaatcccttcgaaatcacgtatggtttccacaaagccgagtcgtgtcacgtggcaggtttacgtcaatagtccctctctctgctcctccattcgcaagtgtcttcctgggccagactcccctccacctcatgtacttgctatattgaggatgaagttttctatggtgggacactaaatataaagctatatagagaaagaatgtacggtcagttccctatggtttctgtagatcatcgtcatcttgtatattccccacaaagccgttcgcagcttccgggagaaggggccagagcccgktggggccagtttctcacagagggaggaggtggcctttgtcccctggagcccgatcagccagttggtgctactgctgtggccagctggggggcttcctccagaccaccggcctcrgccccggcatccctgttgggcgtcagcctgagagtccctactgtgcgtcagaatccaccttgcgtgctgtgcgtatctgtgaacctggagcggttacttattttgacagatatcactttgggtctttttacattaaatttcttttctctaaggaatataagacataccccatagctctgygtgagccagcaataccgctgccccctggcgacagggcagaccaatgatgccaggcagctgtcacacgctagtattggcttcattgtgatctgagccctgcmygctgggccttcagaattaatggccagcagtgtcagggatgagcccgtcagccagggcacaggcctggctcacagtcctkcacacctgctggcctggggagctccagccaggcagcgagtcctgccccgcccgcagctccctcccacaccccgcctggccaagatgactgcttcagggggctttggggaaagaattaggaagggtcagaaccaaacaatacctgctcatttacactgaggattcagggcgggagacaggagccttggggtcctgttaaaccacagacagttatgaactgaaagtcataacggggagaggtgcctggcttctacctgggtgctcaggaatgttcctcgtcacccctgccactctgtggtcggtgccctgcttcctcctccactcctggccgccttctccagcgccrcacacacagatgctcrgtctcagagaggctggcacggcctggcagtctgagaaaagcgtcagttaggcacacctgcaggcccctcggtgggacagcggcggccttggagttaggagccaccctgggaggttgtgccggtgccatgctcctccctgtgtcttgtatgaaaggggccactgtgtgtcttcctccccggcgggagcccyacrtgtgtgcactgtaggacagcggccccgaggtggaagcctggctggagggctgccctataggtcttctcttcccgcctcccctgccatgcaaccagatgtgttstgagtgggcagcgtgcccccacgctggagtaactccgcacgcttctgtctttcacggtgggcgctcggggggagcctgaggaaaacccccttaggtacctgtgcgaggctgtggagtgcaggccagagcagggtgtgcgtagcccccagcacccaggttcttctgtcagaccctgtgacctgcgagctgctactactgtaaggagggaaatggatgaatctggctcgttttaaaatcrcgttttctgacgaatcctttgccccttcacctttrccccgcccgcacccctaggccctctcagccttcctatcatcycacgtgtctacccagacccttgygcggcccatgcccygggggcggcgtcctgtccctgagctgggaggcggctttggatggtccgggcgtcaagagcaggggtgggccggggaggggtcctttgcggtgagctatgtttacatgacacagtgtgccaaagtgacttactgcggttgcgttagtttytartcatcaggactatctcaccctcccactcctgtttttaaaactcagaattctttcctaagagcccttcgagcaaagcgtgccgaagttagttgtcttctctgtgstggtcctttcttatgtcctcataaaagctcagatgatggtatctgtgagtatgttttgcaaattcaaaatatagtttggtaatttttttttccagttgatttttaaaaagaactgctgtacagagcttgtactttgtccattttatagatggaaaccatccttgaaaattgtttaacttaaataaagagaagatactttctagataccgctctttgctggccagagtctgtcctggtgtgtgagggctgggtggggtgggtgtggggactgggattggggtcagccttctgcagctcctgctcagtggctgtttcttatcaccttytgcagatgy

SEQ ID NO: 235 - DNA, 2327 bp, Homo sapiens
attggcctttgtcccaccgagtacactcagcactgtactttaaaccggataaactgggctgtctggcaggtactaaaaacagctaaattctcctgtgagtgttctgtatgttaacacttttattccttgttttgttttaggcgataaactacattcagttgagtctgcaagactgggaggaactggggtgataagaaatctattcactgtcaaggtttattgaagtcaaaatgtccaaaaaaatcagtggcggttctgtggtagagatgcaaggagatgaaatgacacgaatcatttgggaattgattaaagagaaactcatttttccctacgtggaattggatctacatagctatgatttaggcatagagaatcgtgatgccaccaacgaccaagtcaccaaggatgctgcagaagctataaagaagcataatgttggcgtcaaatgtgccactatcactcctgatgagaagagggttgaggagttcaagttgaaacaaatgtggaaatcaccaaatggcaccatacgaaatattctgggtggcacggtcttcagagaagccattatctgcaaaaatatcccccggcttgtgagtggatgggtaaaacctatcatcataggtcgtcatgcttatggggatcaatacagagcaactgattttgttgttcctgggcctggaaaagtagagataacctacacaccaagtgacggaacccaaaaggtgacatacctggtacataactttgaagaaggtggtggtrttgccatggggatgtrtaatcaagataagtcaattgaagattttgcacacagttccttccaaatggctctgtctaagggttggcctttgtatctgagcaccaaaaacactattctgaagaaatatgatgggcgttttaaagacatctttcaggagatatatgacaagcagtacaagtcccagtttgaagctcaaaagatctggtatgagcataggctcatcgacgacatggtggcccaagctatgaaatcagagggaggcttcatctgggcctgtaaaaactatgatggtgacgtgcagtcggactctgtggcccaagggtatggctctctcggcatgatgaccagcgtgctggtttgtccagatggcaagacagtagaagcagaggctgcccacgggactgtaacccgtcactaccgcatgtaccagaaaggacaggagacgtccaccaatcccattgcttccatttttgcctggaccagagggttagcccacagagcaaagcttgataacaataaagagcttgccttctttgcaaatgctttggaagaagtctctattgagacaattgaggctggcttcatgaccaaggacttggctgcttgcattaaaggtttacccaatgtgcaacgttctgactacttgaatacatttgagttcatggataaacttggagaaaacttgaagatcaaactagctcaggccaaactttamgttcatacctgagytaagaaggataattgtcttttggtaactaggtctacaggtttacatttttctgtgttacactcaaggataaaggcaaaatcaattttgtaatttgtttaraagccagagtttatcttttctataagtttacagcctttttcttatatatacagttattgccacctttgtgaacatggcaagggacttttttacaatttttattttattttctagtaccagcctaggaattcggttagtactcatttgtattcactgtcactttttctcatgttctaattataaatgaccaaaatcaagattgctcaaaagggtaaatgatarccacagtattgctccctaaaatatgcataaagtagaaattcactgccttcccctcctgtccatgaccttgggcacagggaagttctggtgtcatagatatcccgttttgtgaggtagagctgtgcattaaacttgcacatgactggaacgaagtatgagtgcaactcaaatgtgttgaagatactgcagtcatttttgtaaagaccttgctgaatgtttccaatagactaaatactgtttaggccgcaggagagtttggaatccggaataaatactacctggaggtttgtcctctccatttttctctttctcctcctggcctggcctgaatattatrctactctaaatagcatatttcatccaagtgcaayaatgtaagctgaatcttttttggacttctgctggcctgttttatttcttttatataaatgtgatttctcagaaattgatattaaacactatcttatcttctcctgaactgttgattttaattaaaattaagtgctaattaccatt

SEQ ID NO: 236 - DNA, 2293 bp, Homo sapiens
gaagccagggggactgcgcgcgtgagcgtcacgcatgcggggtcaacggatgggtgcttggtgctctgggcactgcaggggtgctggctggactgcggttaccgcagcgcggaaccccctaggcgaccccgcgctggccgggagcactctttcttcagmcaaagagtctacttcagaagcggaggcactgggagtccggtttgggattgccaggctgtggttgtgagtctgagcttgtgagcggctgtggcgccccaactcttcgccagcatatcatcccggcaggcgataaactacattcagttgagtctgcaagactgggaggaactggggtgataagaaatctattcactgtcaaggtttattgaagtcaaaatgtccaaaaaaatcagtggcggttctgtggtagagatgcaaggagatgaaatgacacgaatcatttgggaattgattaaagagaaactcatttttccctacgtggaattggatctacatagctatgatttaggcatagagaatcgtgatgccaccaacgaccaagtcaccaaggatgctgcagaagctataaagaagcataatgttggcgtcaaatgtgccactatcactcctgatgagaagagggttgaggagttcaagttgaaacaaatgtggaaatcaccaaatggcaccatacgaaatattctgggtggcacggtcttcagagaagccattatctgcaaaaatatcccccggcttgtgagtggatgggtaaaacctatcatcataggtcgtcatgcttatggggatcaatacagagcaactgattttgttgttcctgggcctggaaaagtagagataacctacacaccaagtgacggaacccaaaaggtgacatacctggtacataactttgaagaaggtggtggtrttgccatggggatgtrtaatcaagataagtcaattgaagattttgcacacagttccttccaaatggctctgtctaagggttggcctttgtatctgagcaccaaaaacactattctgaagaaatatgatgggcgttttaaagacatctttcaggagatatatgaccagcgtgctggtttgtccagatggcaagacagtagaagcagaggctgcccacgggactgtaacccgtcactaccgcatgtaccagaaaggacaggagacgtccaccaatcccattgcttccatttttgcctggaccagagggttagcccacagagcaaagcttgataacaataaagagcttgccttctttgcaaatgctttggaagaagtctctattgagacaattgaggctggcttcatgaccaaggacttggctgcttgcattaaaggtttacccaatgtgcaacgttctgactacttgaatacatttgagttcatggataaacttggagaaaacttgaagatcaaactagctcaggccaaactttamgttcatacctgagytaagaaggataattgtcttttggtaactaggtctacaggtttacatttttctgtgttacactcaaggataaaggcaaaatcaattttgtaatttgtttaraagccagagtttatcttttctataagtttacagcctttttcttatatatacagttattgccacctttgtgaacatggcaagggacttttttacaatttttattttattttctagtaccagcctaggaattcggttagtactcatttgtattcactgtcactttttctcatgttctaattataaatgaccaaaatcaagattgctcaaaagggtaaatgatarccacagtattgctccctaaaatatgcataaagtagaaattcactgccttcccctcctgtccatgaccttgggcacagggaagttctggtgtcatagatatcccgttttgtgaggtagagctgtgcattaaacttgcacatgactggaacgaagtatgagtgcaactcaaatgtgttgaagatactgcagtcatttttgtaaagaccttgctgaatgtttccaatagactaaatactgtttaggccgcaggagagtttggaatccggaataaatactacctggaggtttgtcctctccatttttctctttctcctcctggcctggcctgaatattatrctactctaaatagcatatttcatccaagtgcaayaatgtaagctgaatcttttttggacttctgctggcctgttttatttcttttatataaatgtgatttctcagaaattgatattaaacactatcttatcttctcctgaactgttgattttaattaaaattaagtgctaattaccatt

SEQ ID NO: 237 - DNA, 2362 bp, Homo sapiens
aaagccgggaagaggaaaagctcggacctaccctgtggtcccgggtttctgcagagtctacttcagaagcggaggcactgggagtccggtttgggattgccaggctgtggttgtgagtctgagcttgtgagcggctgtggcgccccaactcttcgccagcatatcatcccggcaggcgataaactacattcagttgagtctgcaagactgggaggaactggggtgataagaaatctattcactgtcaaggtttattgaagtcaaaatgtccaaaaaaatcagtggcggttctgtggtagagatgcaaggagatgaaatgacacgaatcatttgggaattgattaaagagaaactcatttttccctacgtggaattggatctacatagctatgatttaggcatagagaatcgtgatgccaccaacgaccaagtcaccaaggatgctgcagaagctataaagaagcataatgttggcgtcaaatgtgccactatcactcctgatgagaagagggttgaggagttcaagttgaaacaaatgtggaaatcaccaaatggcaccatacgaaatattctgggtggcacggtcttcagagaagccattatctgcaaaaatatcccccggcttgtgagtggatgggtaaaacctatcatcataggtcgtcatgcttatggggatcaatacagagcaactgattttgttgttcctgggcctggaaaagtagagataacctacacaccaagtgacggaacccaaaaggtgacatacctggtacataactttgaagaaggtggtggtrttgccatggggatgtrtaatcaagataagtcaattgaagattttgcacacagttccttccaaatggctctgtctaagggttggcctttgtatctgagcaccaaaaacactattctgaagaaatatgatgggcgttttaaagacatctttcaggagatatatgacaagcagtacaagtcccagtttgaagctcaaaagatctggtatgagcataggctcatcgacgacatggtggcccaagctatgaaatcagagggaggcttcatctgggcctgtaaaaactatgatggtgacgtgcagtcggactctgtggcccaagggtatggctctctcggcatgatgaccagcgtgctggtttgtccagatggcaagacagtagaagcagaggctgcccacgggactgtaacccgtcactaccgcatgtaccagaaaggacaggagacgtccaccaatcccattgcttccatttttgcctggaccagagggttagcccacagagcaaagcttgataacaataaagagcttgccttctttgcaaatgctttggaagaagtctctattgagacaattgaggctggcttcatgaccaaggacttggctgcttgcattaaaggtttacccaatgtgcaacgttctgactacttgaatacatttgagttcatggataaacttggagaaaacttgaagatcaaactagctcaggccaaactttamgttcatacctgagytaagaaggataattgtcttttggtaactaggtctacaggtttacatttttctgtgttacactcaaggataaaggcaaaatcaattttgtaatttgtttaraagccagagtttatcttttctataagtttacagcctttttcttatatatacagttattgccacctttgtgaacatggcaagggacttttttacaatttttattttattttctagtaccagcctaggaattcggttagtactcatttgtattcactgtcactttttctcatgttctaattataaatgaccaaaatcaagattgctcaaaagggtaaatgatarccacagtattgctccctaaaatatgcataaagtagaaattcactgccttcccctcctgtccatgaccttgggcacagggaagttctggtgtcatagatatcccgttttgtgaggtagagctgtgcattaaacttgcacatgactggaacgaagtatgagtgcaactcaaatgtgttgaagatactgcagtcatttttgtaaagaccttgctgaatgtttccaatagactaaatactgtttaggccgcaggagagtttggaatccggaataaatactacctggaggtttgtcctctccatttttctctttctcctcctggcctggcctgaatattatrctactctaaatagcatatttcatccaagtgcaayaatgtaagctgaatcttttttggacttctgctggcctgttttatttcttttatataaatgtgatttctcagaaattgatattaaacactatcttatcttctcctgaactgttgattttaattaaaattaagtgctaattaccatt

SEQ ID NO: 238 - DNA, 1982 bp, Homo sapiens
gaagccagggggactgcgcgcgtgagcgtcacgcatgcggggtcaacggatgggtgcttggtgctctgggcactgcaggggtgctggctggactgcggttaccgcagcgcggaaccccctaggcgaccccgcgctggccgggagcactctttcttcagmcaaagagtctacttcagaagcggaggcactgggagtccggtttgggattgccaggctgtggttgtgagtctgagcttgtgagcggctgtggcgccccaactcttcgccagcatatcatcccggcaggcgataaactacattcagttgagtctgcaagactgggaggaactggggtgataagaaatctattcactgtcaaggtttattgaagtcaaaatgtccaaaaaaatcagtggcggttctgtggtagagatgcaaggagatgaaatgacacgaatcatttgggaattgattaaagagaaactcatttttccctacgtggaattggatctacatagctatgatttaggcatagagaatcgtgatgccaccaacgaccaagtcaccaaggatgctgcagaagctataaagaagcataatgttggcgtcaaatgtgccactatcactcctgatgagaagagggttgaggagttcaagttgaaacaaatgtggaaatcaccaaatggcaccatacgaaatattctgggtggcacggtcttcagagaagccattatctgcaaaaatatcccccggcttgtgagtggatgggtaaaacctatcatcataggtcgtcatgcttatggggatcaatacagagcaactgattttgttgttcctgggcctggaaaagtagagataacctacacaccaagtgacggaacccaaaaggtgacatacctggtacataactttgaagaaggtggtggtrttgccatggggatgtrtaatcaagataagtcaattgaagattttgcacacagttccttccaaatggctctgtctaagggttggcctttgtatctgagcaccaaaaacactattctgaagaaatatgatgggcgttttaaagacatctttcaggagatatatgacaagcagtacaagtcccagtttgaagctcaaaagatctggtatgagcataggctcatcgacgacatggtggcccaagctatgaaatcagagggaggcttcatctgggcctgtaaaaactatgatggtgacgtgcagtcggactctgtggcccaagggtatggctctctcggcatgatgaccagcgtgctggtttgtccagatggcaagacagtagaagcagaggctgcccacgggactgtaacccgtcactaccgcatgtaccagaaaggacaggagacgtccaccaatcccattgcttccatttttgcctggaccagagggttagcccacagagcaaagcttgataacaataaagagcttgccttctttgcaaatgctttggaagaagtctctattgagacaattgaggctggcttcatgaccaaggacttggctgcttgcattaaaggtttacccaatgtgcaacgttctgactacttgaatacatttgagttcatggataaacttggagaaaacttgaagatcaaactagctcaggccaaactttamgttcatacctgagytaagaaggataattgtcttttggtaactaggtctacaggtttacatttttctgtgttacactcaaggataaaggcaaaatcaattttgtaatttgtttaraagccagagtttatcttttctataagtttacagcctttttcttatatatacagttattgccacctttgtgaacatggcaagggacttttttacaatttttattttattttctagtaccagcctaggaattcggttagtactcatttgtattcactgtcacttttttarccacagtattgctccctaaaatatgcataaagtagaaattcactgccttcccctcctgtccatgaccttgggcacaggga

SEQ ID NO: 239 - DNA, 1095 bp, Homo sapiens
acctatcttatatcaatgcaatatttacaattagcaagcaaaaaatttatctagaatgaaaagataaatatggtagcaaaggacttaagttagtactttaactggtgtgccacaagtaaatgattacattctgagaagcttgctcatttttaactacttgtacatcagtagaaaataaggattaagtcaaaaagaggataggaagtaatactagaatacctgatattataaattattaagagttctgactattagaaggtattactgccatgtactaccatttaaagtgaagagattttggaagaaaaacaaaaactataatcaacagaaaaactctgaaagaaattttaagatgaacaaccttcaagaagttaaaggcggctgcagtgsaccgtgggcagccagggtcggtgaagaatcccaaratggctgggcgaaaacttgctctaaaaaccactgactgagtagcttttgcagagatcataccccagaaccaaaaggccattgctagtttcctgaaatcctggaatgagaccctcacctccaggttggctgctttacctgagaatccaccggttatcgactggkcttactacaaggccaacgtggccaaggccggtttggtggatgactttaagaagtttaatgccctgaaggttcccgtgccagaggataaatatactgcgcaggtggatgccgaagaaaaagatgtgaaatcttgtgctgagtgggtgtctctctcaaaggccaggattgtagaatatgagaaacagatggagaagatgaagaacttaattccatttgatcagatgaccactgaggacytgaacgaagctttcccagaaaccaaattagacgagaaaaagtatccttattggcctcaccaactaatcgagaatttataaaattgagtccaggaggaagttctggcccttgtattacacattctggacattaaaaataataattatacagtagaccaatagcaccataattttaggcacagtaaattagccaatatctctcattgctaactcagtttcatttaacttcttgtgttgcctttaacaactttttttttaatatcattctcgc

SEQ ID NO: 240 - DNA, 1606 bp, Homo sapiens
cacagatgaccggaagcgtgccctggcggcgctgccagccccagctgggagctggtaggggagtgcgaggaaggcgggacgcagggcggagccgctgcaggggcggggcctgcggacaggagccggggtttggggcgggaacccctcgtcccctgcagaccccgcctgctcgggcgcgggcggcggcgcggccatgaagctgaagctgaagaacgtgtttctcgcctacttcctggtgtcgatcgccggcctcctctacgcgctggtacagctcggccagccatgtgactgccttcctcccctgcgggcagcagccgagcagctacggcagaaggatctgaggatttcccagctgcaagcggaactccgacggccaccccctgcccctgcccagccccctgaacccgaggccctgcctactatctatgttgttacccccacctatgccaggctggtacagaaggcagagctggtacgactgtcccagacactgagcctggtgccccggctgcattggctgctggtggaggatgctgagggtcccaccccgctggtctcagggctgctggctgcctctggcctcctcttcacacacctggtggtcctcacgcccaaagcccagcggcttcgggagggcgagcctggctgggttcatccccgtggtgtcgagcagcggaacaaggccctggactggctccggggcagagggggtgctgtgggtggggagaaggacccaccaccaccagggacccaaggagtcgtctactttgctgacgatgacaacacctacagccgggagctgtttgaggagatgcgctggacccgtggtgtctcagtgtggcctgtggggctggtgggcggcctgcgattcgagggccctcaggtacaggacggccgggtagtgggcttccacacagcatgggagcccagcaggcccttccctgtggatatggctggatttgccgtggccctgcccttgctgttagataagcccaatgcccaatttgattccaccgctccccggggccacctggagagcagtcttctgagccaccttgtggatcccaaggacctggagccacgggctgccaactgcactcgggtactggtgtggcatactcggacagagaagcccaagatgaagcaggaggagcagctgcagcggcagggccggggctcagacccagcaattgaggtgtgatggcggccccaccccaactaccacctcttttcaggcacagaccttgtgggactgggccccaggcctgcccaggatgtggttttccaagtcctgacccttggagccagaagtggcccctctgcccctccaggcccagggcatggtcctgctgcttcacccctcccctagcctgccgtgtggcactgcccacaggctggggacaagcagcccttgtgttgagtcaggttggccctgtytagggtggaacagaaggacagatggacccaggagggagggcagctgagtaactgggtaacttattggggctgggcatgcactggggggctggaggagctgggctggacccttcccacctgagcatgctgacccccttcctacctccagaataaagaatctcaacctgga

SEQ ID NO: 241 - DNA, 1587 bp, Homo sapiens
ccggaagcgtgccctggcggcgctgccagccccagctgggagctggtaggggagtgcgaggaaggcgggacgcagggcggagccgctgcaggggcggggcctgcggacaggagccggggtttggggcgggaacccctcgtcccctgcagaccccgcctgctcgggcgcgggcggcggcgcggccatgaagctgaagctgaagaacgtgtttctcgcctacttcctggtgtcgatcgccggcctcctctacgcgctggccagccatgtgactgccttcctcccctgcgggcagcagccgagcagctacggcagaaggatctgaggatttcccagctgcaagcggaactccgacggccaccccctgcccctgcccagccccctgaacccgaggccctgcctactatctatgttgttacccccacctatgccaggctggtacagaaggcagagctggtacgactgtcccagacactgagcctggtgccccggctgcattggctgctggtggaggatgctgagggtcccaccccgctggtctcagggctgctggctgcctctggcctcctcttcacacacctggtggtcctcacgcccaaagcccagcggcttcgggagggcgagcctggctgggttcatccccgtggtgtcgagcagcggaacaaggccctggactggctccggggcagagggggtgctgtgggtggggagaaggacccaccaccaccagggacccaaggagtcgtctactttgctgacgatgacaacacctacagccgggagctgtttgaggagatgcgctggacccgtggtgtctcagtgtggcctgtggggctggtgggcggcctgcgattcgagggccctcaggtacaggacggccgggtagtgggcttccacacagcatgggagcccagcaggcccttccctgtggatatggctggatttgccgtggccctgcccttgctgttagataagcccaatgcccaatttgattccaccgctccccggggccacctggagagcagtcttctgagccaccttgtggatcccaaggacctggagccacgggctgccaactgcactcgggtactggtgtggcatactcggacagagaagcccaagatgaagcaggaggagcagctgcagcggcagggccggggctcagacccagcaattgaggtgtgatggcggccccaccccaactaccacctcttttcaggcacagaccttgtgggactgggccccaggcctgcccaggatgtggttttccaagtcctgacccttggagccagaagtggcccctctgcccctccaggcccagggcatggtcctgctgcttcacccctcccctagcctgccgtgtggcactgcccacaggctggggacaagcagcccttgtgttgagtcaggttggccctgtytagggtggaacagaaggacagatggacccaggagggagggcagctgagtaactgggtaacttattggggctgggcatgcactggggggctggaggagctgggctggacccttcccacctgagcatgctgacccccttcctacctccagaataaagaatctcaacctgga

SEQ ID NO: 242 - DNA, 2115 bp, Homo sapiens
tccccgccccgccccgcccggcgacttaacgcgcccccgccccgcgcccggcctcggcagccgcctgtcgccgcgggagcagccgctatctctgtgtgtccgcgtgtgcgcccggtccccgcctgccgcaccatggagagctaccacaagcctgaccagcagaagctgcaggccttgaaggacacggccaaccgcctacgtatcagctccatccaggccaccactgcggcgggctctggccaccccacgtcatgctgcagcgccgcagagatcatggctgtcctctttttccacaccatgcgctacaagtcccaggacccccggaatccgcacaatgaccgctttgtgctctccaagggccatgcagctcccatcctctacgcggtctgggctgaagctggtttcctggccgaggcggagctgctgaacctgaggaagatcagctccgacttggacgggcacccggtcccgaaacaagctttcaccgacgtggccactggctccctgggccagggcctcggggcygcttgtgggatggcctacaccggcaaatacttcgacaaggccagctaccgagtctattgcttgctgggagayggggagctgtcagagggctctgtatgggaggccatggccttcgccagcatctataagctggacaaccttgtggccattctagacatcaatcgcctgggccagagtgacccggccccrctgcagcaccagatggacatctaccagaagcggtgcgaggccttcggttggcatgccatcatcgtggatggacacagcgtggaggagctgtgcaaggcctttggccaggccaagcaccagccaacagccatcattgccaagaccttcaagggccgagggatcacgggggtagaagataaggagtcttggcatgggaagcccctccccaaaaacatggctgagcagatcatccaggagatctacagccagatccagagcaaaaagaagatcctggcaacccctccacaggaggacgcaccctcagtggacattgccaacatccgcatgcccagcctgcccagctacaaagttggggacaagatagccacccgcaaggcctacgggcaggcactggccaagctgggccatgccagtgaccgcatcatcgccctggatggggacaccaaaaattccaccttctcggagatcttcaaaaaggagcacccggaccgcttcatcgagtgctacattgctgagcagaacatggtgagcatcgcggtgggctgtgccacccgcaacaggacggtgcccttctgcagcacttttgcagccttcttcacgcgggcctttgaccagattcgcatggccgccatctccgagagcaayatcaacctctgcggctcccactgcggcgtttccatcggggaagacgggccctcccagatggccctagaagatctggctatgtttcggtcagtccccacatcaactgtcttttacccaagtgatggcgttgctacagagaaggcagtggaactagccgccaatacaaagggtatctgcttcatccggaccagccgcccagaaaatgccatcatctataacaacaatgaggacttccaggtcggacaagccaaggtggtcctgaagagcaaggatgaccaggtgaccgttatcggggctggggtgaccctgcacgaggccttggccgctgccgaactgctgaagaaagaaaagatcaacatccgcgtgctggaccccttcaccatcaagcccctggacagaaaactcattctcgacagcgctcgtgccaccaagggcaggatcctcaccgtggaggaccattattatgaaggtggcattggtgaggctgtgtccagtgcagtagtgggcgagcctggcatcactgtcacccacctggcagttaaccgggtaccaagaagtgggargccrgctgagstgctgaagatgtttggtatcgacagggatgccattgcacaagctgtgaggggcctcatcaccaagkcctagggcgggtatgaagtgtggggygggggtctatacattcctgagattctgggaaaggtgctcaaagatgtactgagaggaggggtaaatatatgttttgagaaaaatgaattg

SEQ ID NO: 243 - DNA, 2917 bp, Homo sapiens
tccccgccccgccccgcccggcgacttaacgcgcccccgccccgcgcccggcctcggcagccgcctgtcgccgcgggagcagccgctatctctgtgtgtccgcgtgtgcgcccggtccccgcctgccgcaccatggagagctaccacaagcctgaccagcagaagctgcaggccttgaaggacacggccaaccgcctacgtatcagctccatccaggccaccactgcggcgggctctggccaccccacgtcatgctgcagcgccgcagagatcatggctgtcctctttttccacaccatgcgctacaagtcccaggacccccggaatccgcacaatgaccgctttgtgctctccaagggccatgcagctcccatcctctacgcggtctgggctgaagctggtttcctggccgaggcggagctgctgaacctgaggaagatcagctccgacttggacgggcacccggtcccgaaacaagctttcaccgacgtggccactggctccctgggccagggcctcggggcygcttgtgggatggcctacaccggcaaatacttcgacaaggccagctaccgagtctattgcttgctgggagayggggagctgtcagagggctctgtatgggaggccatggccttcgccagcatctataagctggacaaccttgtggccattctagacatcaatcgcctgggccagagtgacccggccccrctgcagcaccagatggacatctaccagaagcggtgcgaggccttcggttggcatgccatcatcgtggatggacacagcgtggaggagctgtgcaaggcctttggccaggccaagcaccagccaacagccatcattgccaagaccttcaagggccgagggatcacgggggtagaagataaggagtcttggcatgggaagcccctccccaaaaacatggctgagcagatcatccaggagatctacagccagatccagagcaaaaagaagatcctggcaacccctccacaggaggacgcaccctcagtggacattgccaacatccgcatgcccagcctgcccagctacaaagttggggacaagatagccacccgcaaggcctacgggcaggcactggccaagctgggccatgccagtgaccgcatcatcgccctggatggggacaccaaaaattccaccttctcggagatcttcaaaaaggagcacccggaccgcttcatcgagtgctacattgctgagcagaacatggtgagcatcgcggtgggctgtgccacccgcaacaggacggtgcccttctgcagcacttttgcagccttcttcacgcgggcctttgaccagattcgcatggccgccatctccgagagcaayatcaacctctgcggctcccactgcggcgtttccatcggggaagacgggccctcccagatggccctagaagatctggctatgtttcggtcagtccccacatcaactgtcttttacccaagtgatggcgttgctacagagaaggcagtggaactagccgccaatacaaagggtatctgcttcatccggaccagccgcccagaaaatgccatcatctataacaacaatgaggacttccaggtcggacaagccaaggtggtcctgaagagcaaggatgaccaggtgaccgttatcggggctggggtgaccctgcacgaggccttggccgctgccgaactgctgaagaaagaaaagatcaacatccgcgtgctggaccccttcaccatcaagcccctggacagaaaactcattctcgacagcgctcgtgccaccaagggcaggatcctcaccgtggaggaccattattatgaaggtggcattggtgaggctgtgtccagtgcagtagtgggcgagcctggcatcactgtcacccacctggcagttaaccgggtaccaagaagtgggargccrgctgagstgctgaagatgtttggtatcgacagggatgccattgcacaagctgtgaggggcctcatcaccaagkcctagggcggccagtgcaggttctgggraagaagcgtggagggtgcgctagggaggctggtgtccttggtcctgggccaggacctgggtgtcccaagtccccttggaatcacctgcaactgccctcaacctccagaactatcgctgcctcccattcatcaccaggtgacatttgactgcaacctgccttctagctgagaggctgagacctacatccctcattgtgacctcagtccacctggccctgagcgggctggggaactgcctcagtctggaagctgaccaggcactctcagggccgccccacctcccccaagtccccacagccttgcagtcaggtctcctgggatagggaggttcacttgcttgttgtccctcgtccttgtcatatccttttaactaggcatctcagagaagcagagacagggcagccttcgtcctgggggaaaagggaccctcaggatggcatgagaggtcctcaatcccaagtgtggaactgtccccctcaacttgttaaaatgcagatttctgggtcttgccaatggggcctgggactccatgtgacaactggcccaggagcttytgatgtcacacagaattctgcagtcccaagctccagccccracctgctctgctgttcctaggtgactgccctcacactgctgaccacagtggatttctccccctgctgctcgggctcagctggggtcagccctgcttataaggtcaactgtgcaaaaccttatactggccaagaacaaactagtgctgggggaggagggctgggtgccccggccactggtggagtccccaggaaatcctcaragctgttgcgaggatgagacacatttgtggacacgtccmcctgtcctcctgaccgtctggagagaataaacctgtcaaagccaaggtcaggcaa

SEQ ID NO: 244 - DNA, 1247 bp, Homo sapiens
tggttaactgcrtttgcagctagaagttaggctctgattcactgttttgtattttctaaaagggttatatgtaatttgaaagatagacctgccaagacgtgagatctgtgttctccttggttagagctaacatttttggtgaggaaagcactgcaggagcaggctggcacagagaagaggacatgcggaaggagctccagctctccctgtcagtcaccttgctgcttgtctgtggcttcctctaccagttcaccctgaagtccagctgcctcttctgyttgccttctttcaagtcccaccaggggctggaagccctcctgagccacagacgtggcattgtgtttctagagacctcagagagaatggagccaccccatttggtctcctgttccgtagagtctgctgccaagatttatcctgagtggcctgtggtgttctttatgaagggtcttactgattccacaccgatgccctcaaactccacatacccagctttttccttcctgtcagcaatagacaacgttttcctcttccctttggatatgaaaaggctgcttgaagacacaccattgttttcatggtacaatcaaatcaacgccagcgcagagagaaactggctccacatcagctcggatgcatcccgcctggccatcatctggaaatacggtggcatctacatggacaccgatgtcatctccatcaggcccatccctgaggagaactttttggctgcgcaggcttctcggtactctagtaatggaatatttgggttcctcccccaccacccctttttgtgggaatgcatggaaaactttgttgaacactataattcagmcatttggggcaaccaaggccctgagttgatgacaaggatgttgagggtatggtgtaaacttgaagacttccaggaggtgagcgacctcaggtgtctgaacatatccttcttacacccccaaagattttaccccatctcctatcgagagtggaggcgctactatgaagtgtgggatacagagccaagcttcaaygtctcttatgccctgcatttgtggaaccacatgaaccaggaggggcgggctgtgattagaggaagcaacacactggtggaaaatctctatcgcaagcactgtcccaggacttacagggacctgattaaaggcccagaggggtcagtgactggggagctgggtccaggtaacaaataragctaacactcgtttgctgctgctgcagtgtggaaatggaca

SEQ ID NO: 245 - DNA, 3816 bp, Homo sapiens
  misc_feature (1)...(3816): n = A,T,C or G
ctgacggcgagaggcagaggtgccctcggtgatagaggaaacatggccgagtatacgcggctgcacaacgccttggcgctaatccgcctccgaaacccgccggtcaacgcgatcagtacgactttactccgtgacataaaagaaggactacagaaagctgkaakagaccatacaataaaagccattgtgatttgtggagcagagggcaaattttctgcaggtgctgatattcgtggcttcagtgctcctaggacatttggccttayactgggacatgtagtagatgaaatacagagaaatgagaagcccgtggtggcagcaatccaaggcatggctttcggagggggactagagctggccctgggctgtcactataggattgcccacgcagaggctcaagttggcttaccagaagttacactkggacttctccctggtgcaagaggaacccagcttctccccagactcactggagttcctgctgcacttgacttaattacctcaggaagacgtattttagcagatgaagcactcaagctgggcattctagataaagttgtaaactcagacccggttgaagaagcaatcagatttgctcagagagtttcagatcaacctctagaatcccgtagactctgcaacaagccaattcagagcttgcccaacatggacagcatttttagtgaggccctcttgaagatgcggaggcagcaccctgggtgtcttgcacaggaggcttgtgtccgtgcagtccaggctgctgtgcagtatccctatgaagtgggcatcaagaaggaggaggagctgtttctatatcttttgcaatcagggcaggctagagccctgcaatatgctttcttcrctgaaaggaaagcaaataagtggtcarctccctccggagcatcgtggaaaacagcatcagygcggcctgtctcctcagttggtgttgttggcttgggaacaatgggccgaggcattgtcatttcttttgcaagggccaggattcctgtgattgstgtagactcggacaaaaaccagctagcarctgcaaacaagatgataacctctgtcttggaraaagaagcctccaaaatgcaacagagcggccacccttggtcaggaccaaaacccaggttaacttcatctgtgaaggagcttggtggtgtagatttagtcattgaagcagtatttgaggaaatgagcctgaagaagcaggtctttgctgaactctcagctgtgtgcaaaccagaagcatttttrtgcactaatacttcagccctggatgttgatgagattgcttcttccactgatcgtcctcacttggtcattggcacccacttcttttcgccagctcatgtcatgaagttgttagaggttattcccagccaatactcttcccccactaccattgccactgttatgaacttatcaaaaaagattaaaaagattggagtcgttgtaggcaactgttttggatttgtggggaatcgaatgttgaatccttactacaatcaggcatatttcttgttagaagaaggcagcaaaccagaggaggtagatcaggtgctggaagagtttggttttaaaatgggaccttttagagtgtctgatcttgctgggttggatgtgggctggaaatctagaaaggggcaaggtcttactggacctacattgcttccaggaactcctgcccgaaaaaggggtaataggaggtactgcccaattcctgatgtgctctgtgaattaggacgatttggccagaagacaggtaagggttggtatcaatatgacaagccattgggtaggattcacaaacctgatccctggctttccamattcctatcacrgtatagaaaamcccatcacattgaaccacgtaccattagccaggatgagatccttgaacgctgcttatattcacttatcaatgaagcattccgtatcttgggagaagggatagctgctagcccagagcacattgatgttgtctatttacatggatatggatggccaaggcacaagggcgggcccatgttctatgcttccacagttgggttgcccacagttctagagaaattgcagaaatattacaggnagaaccctgatattccccaactggagccaagtgactatctaaaaaaactggcttctcagggaaaccctcccctgaaagaatggcaaagctnggcaggctcccctagcagtaaattgtgattcagtcttccagattatgcctcacatgctagcatcaggtaatgctgactgaatttcagtgaaattaaatcaaaaatccaaagtaagattgttctgaaatacaaagcaaaataaataatcattagaatcttctgtgtaacgactctaatggtcaaatctttaggaatgtgcttcctatgcctctgaatctgtccttatcagataaattcaatgcatgaacttgtgtgaatataataccataatagctaatgaaagaggctcaggcataagttgagattctcaaatgcttttatcattggataaatgtgtcatcaattaataaatgataaatgcagctaagtcatacattcattttgactcctttcaatgtcacacacatagtattgatcagaaatcttatgaatcatacatacactcaacaaacattaaagttgtaggaaaaagacagttggaaattggtaagggaactgagtacttcaaaccagcacagggaacttaggttagtgtggcaagcctttcctcttctggtctttcctcttctgtttatggagaaataatagaaagtagtaagtcgttaacttagtgtaagaagggtcttagagaacatctaaccttctaggatttcccaattctgtgatagagtaatgacaccagttttcctgtcatgacaagcctctgtgatgttacatatggaaatggttgaatcttgaaaaatctaaaattgttgcaaaacatattttgtatgattttgttgtaagagttcttctctttttactttttgccttgtgtagttaaaaattaaggggctggtcaatacaaaaacttgtacacaaatatttatagcagaattattcataatggccaaaagctgaatacaacccaaatgtctatgaactaatgaatagataaaccaaatctggtatatccatacaatggactatattattcagccataaaaagaaataaagggccaggcacagtggctcacacctgtaatcccagcactttgggaggctgaggcaggaggattgtttgaggccagaaatttgagaccagcctgggcaacatagcaaaaccctgtctctacaaaaaatactttccgtacattagtggttrcctaaggctagaattgggggtgatgaatggggagtacaggattcatctaatgggtacaggatttctttatggttcatgaaaatggtctaaacttattgtggtaatggtcacataacaatatattaaaaaccattgagttgtatattttaagtgggtgaattatatggtatgtgaattatatctcaataaagttgttagtaaataaatggggctgaagatgttatccttcattgtggtgtaaatgaactttcacaatattttcacctgtgaacccaaataaaatgattaaagttctgatggaaaaatcttgaatggagtataagttttccgttgttaaaaagcaaacaaaaaaccaacaaaaaatccaagtgtgccttgaattgtacagagcacaattattatgtttgaaatgtgtactacttaattttatataatttggtttgtgaaattaaagacatcaataaaaatgattcctgaaagtagtaa

SEQ ID NO: 246 - DNA, 3773 bp, Homo sapiens
  misc_feature (1)...(3773): n = A,T,C or G
ctgacggcgagaggcagaggtgccctcggtgatagaggaaacatggccgagtatacgcggctgcacaacgccttggcgctaatccgcctccgaaacccgccggtcaacgcgatcagtacgactttactccgtgacataaaagaaggactacagaaagctgkaakagaccatacaataaaagccattgtgatttgtggagcagagggcaaattttctgcaggtgctgatattcgtggcttcagtgctcctaggacatttggccttayactgggacatgtagtagatgaaatacagagaaatgagaagcccgtggtggcagcaatccaaggcatggctttcggagggggactagagctggccctgggctgtcactataggattgcccacgcagaggctcaagttggcttaccagaagttacactkggacttctccctggtgcaagaggaacccagcttctccccagactcactggagttcctgctgcacttgacttaattacctcaggaagacgtattttagcagatgaagcactcaagctgggcattctagataaagttgtaaactcagacccggttgaagaagcaatcagatttgctcagagagtttcagatcaacctctagaatcccgtagactctgcaacaagccaattcagagcttgcccaacatggacagcatttttagtgaggccctcttgaagatgcggaggcagcaccctgggtgtcttgcacaggaggcttgtgtccgtgcagtccaggctgctgtgcagtatccctatgaagtgggcatcaagaaggaggaggagctgtttctatatcttttgcaatcagggcaggctagagccctgcaatatgctttcttcrctgaaaggaaagcaaataagtggtcarctccctccggagcatcgtggaaaacagcatcagygcggcctgtctcctcagttggtgttgttgggccaggattcctgtgattgstgtagactcggacaaaaaccagctagcarctgcaaacaagatgataacctctgtcttggaraaagaagcctccaaaatgcaacagagcggccacccttggtcaggaccaaaacccaggttaacttcatctgtgaaggagcttggtggtgtagatttagtcattgaagcagtatttgaggaaatgagcctgaagaagcaggtctttgctgaactctcagctgtgtgcaaaccagaagcatttttrtgcactaatacttcagccctggatgttgatgagattgcttcttccactgatcgtcctcacttggtcattggcacccacttcttttcgccagctcatgtcatgaagttgttagaggttattcccagccaatactcttcccccactaccattgccactgttatgaacttatcaaaaaagattaaaaagattggagtcgttgtaggcaactgttttggatttgtggggaatcgaatgttgaatccttactacaatcaggcatatttcttgttagaagaaggcagcaaaccagaggaggtagatcaggtgctggaagagtttggttttaaaatgggaccttttagagtgtctgatcttgctgggttggatgtgggctggaaatctagaaaggggcaaggtcttactggacctacattgcttccaggaactcctgcccgaaaaaggggtaataggaggtactgcccaattcctgatgtgctctgtgaattaggacgatttggccagaagacaggtaagggttggtatcaatatgacaagccattgggtaggattcacaaacctgatccctggctttccamattcctatcacrgtatagaaaamcccatcacattgaaccacgtaccattagccaggatgagatccttgaacgctgcttatattcacttatcaatgaagcattccgtatcttgggagaagggatagctgctagcccagagcacattgatgttgtctatttacatggatatggatggccaaggcacaagggcgggcccatgttctatgcttccacagttgggttgcccacagttctagagaaattgcagaaatattacaggnagaaccctgatattccccaactggagccaagtgactatctaaaaaaactggcttctcagggaaaccctcccctgaaagaatggcaaagctnggcaggctcccctagcagtaaattgtgattcagtcttccagattatgcctcacatgctagcatcaggtaatgctgactgaatttcagtgaaattaaatcaaaaatccaaagtaagattgttctgaaatacaaagcaaaataaataatcattagaatcttctgtgtaacgactctaatggtcaaatctttaggaatgtgcttcctatgcctctgaatctgtccttatcagataaattcaatgcatgaacttgtgtgaatataataccataatagctaatgaaagaggctcaggcataagttgagattctcaaatgcttttatcattggataaatgtgtcatcaattaataaatgataaatgcagctaagtcatacattcattttgactcctttcaatgtcacacacatagtattgatcagaaatcttatgaatcatacatacactcaacaaacattaaagttgtaggaaaaagacagttggaaattggtaagggaactgagtacttcaaaccagcacagggaacttaggttagtgtggcaagcctttcctcttctggtctttcctcttctgtttatggagaaataatagaaagtagtaagtcgttaacttagtgtaagaagggtcttagagaacatctaaccttctaggatttcccaattctgtgatagagtaatgacaccagttttcctgtcatgacaagcctctgtgatgttacatatggaaatggttgaatcttgaaaaatctaaaattgttgcaaaacatattttgtatgattttgttgtaagagttcttctctttttactttttgccttgtgtagttaaaaattaaggggctggtcaatacaaaaacttgtacacaaatatttatagcagaattattcataatggccaaaagctgaatacaacccaaatgtctatgaactaatgaatagataaaccaaatctggtatatccatacaatggactatattattcagccataaaaagaaataaagggccaggcacagtggctcacacctgtaatcccagcactttgggaggctgaggcaggaggattgtttgaggccagaaatttgagaccagcctgggcaacatagcaaaaccctgtctctacaaaaaatactttccgtacattagtggttrcctaaggctagaattgggggtgatgaatggggagtacaggattcatctaatgggtacaggatttctttatggttcatgaaaatggtctaaacttattgtggtaatggtcacataacaatatattaaaaaccattgagttgtatattttaagtgggtgaattatatggtatgtgaattatatctcaataaagttgttagtaaataaatggggctgaagatgttatccttcattgtggtgtaaatgaactttcacaatattttcacctgtgaacccaaataaaatgattaaagttctgatggaaaaatcttgaatggagtataagttttccgttgttaaaaagcaaacaaaaaaccaacaaaaaatccaagtgtgccttgaattgtacagagcacaattattatgtttgaaatgtgtactacttaattttatataatttggtttgtgaaattaaagacatcaataaaaatgattcctgaaagtagtaa

SEQ ID NO: 247 - DNA, 3519 bp, Homo sapiens
  misc_feature (1)...(3519): n = A,T,C or G
ctgacggcgagaggcagaggtgccctcggtgatagaggaaacatggccgagtatacgcggctgcacaacgccttggcgctaatccgcctccgaaacccgccggtcaacgcgatcagtacgactttactccgtgacataaaagaaggactacagaaagctgkaakagaccatacaataaaagccattgtgatttgtggagcagagggcaaattttctgcaggtgctgatattcgtggcttcagtgctcctaggacatttggccttayactgggacatgtagtagatgaaatacagagaaatgagaagcccgtggtggcagcaatccaaggcatggctttcggagggggactagagctggccctgggctgtcactataggattgcccacgcagaggctcaagttggcttaccagaagttacactkggacttctccctggtgcaagaggaacccagcttctccccagactcactggagttcctgctgcacttgacttaattacctcaggaagacgtattttagcagatgaagcactcaagctgggcattctagataaagttgtaaactcagacccggttgaagaagcaatcagatttgctcagagagtttcagatcaacctctagaatcccgtagactctgcaacaagccaattcagagcttgcccaacatggacagcatttttagtgaggccctcttgaagatgcggaggcagcaccctgggtgtcttgcacaggaggcttgtgtccgtgcagtccaggctgctgtgcagtatccctatgaagtgggcatcaagaaggaggaggagctgtttctatatcttttgcaatcagggcaggctagagccctgcaatatgctttcttcrctgaaaggaaagcaaataagtggtcarctccctccggagcatcgtggaaaacagcatcagygcggcctgtctcctcagttggtgttgttggcttgggaacaatgggccgaggcattgtcatttcttttgcaagggccaggattcctgtgattgstgtagactcggacaaaaaccagctagcarctgcaaacaagatgataacctctgtcttggaraaagaagcctccaaaatgcaacagagcggccacccttggtcaggaccaaaacccaggttaacttcatctgtgaaggagcttggtggtgtagatttagtcattgaagcagtatttgaggaaatgagcctgaagaagcaggtctttgctgaactctcagctgtgtgcaaaccagaagcatttttrtgcactaatacttcagccctggatgttgatgagattgcttcttccactgatcgtcctcacttggtcattggcacccacttcttttcgccagctcatgtcatgaagttgttagaggttattcccagccaatactcttcccccactaccattgccactgttatgaacttatcaaaaaagattaaaaagattggagtcgttgtaggcaactgttttggatttgtggggaatcgaatgttgaatccttactacaatcaggcatatttcttgttagaagaaggcagcaaaccagaggaggtagatcaggtgctggaagagtttggttttaaaatgggaccttttagagtgtctgatcttgctgggttggatgtgggctggaaatctagaaaggggcaaggtcttactggacctacattgcttccaggaactcctgcccgaaaaaggggtaataggaggtactgcccaattcctgatgtgctctgtgaattaggacgatttggccagaagacaggtaagggttggtatcaatatgacaagccattgggtaggattcacaaacctgatccctggctttccamattcctatcacrgtatagaaaamcccatcacattgaaccacgtaccattagccaggatgagatccttgaacgctgcttatattcacttatcaatgaagcattccgtatcttgggagaagggatagctgctagcccagagcacattgatgttgtctatttacatggatatggatggccaaggcacaagggcgggcccatgttctatgcttccacagttgggttgcccacagttctagagaaattgcagaaatattacaggnagaaccctgatattccccaactggagccaagtgactatctaaaaaaactggcttctcagggaaaccctcccctgaaagaatggcaaagctnggcaggctcccctagcagtaaattgtgattcagtcttccagattatgcctcacatgctagcatcaggtaatgctgactgaatttcagtgaaattaaatcaaaaatccaaagtaagattgttctgaaatacaaagcaaaataaataatcattagaatcttctgtgtaacgactctaatggtcaaatctttaggaatgtgcttcctatgcctctgaatctgtccttatcagataaattcaatgcatgaacttgtgtgaatataataccataatagctaatgaaagaggctcaggcataagttgagattctcaaatgcttttatcattggataaatgtgtcatcaattaataaatgataaatgcagctaagtcatacattcattttgactcctttcaatgtcacacacatagtattgatcagaaatcttatgaatcatacatacactcaacaaacattaaagttcacagggaacttaggttagtgtggcaagcctttcctcttctggtctttcctcttctgtttatggagaaataatagaaagtagtaagtcgttaacttagtgtaagaagggtcttagagaacatctaaccttctaggatttcccaattctgtgatagagtaatgacaccagttttcctgtcatgacaagcctctgtgatgttacatatggaaatggttgaatcttgaaaaatctaaaattgttgcaaaacatattttgtatgattttgttgtaagagttcttctctttttactttttgccttgtgtagttaaaaattaaggggctggtcaatacaaaaacttgtacacaaatatttatagcagaattattcataatggccaaaagctgaatacaacccaaatgtctatgaactaatgaatagataaaccaaatctggtatatccatacaatggactatattattcagccataaaaagaaataaagggccaggcacagtggctcacacctgtaatcccagcactttgggaggctgaggcaggaggattgtttgaggccagaaatttgagaccagcctgggcaacatagcaaaaccctgtctctacaaaaaatactttccgtacattagtggttrcctaaggctagaattgggggtgatgaatggggagtacaggattcatctaatgggtacaggatttctttatggttcatgaaaatggtctaaacttattgtggtaatggtcacataacaatatattaaaaaccattgagttgtatattttaagtgggtgaattatatggtatgtgaattatatctcaataaagttgttagtaaataaatggggctgaagatgttatccttcattgtggtgtaa

SEQ ID NO: 248 - DNA, 4159 bp, Homo sapiens
attgccgcagatttgcagtcacttcagactgggtggagtatccaagtccatagaagagcaaattctcacccttcgaggctgctgtggaagctaccggggctgggacagcagagaggaacccagacgggaacaccgccctcccgccagactcccggcggctcctcctccctctcccaaacccactcccaaagctaagtgcaggcttccccgttccagccagaagcgctgcgtgagcctccacacgtagccgcagcactccttaaatagcgtccgcgctgagcaaacagtccagacgtggggcccaggaggcgagctgaggcaccgcaccggcggcaccgcggcgggtcagcggcggccaatagccagggcgcggcgcccccgtcgcctcccctcggagcctataaggctccgcagcgccccgggctgctgctccgtgcctccaccgacgacctcactcagctgcgttacggccgctccggtgccggcgcgcgccttgcccgccgctcccgcccgcaatcggcggctcagggcggacccgggtctctgcgttctcgcgagaagcgcggcgctgcggggccgtgggcgcctgagcccagccagcctcgagggccgaatatggggggatgcacggtgaagcctcagctgctgctcctggcgctcgtcctccacccctggaatccctgtctgggtgcggactcggagaagccctcgagcatccccacagtctttgcagataaattattagtcataactgtagcaacaaaagaaagtgatggattccatcgatttatgcagtcagccaaatatttcaattatactgtgaaggtccttggtcaaggagaagaatggagaggtggtgatggaattaatagtattggagggggccagaaagtgagattaatgaaagaagtcatggaacactatgctgatcaagatgatctggttgtcatgtttactgaatgctttgatgtcatatttgctggtggtccagaagaagttctaaaaaaattccaaaaggcaaaccacaaagtggtctttgcagcagatggaattttgtggccagataaaagactagcagacaagtatcctgttgtgcacattgggaaacgctatctgaattcaggaggatttattggctatgctccatatgtcaaccgtatagttcaacaatggaatctccaggataatgatgatgatcagctcttttacactaaagtttacattgatccactgaaaagggaagctattaacatcacattggatcacaaatgcaaaattttccagaccttaaatggagctgtagatgaagttgttttaaaatttgaaaatggcaaagccagagctaagaatacattttatgaaacattaccagtggcaattaatggaaatggacccaccaagattctcctgaattattttggaaactatgtacccaattcatggacacaggataatggctgcactctttgtgaattcgatacagtcgacttgtctgcagtagatgtccatccaaacgtatcaataggtgtttttattgagcaaccaaccccttttctacctcggtttctggacatattgttgacactggattacccaaaagaagcacttaaactttttattcataacaaagaagtttatcatgaaaaggacatcaaggtattttttgataaagctaagcatgaaatcaaaactataaaaatagtaggaccagaagaaaatctaagtcaagcggaagccagaaacatgggaatggacttttgccgtcaggatgaaaagtgtgattattactttagtgtggatgcagatgttgttttgacaaatccaaggactttaaaaattttgattgaacaaaacagaaagatcattgctcctcttgtaactcgtcatggaaagctgtggtccaatttctggggagcattgagtcctgatggatactatgcacgatctgaagattatgtggatattgttcaagggaatagagtaggagtatggaatgtcccatatatggctaatgtgtacttaattaaaggaaagacactccgatcagagatgaatgaaaggaactattttgttcgtgataaactggatcctgatatggctctttgccgaaatgctagagaaatgggtgtatttatgtacatttctaatagacatgaatttggaaggctattatccactgctaattacaatacttcccattataacaatgacctctggcagatttttgaaaatcctgtggactggaaggaaaagtatataaaccgtgattattcaaagattttcactgaaaatatagttgaacagccctgtccagatgtcttttggttccccatattttctgaaaaagcctgtgatgaattggtagaagaaatggaacattacggcaaatggtctgggggaaaacatcatgatagccgtatatctggtggttatgaaaatgtcccaactgatgatatccacatgaagcaagttgatctggagaatgtatggcttsattttatccgggagttcattgcaccagttacactgaaggtctttgcaggctattatacgaagggatttgcactactgaattttgtagtaaaatactcccctgaacgacagcgttctcttcgtcctcatcatgatgcttctacatttaccataaacattgcacttaataacgtgggagaagactttcagggaggtggttgcaaatttctaaggtacaattgctctattgagtcaccacgaaaaggctggagcttcatgcatcctgggagactcacacatttgcatgaaggacttcctgttaaaaatggaacaagatacattgcagtgtcatttatagatccctaagttatttacttttcattgaattgaaatttattttggrtgaatgactggcatgaacacgtctttgaagttgtggctgagaagatgagaggaatatttaaataacatcaacagaacaacttcactttgggccaaacatttgaaaaactttttataaaaaattgtttgatattkcttaatgtctgctctgagccttaaaacacagattgaagaagaaaagaaagaaaaaacttaaatatttatttctatgctttgttgcctctgagaataatgacaatttatgaatttgtgtttcaaattgataaaatatttaggtacaaataacaagactaataatattttcttatttaaaaaaagcatgggaagatttttatttatcaaaatatagaggaaatgtagacaaaatggatataaatgaaaattaccatgttgtaaaaccttgaaaatcagattctaactggatttgtatgcaactaagtatttttctgaacacctatgcaggtcttatttacagtagttactaagggaacacacaaagaattacacaacgttttcctcaagaaaatggtacaaaacacaaccgaggagcgtatacagttgaaaacatttttgttttgattggaaggcagattattttatattagtattaaaaatcaaaccctatgtttctttcagatgaatcttccaaagtggattatattaagcaggtattagatttaggaaaacctttccatttcttaaagtattatcaagtgtcaagatcagcaagtgtccttaagtcaaacaggttttttttgttgttgtttttgctttgtttccttttttagaaagttctagaaaataggaaaacgaaaaatttcattgagatgagtagtgcatttaattattttttaaaaaactttttaagtacttgaattttatatcaggaaaacaaagttgttgagccttgcttcttccgttttgccctttgtctcgctccttattctttttttggggggagggttatttgcttttttatcttcctggcataatttccattttattcttctgagtgtctatgttaacttccctctatcccgcttataaaaaaattctccaacaaaaatacttgttgacttgatgttttatcacttctctaagtaaggttgaaatatccttattgtagctactgtttttaatgtaaaggttaaacttgaaaagaaattyttaatcmcggkgccaaaattcattttctaacaccatgtgttagaaaattataaaaaataaaataattttagaaagttttgttgttctattattggtgtttatcttccaaagtgaatac

SEQ ID NO: 249 - DNA, 4150 bp, Homo sapiens
attgccgcagatttgcagtcacttcagactgggtggagtatccaagtccatagaagagcaaattctcacccttcgaggctgctgtggaagctaccggggctgggacagcagagaggaacccagacgggaacaccgccctcccgccagactcccggcggctcctcctccctctcccaaacccactcccaaagctaagtgcaggcttccccgttccagccagaagcgctgcgtgagcctccacacgtagccgcagcactccttaaatagcgtccgcgctgagcaaacagtccagacgtggggcccaggaggcgagctgaggcaccgcaccggcggcaccgcggcgggtcagcggcggccaatagccagggcgcggcgcccccgtcgcctcccctcggagcctataaggctccgcagcgccccgggctgctgctccgtgcctccaccgacgacctcactcagctgcgttacggccgctccggtgccggcgcgcgccttgcccgccgctcccgcccgcaatcggcggctcagggcggacccgggtctctgcgttctcgcgagaagcgcggcgctgcggggccgtgggcgcctgagcccagccagcctcgagggccgaatatggggggatgcacggtgaagcctcagctgctgctcctggcgctcgtcctccacccctggaatccctgtctgggtgcggactcggagaagccctcgagcatccccacagataaattattagtcataactgtagcaacaaaagaaagtgatggattccatcgatttatgcagtcagccaaatatttcaattatactgtgaaggtccttggtcaaggagaagaatggagaggtggtgatggaattaatagtattggagggggccagaaagtgagattaatgaaagaagtcatggaacactatgctgatcaagatgatctggttgtcatgtttactgaatgctttgatgtcatatttgctggtggtccagaagaagttctaaaaaaattccaaaaggcaaaccacaaagtggtctttgcagcagatggaattttgtggccagataaaagactagcagacaagtatcctgttgtgcacattgggaaacgctatctgaattcaggaggatttattggctatgctccatatgtcaaccgtatagttcaacaatggaatctccaggataatgatgatgatcagctcttttacactaaagtttacattgatccactgaaaagggaagctattaacatcacattggatcacaaatgcaaaattttccagaccttaaatggagctgtagatgaagttgttttaaaatttgaaaatggcaaagccagagctaagaatacattttatgaaacattaccagtggcaattaatggaaatggacccaccaagattctcctgaattattttggaaactatgtacccaattcatggacacaggataatggctgcactctttgtgaattcgatacagtcgacttgtctgcagtagatgtccatccaaacgtatcaataggtgtttttattgagcaaccaaccccttttctacctcggtttctggacatattgttgacactggattacccaaaagaagcacttaaactttttattcataacaaagaagtttatcatgaaaaggacatcaaggtattttttgataaagctaagcatgaaatcaaaactataaaaatagtaggaccagaagaaaatctaagtcaagcggaagccagaaacatgggaatggacttttgccgtcaggatgaaaagtgtgattattactttagtgtggatgcagatgttgttttgacaaatccaaggactttaaaaattttgattgaacaaaacagaaagatcattgctcctcttgtaactcgtcatggaaagctgtggtccaatttctggggagcattgagtcctgatggatactatgcacgatctgaagattatgtggatattgttcaagggaatagagtaggagtatggaatgtcccatatatggctaatgtgtacttaattaaaggaaagacactccgatcagagatgaatgaaaggaactattttgttcgtgataaactggatcctgatatggctctttgccgaaatgctagagaaatgggtgtatttatgtacatttctaatagacatgaatttggaaggctattatccactgctaattacaatacttcccattataacaatgacctctggcagatttttgaaaatcctgtggactggaaggaaaagtatataaaccgtgattattcaaagattttcactgaaaatatagttgaacagccctgtccagatgtcttttggttccccatattttctgaaaaagcctgtgatgaattggtagaagaaatggaacattacggcaaatggtctgggggaaaacatcatgatagccgtatatctggtggttatgaaaatgtcccaactgatgatatccacatgaagcaagttgatctggagaatgtatggcttsattttatccgggagttcattgcaccagttacactgaaggtctttgcaggctattatacgaagggatttgcactactgaattttgtagtaaaatactcccctgaacgacagcgttctcttcgtcctcatcatgatgcttctacatttaccataaacattgcacttaataacgtgggagaagactttcagggaggtggttgcaaatttctaaggtacaattgctctattgagtcaccacgaaaaggctggagcttcatgcatcctgggagactcacacatttgcatgaaggacttcctgttaaaaatggaacaagatacattgcagtgtcatttatagatccctaagttatttacttttcattgaattgaaatttattttggrtgaatgactggcatgaacacgtctttgaagttgtggctgagaagatgagaggaatatttaaataacatcaacagaacaacttcactttgggccaaacatttgaaaaactttttataaaaaattgtttgatattkcttaatgtctgctctgagccttaaaacacagattgaagaagaaaagaaagaaaaaacttaaatatttatttctatgctttgttgcctctgagaataatgacaatttatgaatttgtgtttcaaattgataaaatatttaggtacaaataacaagactaataatattttcttatttaaaaaaagcatgggaagatttttatttatcaaaatatagaggaaatgtagacaaaatggatataaatgaaaattaccatgttgtaaaaccttgaaaatcagattctaactggatttgtatgcaactaagtatttttctgaacacctatgcaggtcttatttacagtagttactaagggaacacacaaagaattacacaacgttttcctcaagaaaatggtacaaaacacaaccgaggagcgtatacagttgaaaacatttttgttttgattggaaggcagattattttatattagtattaaaaatcaaaccctatgtttctttcagatgaatcttccaaagtggattatattaagcaggtattagatttaggaaaacctttccatttcttaaagtattatcaagtgtcaagatcagcaagtgtccttaagtcaaacaggttttttttgttgttgtttttgctttgtttccttttttagaaagttctagaaaataggaaaacgaaaaatttcattgagatgagtagtgcatttaattattttttaaaaaactttttaagtacttgaattttatatcaggaaaacaaagttgttgagccttgcttcttccgttttgccctttgtctcgctccttattctttttttggggggagggttatttgcttttttatcttcctggcataatttccattttattcttctgagtgtctatgttaacttccctctatcccgcttataaaaaaattctccaacaaaaatacttgttgacttgatgttttatcacttctctaagtaaggttgaaatatccttattgtagctactgtttttaatgtaaaggttaaacttgaaaagaaattyttaatcmcggkgccaaaattcattttctaacaccatgtgttagaaaattataaaaaataaaataattttagaaagttttgttgttctattattggtgtttatcttccaaagtgaatac

SEQ ID NO: 250 - DNA, 2417 bp, Homo sapiens
ccggctccacccccaagccaggcgaggcaggttccgaggttggaacacctggcgagtcctcggtgtcggtggccggcagtcatctcgcggccgttcaggtgagggggttggaggagtggctcatgagcgaggaagggggagcaggcgggctcccacccggtgctccgtgagatcgaggggagcgggttctgggtgcggatgcacgcgctgggcgggacgctggcagtggtacccgagacggggcggaaggagactggagtgaaggtgggcctaggctaagaattataaggctgtctgcagagatttgaaaaatggcaacaaatgaaagtgtcagcatctttagttcagcatccttggctgtggaatatgtagattcacttttacctgagaatcctctgcaagaaccatttaaaaatgcttggaactatatgttgaataattatacaaagttccagattgcaacatggggatcccttatagttcatgaagccctttatttcttattctgtttacctggatttttatttcaatttataccttatatgaaaaaatacaaaattcaaaaggataagccagagacatgggaaaaccaatggaagtgtttcaaagttcttctctttaatcacttctgtatccagctgcctttgatttgtggaacctattattttacagagtatttcartattccttatgattgggaaagaatgccaagatggtattttcttttggcaagatgctttggttgtgcagtcattgaagatacttggcactattttctgcatagactcttacaccacaaaagaatatacaagtatattcataaagttcatcatgagtttcaggctccatttggaatggaagctgaatatgcacatcctttggagactctaattcttggaactggatttttcattggaatcgtgcttttgtgtgatcatgtaattcttctttgggcatgggtgaccattcgtttattagaaactattgatgtccatagtggttatgatattcctctcaaccctttaaatctgatccctttctatgctggttctcggcatcatgatttccaccacatgaacttcattggaaactatgcttcaacatttacatggtgggatcgaatttttggaacagactctcartataatgcctataatgaaaagaggaagaagtttgagaaaaagactgaataaatatctcacgtaaaccttcctgaaagataaacgttttcctgaattcagaaactagtagctaacattgcttctggagagcagaaataagcatgtcttctggctactaagtgataaraagaacattaacaacctttaattaccttcctagtgggaactttttctactttacctacaagttctatatatgtagaaatgaataaatatatatttaagtacagttttcatgaggaagttttaaaagrccatgttcctaagcttccaagaaggttttggatactagaagtattaatctatggcttttctcccagtaaaaccataggcctgaagttsacattgggtctttaaatcttttagatatatastggtcatttcagaaaattcttcatagtggtattggccttatatttaactttttttttattttttttttgagacraagccacactctgtctccttgkctggagtgtggtggcacagtctcagctcactgcaacctctgcctcccagttcaagcaattcttctgcctcagcctcccaagtagctgggattacaggcacccgccaccacgcccagctaatttttgtatttttgtagagatggggtttcacgatgttggccaggctggtctcaaacttctgacctcaagtgatctgcccaccttggcctcccaaagtgctgggattacaggtgtaagccactgcgcccggcctttttaactttaaacatgttttagaattcacctaaagatcaaaatatcatggattgaacctcatcaattgatagcagtgagtgactgaagcttccaaatcaagaaaagccrgcaccaagaacttccattctaatctagagctgaccagtttgagctgattctctctttgaagagtccttcttgattgcagtgcagtactggcatttctgaatggatgtaagtggagtattttagtctaaaggcttttcaaattacttgaatttttttaaaaattgaggagctttatttctatttacccttccatttttgtrtatcaaatttccattgtcattaaaaactgtatcttgaaactttgtgaactgacttgctgtatttgcactttgagctcttgaaataaatgtgatttttgtgtgattatctggtttccagttttaaacattaactgtcaccttttattcttaaacttgaaagtacagaaatcattaaattattaagttgtacaataaaaggattg

SEQ ID NO: 251 - DNA, 2235 bp, Homo sapiens
ccggctccacccccaagccaggcgaggcaggttccgaggttggaacacctggcgagtcctcggtgtcggtggccggcagtcatctcgcggccgttcagaattataaggctgtctgcagagatttgaaaaatggcaacaaatgaaagtgtcagcatctttagttcagcatccttggctgtggaatatgtagattcacttttacctgagaatcctctgcaagaaccatttaaaaatgcttggaactatatgttgaataattatacaaagttccagattgcaacatggggatcccttatagttcatgaagccctttatttcttattctgtttacctggatttttatttcaatttataccttatatgaaaaaatacaaaattcaaaaggataagccagagacatgggaaaaccaatggaagtgtttcaaagttcttctctttaatcacttctgtatccagctgcctttgatttgtggaacctattattttacagagtatttcartattccttatgattgggaaagaatgccaagatggtattttcttttggcaagatgctttggttgtgcagtcattgaagatacttggcactattttctgcatagactcttacaccacaaaagaatatacaagtatattcataaagttcatcatgagtttcaggctccatttggaatggaagctgaatatgcacatcctttggagactctaattcttggaactggatttttcattggaatcgtgcttttgtgtgatcatgtaattcttctttgggcatgggtgaccattcgtttattagaaactattgatgtccatagtggttatgatattcctctcaaccctttaaatctgatccctttctatgctggttctcggcatcatgatttccaccacatgaacttcattggaaactatgcttcaacatttacatggtgggatcgaatttttggaacagactctcartataatgcctataatgaaaagaggaagaagtttgagaaaaagactgaataaatatctcacgtaaaccttcctgaaagataaacgttttcctgaattcagaaactagtagctaacattgcttctggagagcagaaataagcatgtcttctggctactaagtgataaraagaacattaacaacctttaattaccttcctagtgggaactttttctactttacctacaagttctatatatgtagaaatgaataaatatatatttaagtacagttttcatgaggaagttttaaaagrccatgttcctaagcttccaagaaggttttggatactagaagtattaatctatggcttttctcccagtaaaaccataggcctgaagttsacattgggtctttaaatcttttagatatatastggtcatttcagaaaattcttcatagtggtattggccttatatttaactttttttttattttttttttgagacraagccacactctgtctccttgkctggagtgtggtggcacagtctcagctcactgcaacctctgcctcccagttcaagcaattcttctgcctcagcctcccaagtagctgggattacaggcacccgccaccacgcccagctaatttttgtatttttgtagagatggggtttcacgatgttggccaggctggtctcaaacttctgacctcaagtgatctgcccaccttggcctcccaaagtgctgggattacaggtgtaagccactgcgcccggcctttttaactttaaacatgttttagaattcacctaaagatcaaaatatcatggattgaacctcatcaattgatagcagtgagtgactgaagcttccaaatcaagaaaagccrgcaccaagaacttccattctaatctagagctgaccagtttgagctgattctctctttgaagagtccttcttgattgcagtgcagtactggcatttctgaatggatgtaagtggagtattttagtctaaaggcttttcaaattacttgaatttttttaaaaattgaggagctttatttctatttacccttccatttttgtrtatcaaatttccattgtcattaaaaactgtatcttgaaactttgtgaactgacttgctgtatttgcactttgagctcttgaaataaatgtgatttttgtgtgattatctggtttccagttttaaacattaactgtcaccttttattcttaaacttgaaagtacagaaatcattaaattattaagttgtacaataaaaggattg

SEQ ID NO: 252 - DNA, 1862 bp, Homo sapiens
ggaggcagaggcctctggggtgggatcgcgggccgtaagtggctgtggagctggggtcactgcgcggtgggaccatggcctcggagaagccgctggcggcagtcacttgtacagcgccggtcaacatcgcggtcatcaagtactggggcaagcgcgatgaagagctggttctgcccatcaactcctccctgagcgtcactctgcaccaggaccagttaaaaaccaccacaacagccgtcatcagcaaggacttcaccgaggaccggatttggctgaatggccgggaggaggatgtggggcagccgmggctgcaggcctgcctgcgggagatccgctgcctggcccggaagcggaggaactcacgggatggggacccgctgccctccagcctcagctgcaaggtgcacgtggcatcggtgaacaacttccccacggctgcgggcctggcctcctcagcggcgggctatgcctgcctagcctacaccctggcccgtgtctacggcgtggagagtgacctctcagaagtggctcgccggggctcaggcagcgcctgccggagcctgtatgggggctttgtggagtggcagatgggagagcaggccgacgggaaggacagcatcgctcggcaagtggcccccgagtcacactggcctgaactccgcgtgctcatccttgtggtgagcgctgagaagaagctgacaggcagtaccgtgggcatgcgggccagtgtggagaccagccccctgcttcggttccgggccgagtccgtggtgcccgcgcgcatggcggagatggcccgctgcatccgggagcgagacttccccagcttcgcccagctgaccatgaaggacagcaaccagttccacgccacctgcctcgacaccttcccgcccatctcttacctcmatgccatctcctggcgcatcatccacctggtgcaccgcttcaacgcccaccacggggacaccaaggtggcgtacacctttgacgcgggccccaatgccgtgatcttcaccctggacgacactgtggctgagtttgtggctgctgtgtkgcacggctttcccccaggctcraatggagacacgtttctgaaggggctgcaggtgaggccggcccctctctcagctgagcttcaggctgcgctggccatggagccgacccccggtggggtcaaatacatcattgtcactcaggtggggccrgggcctcaaatcctggatgacccctgcgcccacctcctgggtcctgacggcctgccgaagccagctgcctgactgcctcagcagggascgcatgcygcttggagaaggggtggcctcgccggagctagggagcggatgtrgtgggctggccggactcctgggacatgtgggtggtggcttgaccccgggcccatgggcagcttgctgtggggcagtgcagggagtcctgcggccgcccaggtgtcaggagaggtccccgccgagtgcttcagctgccctaagctgcaccagcgctttgccaagatgggatggggagggggtatgagaactggcagagcctcggtgcagcagggctgaagggctttctcaccccagctctggctatgcccagttctctgagaaaggagctcagtggggaggtggtccctccagcggaccagggaaggggtcacygtgctgggagcagcctccttgggcctcaggaaaccaccaagtgcctcggatggtggctgcccacggcgcttytgctgagaccctgcccccggcccaggtgtctcggagggtggctgcccacggcctgggtgtggctggaatggtggcaggagtgggcaccagtgcggccccggtggccatggggaataaaccagcattrctgcc

SEQ ID NO: 253 - DNA, 2119 bp, Homo sapiens
ggaggcagaggcctctggggtgggatcgcgggccgtaagtggctgtggagctggggtcactgcgcggtgggaccatggcctcggagaagccgctggcggcagtcacttgtacagcgccggtcaacatcgcggtcatcaagtactggggcaagcgcgatgaagagctggttctgcccatcaactcctccctgagcgtcactctgcaccaggaccagttaaaaaccaccacaacagccgtcatcagcaaggacttcaccgaggaccggatttggctgaatggccgggaggaggatgtggggcagccgmggctgcaggcctgcctgcgggagatccgctgcctggcccggaagcggaggaactcacgggatggggacccgctgccctccagcctcagctgcaaggtgcacgtggcatcggtgaacaacttccccacggctgcgggcctggcctcctcagcggcgggctatgcctgcctaggtaccttttgttgcccttgtcgcaggccgcaagctctgcaggccgtgaacagagagtgtccgagagtggaastagcggaggtgggrgacagacggctgggccggtgaatgctggcctcaaaggctgatggcccagaagccctgtcatctggaaatccccatttgccgtggggtgtgggacgttcctggggcggtgagctgtcagggagcacagcgcaggcagctctgaggaccctccctgaatccgcatgcctgcagcctacaccctggcccgtgtctacggcgtggagagtgacctctcagaagtggctcgccggggctcaggcagcgcctgccggagcctgtatgggggctttgtggagtggcagatgggagagcaggccgacgggaaggacagcatcgctcggcaagtggcccccgagtcacactggcctgaactccgcgtgctcatccttgtggtgagcgctgagaagaagctgacaggcagtaccgtgggcatgcgggccagtgtggagaccagccccctgcttcggttccgggccgagtccgtggtgcccgcgcgcatggcggagatggcccgctgcatccgggagcgagacttccccagcttcgcccagctgaccatgaaggacagcaaccagttccacgccacctgcctcgacaccttcccgcccatctcttacctcmatgccatctcctggcgcatcatccacctggtgcaccgcttcaacgcccaccacggggacaccaaggtggcgtacacctttgacgcgggccccaatgccgtgatcttcaccctggacgacactgtggctgagtttgtggctgctgtgtkgcacggctttcccccaggctcraatggagacacgtttctgaaggggctgcaggtgaggccggcccctctctcagctgagcttcaggctgcgctggccatggagccgacccccggtggggtcaaatacatcattgtcactcaggtggggccrgggcctcaaatcctggatgacccctgcgcccacctcctgggtcctgacggcctgccgaagccagctgcctgactgcctcagcagggascgcatgcygcttggagaaggggtggcctcgccggagctagggagcggatgtrgtgggctggccggactcctgggacatgtgggtggtggcttgaccccgggcccatgggcagcttgctgtggggcagtgcagggagtcctgcggccgcccaggtgtcaggagaggtccccgccgagtgcttcagctgccctaagctgcaccagcgctttgccaagatgggatggggagggggtatgagaactggcagagcctcggtgcagcagggctgaagggctttctcaccccagctctggctatgcccagttctctgagaaaggagctcagtggggaggtggtccctccagcggaccagggaaggggtcacygtgctgggagcagcctccttgggcctcaggaaaccaccaagtgcctcggatggtggctgcccacggcgcttytgctgagaccctgcccccggcccaggtgtctcggagggtggctgcccacggcctgggtgtggctggaatggtggcaggagtgggcaccagtgcggccccggtggccatggggaataaaccagcattrctgcc

SEQ ID NO: 254 - DNA, 2319 bp, Homo sapiens
ggaggcagaggcctctggggtgggatcgcgggccgtaagtggctgtggagctggggtcactgcgcggtgggaccatggcctcggagaagccgctggcggcagtcacttgtacagcgccggtcaacatcgcggtcatcaagtactggggcaagcgcgatgaagagctggttctgcccatcaactcctccctgagcgtcactctgcaccaggaccagttaaaaaccaccacaacagccgtcatcagcaaggacttcaccgaggaccggatttggctgaatggccgggaggaggatgtggggcagccgmggctgcaggcctgcctgcgggagatccgctgcctggcccggaagcggaggaactcacgggatggggacccgctgccctccagcctcagctgcaaggtgcacgtggcatcggtgaacaacttccccacggctgcgggcctggcctcctcagcggcgggctatgcctgcctaggggtgacgcttcctggcccacctgggctcctgygccttccctgaaccaccctcggtgaccagggtgggtgaccagacctggagcctacaccctggcccgtgtctacggcgtggagagtgacctctcagaagtggctcgccggggctcaggcagcgcctgccggagcctgtatgggggctttgtggagtggcagatgggagagcaggccgacgggaaggacagcatcgctcggcaagtggcccccgagtcacactggcctgaactccgcgtgctcatccttgtggtgagtggggtggggcgggtggagcagcagcccggtggcctctgtccctagtcagggctgctgccgggagcaggagcgaaggcgtccatccaggctttgcttggctcctggggtcagcrggggctgaaggaacagaagcgtggttgagtgctcaggaaccgctcccatgcggcgggygccaccacccgctgggatctggaagttgcccctgcgtcacccctgctgtggccgggaggcctctgtggtcaggcaggtggcactgactcccacccccgctgcctgcattggctgagggagggccgagtgtttgaggctgaggtccttggggctggccccctgcagggtgtggcccaggctgtctctccctcgtgcaggtgagcgctgagaagaagctgacaggcagtaccgtgggcatgcgggccagtgtggagaccagccccctgcttcggttccgggccgagtccgtggtgcccgcgcgcatggcggagatggcccgctgcatccgggagcgagacttccccagcttcgcccagctgaccatgaaggacagcaaccagttccacgccacctgcctcgacaccttcccgcccatctcttacctcmatgccatctcctggcgcatcatccacctggtgcaccgcttcaacgcccaccacggggacaccaaggtggcgtacacctttgacgcgggccccaatgccgtgatcttcaccctggacgacactgtggctgagtttgtggctgctgtgtkgcacggctttcccccaggctcraatggagacacgtttctgaaggggctgcaggtgaggccggcccctctctcagctgagcttcaggctgcgctggccatggagccgacccccggtggggtcaaatacatcattgtcactcaggtggggccrgggcctcaaatcctggatgacccctgcgcccacctcctgggtcctgacggcctgccgaagccagctgcctgactgcctcagcagggascgcatgcygcttggagaaggggtggcctcgccggagctagggagcggatgtrgtgggctggccggactcctgggacatgtgggtggtggcttgaccccgggcccatgggcagcttgctgtggggcagtgcagggagtcctgcggccgcccaggtgtcaggagaggtccccgccgagtgcttcagctgccctaagctgcaccagcgctttgccaagatgggatggggagggggtatgagaactggcagagcctcggtgcagcagggctgaagggctttctcaccccagctctggctatgcccagttctctgagaaaggagctcagtggggaggtggtccctccagcggaccagggaaggggtcacygtgctgggagcagcctccttgggcctcaggaaaccaccaagtgcctcggatggtggctgcccacggcgcttytgctgagaccctgcccccggcccaggtgtctcggagggtggctgcccacggcctgggtgtggctggaatggtggcaggagtgggcaccagtgcggccccggtggccatggggaataaaccagcattrctgcc

SEQ ID NO: 255 - DNA, 2789 bp, Homo sapiens
tccttagcgctggccgcgggccgcctctgcggcagcgctagtcgccttctccgaatcggctccgcacagctaggagaaaagatgttcactgtgctgacccgccaaccatgtgagcaagcaggcctcaaggccctctaccgaactccaaccatcattgccttggtggtcttgcttgtgagtattgtggtacttgtgagtatcactgtcatccagatccacaagcaagaggtcctccctccaggactgaagtatggtattgtgctggatgccgggtcttcaagaaccacagtctacgtgtatcaatggccagcagaaaaagagaataataccggagtggtcagtcaaaccttcaaatgtagtgtgaaaggctctggaatctccagctatggaaataacccccaagatgtccccagagcctttgaggagtgtatgcaaaaagtcaaggggcaggttccatcccacctccacggatccacccccattcacctgggagccacggctgggatgcgcttgctgaggttgcaaaatgaaacagcagctaatgaagtccttgaaagcatccaaagctacttcaagtcccagccctttgactttaggggtgctcaaatcatttctgggcaagaagaaggggtatatggatggattacagccaactatttaatgggaaatttcctggagaagaacctgtggcacatgtgggtgcacccgcatggagtggaaaccacgggtgccctggacttaggtggtgcctccacccaaatatccttcgtggcaggagagaagatggatctgaacaccagcgacatcatgcaggtgtccctgtatggctacgtatacacgctctacacacacagcttccagtgctatggccrgaatgaggctgagaagaagtttctggcaatgctcctgcagaattctcctaccaaaaaccatctcaccaatccctgttaccctcgggattatagcatcagcttcaccatgggccatgtatttgatagcctgtgcactgtggaccagaggccagaaagttataaccccaaygatgtcatcacttttgaaggaactggggacccatctctgtgtaaggagaaggtggcttccatatttgacttcaaagcttgccatgatcaagaaacctgttcttttgatggggtttatcagccaaagattaaagggccatttgtggcttttgcaggattctactacacagccagtgctttaaatctttcaggtagcttttccctggacaccttcaactccagcacctggaatttctgctcacagaattggagtcagctcccactgctgctccccaaatttgatgaggtatatgcccgctcttactgcttctcagccaactacatctaccacttgtttgtgaacggttacaaattcacagakgagacttggccccaaatacactttgaaaaagaagtggggaatagcagcatagcctggtctcttggctacatgctcagcctgaccaaccagatcccagctgaaagccctctgatccgtctgcccatagaaccacctgtctttgtgggcaccctcgctttcttcacagyggcagccttgctgtgtctggcatttyttgcatacctgtgttcagcaaccagaagaaagaggcactccgagcatgcctttgaccatgcagtggattctgactgagccttcaaagcagctcctggagtccaatggctgcttagagtcagcctgggtrgcaccaggcaatgcaggtgaagtggctgccttcaggaaatacaactaactaaaatcaaacacctaggtcacgtgcctctcaaatactgatttctgccacagcacctcttgaggcatcccttggctattctgtgcatattgttcttcagagacctcactacccacatgctgatctattggggaacagagaagagacaggccacgaaggtcaggctctttatattaagttccccagaggaagagtaagttgagaaggtatcagtttaatgttgaagaattgacctcagggctcagtttccatttccctccctcagtattcttcctggcaagatacccattaagcatttcgccaatcagaatctcattttatagtttttcccattggtctttaactaagactttcttgtagcaatctcgtaagcagtgaaccccctcagatcagtagaatatagtatctgggggagaagacttacttccttcagggcagcagccacagccaggcttctgtcatacaggtagatcccgaagcacagagacataaaaaaggtctcccagaaaactatagaccattctccaagtggaattcccacttagggctctggtcactagattgcaacctgtgtgtttgtcatcatcctcatctcaccattgtattgctatgccctcccataaaaacacattgatccctagcaagattattgcattccagattttactgcctttgctaggcttttgcttagcaaagggctgactttccattgttatcatggtgtatatatttttgtcaccattcccacaagtatacttgatgttgtcatagaacgaacatcctactctatgatttactaaccaattactttcccagatcatagacctctctgcatagtagtcataggtcttgactttggggaaagaaaaggaagctgcaggaatatttatctccaaagtcgaatgagaaagaactccagcaaatccaatggctacaaactaaaaatcagcattatttcatattgctgtttcttagctgaatatggaataaagaactattattttattttgacttgcaa

SEQ ID NO: 256 - DNA, 4464 bp, Homo sapiens
acaccccctccgccccgcgcgccggcgattccgagcctacgacgcctccgctagagcccgcggggctgcgccgactcctgctctggaggggttgcgggtacctgatggccacagagggctctaggaggccgagcgtgtaagcggggtgggcgccatggaggcagagcagcggccggcggcgggggccagcgaaggggcgacccctggactggaggcggtgcctcccgttgctcccccgcctgcgaccgcggcctcaggtccgatccccaaatctgggcctgagcctaagaggaggcaccttgggacgctgctccagcctacggtcaacaagttctcccttcgggtgttcggcagccacaaagcagtggaaatcgagcaggagcgggtgaagtcagcgggggcctggatcatccacccctacagcgacttccggttttactgggacctgatcatgctgctgctgatggtggggaacctcatcgtcctgcctgtgggcatcaccttcttcaaggaggagaactccccgccttggatcgtcttcaacgtattgtctgatactttcttcctactggatctggtgctcaacttccgaacgggcatcgtggtggaggagggtgctgagatcctgctggcaccgcgggccatccgcacgcgctacctgcgcacctggttcctggttgacctcatctcttctatccctgtggattacatcttcctagtggtggagctggagccacggttggacgctgaggtctacaaaacggcacgggccctacgcatcgttcgcttcaccaagatcctaagcctgctgaggctgctccgcctctcccgcctcatccgctacatacaccagtgggaggagatctttcacatgacctatgacctggccagtgctgtggttcgcatcttcaacctcattgggatgatgctgctgctatgtcactgggatggctgtctgcagttcctggtgcccatgctgcaggacttccctcccgactgctgggtctccatcaaccacatggtgaaccactcgtggggccgccagtattcccatgccctgttcaaggccatgagccacatgctgtgcattggctatgggcagcaggcacctgtaggcatgcccgacgtctggctcaccatgctcagcatgatcrtaggtgccacatgctacgccatgttcatcggccatgccacggcactcatccagtccctggactcttcccggcgtcagtaccaggagaagtacaagcaggtggagcagtacatgtccttccacaagctgccagcagacacgcggcagcgcatccacgagtactatgagcaccgctaccagggcaagatgttcgatgaggaaagcatcctgggcgagctgagcgagccgcttcgcgaggagatcattaacttcacctgtcggggcctggtggcccacatgccgctgtttgcccatgccgaccccagcttcgtcactgcagttctcaccaagctkcgctttgaggtcttccagccgggggatctcgtggtgcgtgagggctccgtggggaggaagatgtacttcatccagcatgggctgctcagtgtgctggcccgcggcgcccgggacacacgcctcaccgatggatcctactttggggagatctgcctgctaactaggggccggcgcacagccagtgttcgggctgacacctactgccgcctttactcactcagcgtggaccatttcaatgctgtgcttgaggagttccccatgatgcgccgggccttygagactgtggccatggatcggctgctccgcatcggcaagaagaattccatactgcagcggaagcgctccgagccaagtccaggcagcagtggtggcatcatggagcagcacttggtgcaacatgacagagacatggctcggggtgttcggggtcgggccccgagcacaggagctcagcttagtggaaagccagtactgtgggagccactggtacatgcgccccttcaggcagctgctgtgacctccaatgtggccattgccctgactcatcagcggggccytctgcccctctcccctgactctccagccaccctccttgctcgctctgcttggcgctcagcaggctctccagcttccccgctggtgcccgtccgagctggcccatgggcatccacctcccgcctgcccgccccacctgcccgaaccctgcacgccagcctatcccgggcagggcgctcccaggtctccctgctgggtccccctccaggaggaggtggacggcggctaggacctcggggccgcccactctcagcctcccaaccctctctgcctcagcgggcaacaggcgatggctctcctgggcgtaagggatcaggaagtgagcggctgcctccctcagggctcctggccaaacctccaaggacagcccagccccccaggccaccagtgcctgagccagccacaccccggggtctccagctttctgccaacatgtaaaacctttgagtacatccagccttagttcttggggtgcagtagtatgtacccaagggcagatgcctcttggggaaggccatggggacctgaaacattgccccatggaaatgtcgaccctgtgcggacattccgcatactgccatgaagacggtctctgtgtcctcagctcaagaatcctgtagcttgtcccatcataatccattcacccgttcatcatgtgtactgagcagctaccatgttcaaggtaatatgccaggcgctgtatgtctccactgccaagtagaagtgactcaaaaccctctgacaaggatattcccttggctatggtcctgccaggtgcaggcccaggcccatgaccccacctttactaagcacaagtacttgccactgccatcactgccaagtaactagatgtctctgtttccctgccaatgatcctgcaggttctgcccggtctggttatcttcctgttcctgtagcatagccaggcactgccartcayctgtgcccccattgctgtcagcagatgtcttgggtcctgagtgtgggtatccacttttacccgctcactgccacctgtggacactctgtgtctaccctctgagtgggaacatacttctaagttccctgcagtctctgtcctgtggtagaccatctttttgtaaactgcgagcttcctcttccctgtaccctctgccccagtcgtgaccccctaaaagttaaggggtagttggcacctccttattaatatgccagcctagatcccccccggtggaggggcaaatggctgaatccttgtgtgatatttttttcttcgcttgtttatttattcatttatttaattgtatttattcatttactaactttatgtgttaccaattaattttgtttacccattcctttatccatccctcccctccttttcaggtaaggagacaggaggagtaggaggaggcagggcctctccatgccagcctctgtggtccttgcccaaacccatcagcgcaatacttgaaccttctcccaggtaggggcaggaggagccacatgagagagggagaaggaccgygtttacctttagagttttgttttgttttttccttctgagtttgctgttggtgcaggaataagggaaaggcccaaggtatccaagcctggggaagggcaggccagccagcacctctgccttctcagggacaagagtagtcctttaccaccctcactctgcctgtcccctctcctactctacagcattaaagactgtgggaccaggaccctaagtctcctttccttctgggtggggagttctggggttcttggtgtgtgggagaagttttataattgcttccaaacagctgggtttaaatataaaatagacacactcatttttggctcttggtttgtgtgtgggaacaacatgagtgggaaggaatttctgggtgcagaaggaagcagccggggatttgaccaagcagggtatcaggcaggcatgagagcagccaggacagtggtctacaagcccagcacggaggttgtgaagacagtgacaaaatcagctgcccagccctcacttctccccagcatccatcccacccagttttcccaaaagcgtggactttcatgtaactgttagtcaccatgaaggggtagcctgccctggcacgagatgcccagattatcatgagggctacatatgagaatgggagactgtggacaagattgccctgtctcccctctcccccaccccaagggatgggatgcctggggttatggaattaaccagccaaactgggattaaagactcaaggcatcttagggcctgctgagcagattggatgcagrgaatgtacaattggtgctgttgggtggccagtgcataattggacacagactttcaggacctgtgtgaaatggagatggggaaggggcaacctcgaaggggctagatgacagttatagtctcagataggcctcaggtagggagg

SEQ ID NO: 257 - DNA, 3321 bp, Homo sapiens
aaaaaaaaaaaaagaaagagaaaagaaaagaaagagagagagagagaaggaaggaaagaaagaaagaaaaagaaaaagaaagaaagaaagaaagaggaagaaagaaaatggatcgtcttcaacgtattgtctgatactttcttcctactggatctggtgctcaacttccgaacgggcatcgtggtggaggagggtgctgagatcctgctggcaccgcgggccatccgcacgcgctacctgcgcacctggttcctggttgacctcatctcttctatccctgtggattacatcttcctagtggtggagctggagccacggttggacgctgaggtctacaaaacggcacgggccctacgcatcgttcgcttcaccaagatcctaagcctgctgaggctgctccgcctctcccgcctcatccgctacatacaccatgctgtggttcgcatcttcaacctcattgggatgatgctgctgctatgtcactgggatggctgtctgcagttcctggtgcccatgctgcaggacttccctcccgactgctgggtctccatcaaccacatggtgaaccactcgtggggccgccagtattcccatgccctgttcaaggccatgagccacatgctgtgcattggctatgggcagcaggcacctgtaggcatgcccgacgtctggctcaccatgctcagcatgatcrtaggtgccacatgctacgccatgttcatcggccatgccacggcactcatccagtccctggactcttcccggcgtcagtaccaggagaagtacaagcaggtggagcagtacatgtccttccacaagctgccagcagacacgcggcagcgcatccacgagtactatgagcaccgctaccagggcaagatgttcgatgaggaaagcatcctgggcgagctgagcgagccgcttcgcgaggagatcattaacttcacctgtcggggcctggtggcccacatgccgctgtttgcccatgccgaccccagcttcgtcactgcagttctcaccaagctkcgctttgaggtcttccagccgggggatctcgtggtgcgtgagggctccgtggggaggaagatgtacttcatccagcatgggctgctcagtgtgctggcccgcggcgcccgggacacacgcctcaccgatggatcctactttggggagatctgcctgctaactaggggccggcgcacagccagtgttcgggctgacacctactgccgcctttactcactcagcgtggaccatttcaatgctgtgcttgaggagttccccatgatgcgccgggccttygagactgtggccatggatcggctgctccgcatcggcaagaagaattccatactgcagcggaagcgctccgagccaagtccaggcagcagtggtggcatcatggagcagcacttggtgcaacatgacagagacatggctcggggtgttcggggtcgggccccgagcacaggagctcagcttagtggaaagccagtactgtgggagccactggtacatgcgccccttcaggcagctgctgtgacctccaatgtggccattgccctgactcatcagcggggccytctgcccctctcccctgactctccagccaccctccttgctcgctctgcttggcgctcagcaggctctccagcttccccgctggtgcccgtccgagctggcccatgggcatccacctcccgcctgcccgccccacctgcccgaaccctgcacgccagcctatcccgggcagggcgctcccaggtctccctgctgggtccccctccaggaggaggtggacggcggctaggacctcggggccgcccactctcagcctcccaaccctctctgcctcagcgggcaacaggcgatggctctcctgggcgtaagggatcaggaagtgagcggctgcctccctcagggctcctggccaaacctccaaggacagcccagccccccaggccaccagtgcctgagccagccacaccccggggtctccagctttctgccaacatgtaaaacctttgagtacatccagccttagttcttggggtgcagtagtatgtacccaagggcagatgcctcttggggaaggccatggggacctgaaacattgccccatggaaatgtcgaccctgtgcggacattccgcatactgccatgaagacggtctctgtgtcctcagctcaagaatcctgtagcttgtcccatcataatccattcacccgttcatcatgtgtactgagcagctaccatgttcaaggtaaggagacaggaggagtaggaggaggcagggcctctccatgccagcctctgtggtccttgcccaaacccatcagcgcaatacttgaaccttctcccaggtaggggcaggaggagccacatgagagagggagaaggaccgygtttacctttagagttttgttttgttttttccttctgagtttgctgttggtgcaggaataagggaaaggcccaaggtatccaagcctggggaagggcaggccagccagcacctctgccttctcagggacaagagtagtcctttaccaccctcactctgcctgtcccctctcctactctacagcattaaagactgtgggaccaggaccctaagtctcctttccttctgggtggggagttctggggttcttggtgtgtgggagaagttttataattgcttccaaacagctgggtttaaatataaaatagacacactcatttttggctcttggtttgtgtgtgggaacaacatgagtgggaaggaatttctgggtgcagaaggaagcagccggggatttgaccaagcagggtatcaggcaggcatgagagcagccaggacagtggtctacaagcccagcacggaggttgtgaagacagtgacaaaatcagctgcccagccctcacttctccccagcatccatcccacccagttttcccaaaagcgtggactttcatgtaactgttagtcaccatgaaggggtagcctgccctggcacgagatgcccagattatcatgagggctacatatgagaatgggagactgtggacaagattgccctgtctcccctctcccccaccccaagggatgggatgcctggggttatggaattaaccagccaaactgggattaaagactcaaggcatcttagggcctgctgagcagattggatgcagrgaatgtacaattggtgctgttgggtggccagtgcataattggacacagactttcaggacctgtgtgaaatggagatggggaaggggcaacctcgaaggggctagatgacagttatagtctcagataggcctcaggtagggagg

SEQ ID NO: 258 - DNA, 3823 bp, Homo sapiens
acaccccctccgccccgcgcgccggcgattccgagcctacgacgcctccgctagagcccgcggggctgcgccgactcctgctctggaggggttgcgggtacctgatggccacagagggctctaggaggccgagcgtgtaagcggggtgggcgccatggaggcagagcagcggccggcggcgggggccagcgaaggggcgacccctggactggaggcggtgcctcccgttgctcccccgcctgcgaccgcggcctcaggtccgatccccaaatctgggcctgagcctaagaggaggcaccttgggacgctgctccagcctacggtcaacaagttctcccttcgggtgttcggcagccacaaagcagtggaaatcgagcaggagcgggtgaagtcagcgggggcctggatcatccacccctacagcgacttccggttttactgggacctgatcatgctgctgctgatggtggggaacctcatcgtcctgcctgtgggcatcaccttcttcaaggaggagaactccccgccttggatcgtcttcaacgtattgtctgatactttcttcctactggatctggtgctcaacttccgaacgggcatcgtggtggaggagggtgctgagatcctgctggcaccgcgggccatccgcacgcgctacctgcgcacctggttcctggttgacctcatctcttctatccctgtggattacatcttcctagtggtggagctggagccacggttggacgctgaggtctacaaaacggcacgggccctacgcatcgttcgcttcaccaagatcctaagcctgctgaggctgctccgcctctcccgcctcatccgctacatacaccagtgggaggagatctttcacatgacctatgacctggccagtgctgtggttcgcatcttcaacctcattgggatgatgctgctgctatgtcactgggatggctgtctgcagttcctggtgcccatgctgcaggacttccctcccgactgctgggtctccatcaaccacatggtgaaccactcgtggggccgccagtattcccatgccctgttcaaggccatgagccacatgctgtgcattggctatgggcagcaggcacctgtaggcatgcccgacgtctggctcaccatgctcagcatgatcrtaggtgccacatgctacgccatgttcatcggccatgccacggcactcatccagtccctggactcttcccggcgtcagtaccaggagaagtacaagcaggtggagcagtacatgtccttccacaagctgccagcagacacgcggcagcgcatccacgagtactatgagcaccgctaccagggcaagatgttcgatgaggaaagcatcctgggcgagctgagcgagccgcttcgcgaggagatcattaacttcacctgtcggggcctggtggcccacatgccgctgtttgcccatgccgaccccagcttcgtcactgcagttctcaccaagctkcgctttgaggtcttccagccgggggatctcgtggtgcgtgagggctccgtggggaggaagatgtacttcatccagcatgggctgctcagtgtgctggcccgcggcgcccgggacacacgcctcaccgatggatcctactttggggagatctgcctgctaactaggggccggcgcacagccagtgttcgggctgacacctactgccgcctttactcactcagcgtggaccatttcaatgctgtgcttgaggagttccccatgatgcgccgggccttygagactgtggccatggatcggctgctccgcatcggcaagaagaattccatactgcagcggaagcgctccgagccaagtccaggcagcagtggtggcatcatggagcagcacttggtgcaacatgacagagacatggctcggggtgttcggggtcgggccccgagcacaggagctcagcttagtggaaagccagtactgtgggagccactggtacatgcgccccttcaggcagctgctgtgacctccaatgtggccattgccctgactcatcagcggggccytctgcccctctcccctgactctccagccaccctccttgctcgctctgcttggcgctcagcaggctctccagcttccccgctggtgcccgtccgagctggcccatgggcatccacctcccgcctgcccgccccacctgcccgaaccctgcacgccagcctatcccgggcagggcgctcccaggtctccctgctgggtccccctccaggaggaggtggacggcggctaggacctcggggccgcccactctcagcctcccaaccctctctgcctcagcgggcaacaggcgatggctctcctgggcgtaagggatcaggaagtgagcggctgcctccctcagggctcctggccaaacctccaaggacagcccagccccccaggccaccagtgcctgagccagccacaccccggggtctccagctttctgccaacatgtaaaacctttgagtacatccagccttagttcttggggtgcagtagtatgtacccaagggcagatgcctcttggggaaggccatggggacctgaaacattgccccatggaaatgtcgaccctgtgcggacattccgcatactgccatgaagacggtctctgtgtcctcagctcaagaatcctgtagcttgtcccatcataatccattcacccgttcatcatgtgtactgagcagctaccatgttcaaggtaaggagacaggaggagtaggaggaggcagggcctctccatgccagcctctgtggtccttgcccaaacccatcagcgcaatacttgaaccttctcccaggtaggggcaggaggagccacatgagagagggagaaggaccgygtttacctttagagttttgttttgttttttccttctgagtttgctgttggtgcaggaataagggaaaggcccaaggtatccaagcctggggaagggcaggccagccagcacctctgccttctcagggacaagagtagtcctttaccaccctcactctgcctgtcccctctcctactctacagcattaaagactgtgggaccaggaccctaagtctcctttccttctgggtggggagttctggggttcttggtgtgtgggagaagttttataattgcttccaaacagctgggtttaaatataaaatagacacactcatttttggctcttggtttgtgtgtgggaacaacatgagtgggaaggaatttctgggtgcagaaggaagcagccggggatttgaccaagcagggtatcaggcaggcatgagagcagccaggacagtggtctacaagcccagcacggaggttgtgaagacagtgacaaaatcagctgcccagccctcacttctccccagcatccatcccacccagttttcccaaaagcgtggactttcatgtaactgttagtcaccatgaaggggtagcctgccctggcacgagatgcccagattatcatgagggctacatatgagaatgggagactgtggacaagattgccctgtctcccctctcccccaccccaagggatgggatgcctggggttatggaattaaccagccaaactgggattaaagactcaaggcatcttagggcctgctgagcagattggatgcagrgaatgtacaattggtgctgttgggtggccagtgcataattggacacagactttcaggacctgtgtgaaatggagatggggaaggggcaacctcgaaggggctagatgacagttatagtctcagataggcctcaggtagggagggtctccctctctgtgggtctgctccacactgttgggttgtca

SEQ ID NO: 259 - DNA, 5162 bp, Homo sapiens
acaccccctccgccccgcgcgccggcgattccgagcctacgacgcctccgctagagcccgcggggctgcgccgactcctgctctggaggggttgcgggtacctgatggccacagagggctctaggaggccgagcgtgtaagcggggtgggcgccatggaggcagagcagcggccggcggcgggggccagcgaaggggcgacccctggactggaggcggtgcctcccgttgctcccccgcctgcgaccgcggcctcaggtccgatccccaaatctgggcctgagcctaagaggaggcaccttgggacgctgctccagcctacggtcaacaagttctcccttcgggtgttcggcagccacaaagcagtggaaatcgagcaggagcgggtgaagtcagcgggggcctggatcatccacccctacagcgacttccggttttactgggacctgatcatgctgctgctgatggtggggaacctcatcgtcctgcctgtgggcatcaccttcttcaaggaggagaactccccgccttggatcgtcttcaacgtattgtctgatactttcttcctactggatctggtgctcaacttccgaacgggcatcgtggtggaggagggtgctgagatcctgctggcaccgcgggccatccgcacgcgctacctgcgcacctggttcctggttgacctcatctcttctatccctgtggattacatcttcctagtggtggagctggagccacggttggacgctgaggtctacaaaacggcacgggccctacgcatcgttcgcttcaccaagatcctaagcctgctgaggctgctccgcctctcccgcctcatccgctacatacaccagtgggaggagatctttcacatgacctatgacctggccagtgctgtggttcgcatcttcaacctcattgggatgatgctgctgctatgtcactgggatggctgtctgcagttcctggtgcccatgctgcaggacttccctcccgactgctgggtctccatcaaccacatggtggtgagaagtccccacagctctgcctttcctgggccttcttagggctcttctgcctgagtagcagggatggccacagggagcaggaggtgggagatgatcacaacagaaaataggagcgaggaggtggggaggagggaggaaaggggaaggagacccagaagaagtgctcgtgtgttggagggagcaggcaaaggaagggtacctacccggaagctgaggcccccaagttgcaatagaggacccttttgcctcagggccccccagaaccaaacttaagtgcctgccaggaggaaggcctgcagtagaaggggcagacagaaagaccaaagaaggaaaaggggcaggcagagaatgaggctccgaggggcccatgcccagctctgcaatatactctgcccctcagaaccactcgtggggccgccagtattcccatgccctgttcaaggccatgagccacatgctgtgcattggctatgggcagcaggcacctgtaggcatgcccgacgtctggctcaccatgctcagcatgatcrtaggtgccacatgctacgccatgttcatcggccatgccacggcactcatccagtccctggactcttcccggcgtcagtaccaggagaaggtcagcagggacaggagagggaggtgtggcatggaggggtgttggagactgggtagcctgacttgaggcccattctgatgtgtgcccctgttgcgtctctgtttcctttcctgccctgtgtccatttgttccctgcccctgcatgtaccttttccttgtttgaacctatgcctgtgcttggcccctctgctgtccacgcctgggttttcctatgactgtgctctgtgtcttcccggtatccatcattatccgtattcctctgtggccctgtgtatccatgtctggttccacgtttcacccctttgagtttgacctgtgtctctgaccttccgcacacacaccccactgtgccggccccaaatctctccctctgtcctcttgcccctggcaatgggctggccctccagtacaagcaggtggagcagtacatgtccttccacaagctgccagcagacacgcggcagcgcatccacgagtactatgagcaccgctaccagggcaagatgttcgatgaggaaagcatcctgggcgagctgagcgagccgcttcgcgaggagatcattaacttcacctgtcggggcctggtggcccacatgccgctgtttgcccatgccgaccccagcttcgtcactgcagttctcaccaagctkcgctttgaggtcttccagccgggggatctcgtgagatctgcctgctaactaggggccggcgcacagccagtgttcgggctgacacctactgccgcctttactcactcagcgtggaccatttcaatgctgtgcttgaggagttccccatgatgcgccgggccttygagactgtggccatggatcggctgctccgcatcggcaagaagaattccatactgcagcggaagcgctccgagccaagtccaggcagcagtggtggcatcatggagcagcacttggtgcaacatgacagagacatggctcggggtgttcggggtcgggccccgagcacaggagctcagcttagtggaaagccagtactgtgggagccactggtacatgcgccccttcaggcagctgctgtgacctccaatgtggccattgccctgactcatcagcggggccytctgcccctctcccctgactctccagccaccctccttgctcgctctgcttggcgctcagcaggctctccagcttccccgctggtgcccgtccgagctggcccatgggcatccacctcccgcctgcccgccccacctgcccgaaccctgcacgccagcctatcccgggcagggcgctcccaggtctccctgctgggtccccctccaggaggaggtggacggcggctaggacctcggggccgcccactctcagcctcccaaccctctctgcctcagcgggcaacaggcgatggctctcctgggcgtaagggatcaggaagtgagcggctgcctccctcagggctcctggccaaacctccaaggacagcccagccccccaggccaccagtgcctgagccagccacaccccggggtctccagctttctgccaacatgtaaaacctttgagtacatccagccttagttcttggggtgcagtagtatgtacccaagggcagatgcctcttggggaaggccatggggacctgaaacattgccccatggaaatgtcgaccctgtgcggacattccgcatactgccatgaagacggtctctgtgtcctcagctcaagaatcctgtagcttgtcccatcataatccattcacccgttcatcatgtgtactgagcagctaccatgttcaaggtaatatgccaggcgctgtatgtctccactgccaagtagaagtgactcaaaaccctctgacaaggatattcccttggctatggtcctgccaggtgcaggcccaggcccatgaccccacctttactaagcacaagtacttgccactgccatcactgccaagtaactagatgtctctgtttccctgccaatgatcctgcaggttctgcccggtctggttatcttcctgttcctgtagcatagccaggcactgccartcayctgtgcccccattgctgtcagcagatgtcttgggtcctgagtgtgggtatccacttttacccgctcactgccacctgtggacactctgtgtctaccctctgagtgggaacatacttctaagttccctgcagtctctgtcctgtggtagaccatctttttgtaaactgcgagcttcctcttccctgtaccctctgccccagtcgtgaccccctaaaagttaaggggtagttggcacctccttattaatatgccagcctagatcccccccggtggaggggcaaatggctgaatccttgtgtgatatttttttcttcgcttgtttatttattcatttatttaattgtatttattcatttactaactttatgtgttaccaattaattttgtttacccattcctttatccatccctcccctccttttcaggtaaggagacaggaggagtaggaggaggcagggcctctccatgccagcctctgtggtccttgcccaaacccatcagcgcaatacttgaaccttctcccaggtaggggcaggaggagccacatgagagagggagaaggaccgygtttacctttagagttttgttttgttttttccttctgagtttgctgttggtgcaggaataagggaaaggcccaaggtatccaagcctggggaagggcaggccagccagcacctctgccttctcagggacaagagtagtcctttaccaccctcactctgcctgtcccctctcctactctacagcattaaagactgtgggaccaggaccctaagtctcctttccttctgggtggggagttctggggttcttggtgtgtgggagaagttttataattgcttccaaacagctgggtttaaatataaaatagacacactcatttttggctcttggtttgtgtgtgggaacaacatgagtgggaaggaatttctgggtgcagaaggaagcagccggggatttgaccaagcagggtatcaggcaggcatgagagcagccaggacagtggtctacaagcccagcacggaggttgtgaagacagtgacaaaatcagctgcccagccctcacttctccccagcatccatcccacccagttttcccaaaagcgtggactttcatgtaactgttagtcaccatgaaggggtagcctgccctggcacgagatgcccagattatcatgagggctacatatgagaatgggagactgtggacaagattgccctgtctcccctctcccccaccccaagggatgggatgcctggggttatggaattaaccagccaaactgggattaaagactcaaggcatcttagggcctgctgagcagattggatgcagrgaatgtacaattggtgctgttgggtggccagtgcataattggacacagactttcaggacctgtgtgaaatggagatggggaaggggcaacctcgaaggggctagatgacagttatagtctcagataggcctcaggtagggagg

SEQ ID NO: 260 - DNA, 3093 bp, Homo sapiens
atgtcgatccaggagaacatatcatccctgcagcttcggtcatgggtctctaagtcccaaagagacttagcaaagtccatcctgattggggctccaggagcccagctgggcctcatgcctctgacaacccaacagtgtggagcagacccacagagagggagacccagagaggtgtgcagtggcatggaagggccagcggggtatctgcggcgggccagtgtggcccaactgacccaggagctgggcactgccttcttccagcagcagcagctgccagctgctatggcagacaccttcctggaacacctctgcctactggacattgacyccgagcccgtggctgctcgcagtaccagcatcattgccaccatcrggccagcatctcgctccgtggagcgcctcaaggagatgatcaaggccgggatgaacattgcgcgactcaacttctcccacggctcccacgagtaccatgctgagtmcatcgccaacgtccgggaggcggtggagagctttgcaggttccccactcagctaccggcccgtggccaycgcccyggacaccaagggaccggagatccgcactgggatcctgcaggggggtccagagtcggaagtggagctggtgaagggctcccaggtgctggtgactgtggaccccgcgttccggacgcgggggaacgcgaacaccgtgtgrgtggactaccccaatattgtccgggtcgtgccggtggggggccgcatctacattgacgacgggctcatctccctagtggtccagaaaatcggcccagagggactggtgacccaagtggagaacggcggcgtcctgggcagccggaagggcgtgaacttgccaggggcccaggtggacttgcccdggctgtccgagcaggacgtcygagacctgcgcttcvgggtggagcatggggtgracatcgtctttgcctcckttktgcggaaagccagcracgtggytgccgtcagggctgctctgggtccggaaggacacggcatcaagatcatcagcaaaattgagaaccacgaaggcgtgaagaggtttgatgaaatcctggaggtgagcgacggcatcatggtgkcacvggggsacctagvcwtcgagatcccagcagagaakgttttcctggmtcagaagatgatgaytgggygctgcaacttggcgggcaagcctgttgtctgtgccacacagatgctggagagcatgattaccaagccccggccaacgagggcagrgacaagcratgtcrccarwghtgtgctggatggggctgactgcatcatgctgtcaggggagrytgccaagggcaacttccctgtggaagcggtgaagatgcagcatgcgattgcccgggaggcagaggccgcagtgtaccaccggcagctgtttgaggagctacgtcgggcagcgccactaagccgtgatcccactgaggtcaccgccattgrtgytrtggaggctgccttcaagtgctgtgctgctgccatcattgtgctgaccacaactggccgctcagcccagcttctgtctcggtaccgacctcgggcagcagtcattrytgtcaccyrctctgccyaggctgccckccagrtccactkatgcyrargagtcttccccttgctttacmgtgaacctccagaagccatctgggcagatgatgtagatcgccgggtgcaatttggcattgaaagtggaaagctccgtggcttcctccgtgttggagacctggtgattgtggtgacagsctggbgacctggctccggctacaccaamatcatgmgggtgctaagcatatcctgagacgcccctcccycctctggcccagcctacccttgtaccccatcccttcctccccagtctacgttctccagcccacacccctccaaagccccacctttaagtcctctcttctctattcctgaccctccctacctgaggcctatctgagactataactgtcatctagccccttcgaggttgccccttccccatctccatttcacacaggtcctgaaagtctgtgtccaattatgcactggccacccaacagcaccaattgtacattcyctgcatccaatctgctcagcaggccctaagatgccttgagtctttaatcccagtttggctggttaattccataaccccaggcatcccatcccttggggtgggggagaggggagacagggcaatcttgtccacagtctcccattctcatatgtagccctcatgataatctgggcatctcgtgccagggcaggctaccccttcatggtgactaacagttacatgaaagtccacgcttttgggaaaactgggtgggatggatgctggggagaagtgagggctgggcagctgattttgtcactgtcttcacaacctccgtgctgggcttgtagaccactgtcctggctgctctcatgcctgcctgataccctgcttggtcaaatccccggctgcttccttctgcacccagaaattccttcccactcatgttgttcccacacacaaaccaagagccaaaaatgagtgtgtctattttatatttaaacccagctgtttggaagcaattataaaacttctcccacacaccaagaaccccagaactccccacccagaaggaaaggagacttagggtcctggtcccacagtctttaatgctgtagagtaggagaggggacaggcagagtgagggtggtaaaggactactcttgtccctgagaaggcagaggtgctggctggcctgcccttccccaggcttggataccttgggcctttcccttattcctgcaccaacagcaaactcagaaggaaaaaacaaaacaaaactctaaaggtaaacrcggtccttctccctctctcatgtggctcctcctgcccctacctgggagaaggttcaagtattgcgctgatgggtttgggcaaggaccacagaggctggcatggagaggccctgcctcctcctactcctcctgtctccttacctgaaaaggaggggagggatggataaaggaatgggtaaacaaaattaattggtaacacataaagttagtaaatgaataaatacaattaaataaatga

SEQ ID NO: 261 - DNA, 3042 bp, Homo sapiens
cattccatggtcccgcagccccaggcccacactgaaagcatgtcgatccaggagaacatatcatccctgcagcttcggtcatgggtctctaagtcccaaagagacttagcaaagtccatcctgattggggctccaggagggccagcggggtatctgcggcgggccagtgtggcccaactgacccaggagctgggcactgccttcttccagcagcagcagctgccagctgctatggcagacaccttcctggaacacctctgcctactggacattgacyccgagcccgtggctgctcgcagtaccagcatcattgccaccatcrggccagcatctcgctccgtggagcgcctcaaggagatgatcaaggccgggatgaacattgcgcgactcaacttctcccacggctcccacgagtaccatgctgagtmcatcgccaacgtccgggaggcggtggagagctttgcaggttccccactcagctaccggcccgtggccaycgcccyggacaccaagggaccggagatccgcactgggatcctgcaggggggtccagagtcggaagtggagctggtgaagggctcccaggtgctggtgactgtggaccccgcgttccggacgcgggggaacgcgaacaccgtgtgrgtggactaccccaatattgtccgggtcgtgccggtggggggccgcatctacattgacgacgggctcatctccctagtggtccagaaaatcggcccagagggactggtgacccaagtggagaacggcggcgtcctgggcagccggaagggcgtgaacttgccaggggcccaggtggacttgcccdggctgtccgagcaggacgtcygagacctgcgcttcvgggtggagcatggggtgracatcgtctttgcctcckttktgcggaaagccagcracgtggytgccgtcagggctgctctgggtccggaaggacacggcatcaagatcatcagcaaaattgagaaccacgaaggcgtgaagaggtttgatgaaatcctggaggtgagcgacggcatcatggtgkcacvggggsacctagvcwtcgagatcccagcagagaakgttttcctggmtcagaagatgatgaytgggygctgcaacttggcgggcaagcctgttgtctgtgccacacagatgctggagagcatgattaccaagccccggccaacgagggcagrgacaagcratgtcrccarwghtgtgctggatggggctgactgcatcatgctgtcaggggagrytgccaagggcaacttccctgtggaagcggtgaagatgcagcatgcgattgcccgggaggcagaggccgcagtgtaccaccggcagctgtttgaggagctacgtcgggcagcgccactaagccgtgatcccactgaggtcaccgccattgrtgytrtggaggctgccttcaagtgctgtgctgctgccatcattgtgctgaccacaactggccgctcagcccagcttctgtctcggtaccgacctcgggcagcagtcattrytgtcaccyrctctgccyaggctgccckccagrtccactkatgcyrargagtcttccccttgctttacmgtgaacctccagaagccatctgggcagatgatgtagatcgccgggtgcaatttggcattgaaagtggaaagctccgtggcttcctccgtgttggagacctggtgattgtggtgacagsctggbgacctggctccggctacaccaamatcatgmgggtgctaagcatatcctgagacgcccctcccycctctggcccagcctacccttgtaccccatcccttcctccccagtctacgttctccagcccacacccctccaaagccccacctttaagtcctctcttctctattcctgaccctccctacctgaggcctatctgagactataactgtcatctagccccttcgaggttgccccttccccatctccatttcacacaggtcctgaaagtctgtgtccaattatgcactggccacccaacagcaccaattgtacattcyctgcatccaatctgctcagcaggccctaagatgccttgagtctttaatcccagtttggctggttaattccataaccccaggcatcccatcccttggggtgggggagaggggagacagggcaatcttgtccacagtctcccattctcatatgtagccctcatgataatctgggcatctcgtgccagggcaggctaccccttcatggtgactaacagttacatgaaagtccacgcttttgggaaaactgggtgggatggatgctggggagaagtgagggctgggcagctgattttgtcactgtcttcacaacctccgtgctgggcttgtagaccactgtcctggctgctctcatgcctgcctgataccctgcttggtcaaatccccggctgcttccttctgcacccagaaattccttcccactcatgttgttcccacacacaaaccaagagccaaaaatgagtgtgtctattttatatttaaacccagctgtttggaagcaattataaaacttctcccacacaccaagaaccccagaactccccacccagaaggaaaggagacttagggtcctggtcccacagtctttaatgctgtagagtaggagaggggacaggcagagtgagggtggtaaaggactactcttgtccctgagaaggcagaggtgctggctggcctgcccttccccaggcttggataccttgggcctttcccttattcctgcaccaacagcaaactcagaaggaaaaaacaaaacaaaactctaaaggtaaacrcggtccttctccctctctcatgtggctcctcctgcccctacctgggagaaggttcaagtattgcgctgatgggtttgggcaaggaccacagaggctggcatggagaggccctgcctcctcctactcctcctgtctccttacctgaaaaggaggggagggatggataaaggaatgggtaaacaaaattaattggtaacacataaagttagtaaatgaataaatacaattaaataaatga

SEQ ID NO: 262 - DNA, 6428 bp, Homo sapiens
cagccgcccctcctgcggccgctgcgggggccgccgcctgacttcggacaccggccccgcacccgccaggaggggagggaaggggaggcggggagagcgacggcggggggcgggcggtggaccccgcctcccccggcacagcctgctgaggggaagagggggtctccgctcttcctcagtgcactctctgactgaagcccggcgcgtggggtgcagcgggagtgcgaggggactggacaggtgggaagatgggaatgaggaccgggcggcgggaatgttctcacttctccggattccaccgggatgcaggactctagctgcccagccgcacctgcgaagagactacacttcccgaggtgctcagcggcagcgagggcctccacgcatgcgcaccgcggcgcgctgggcggggctggatgggctgtggtgggagggttgcagcgccgcgagaaaggcgagccgggccgggggcggggaaaggggtggggcaggaacgggggcggggacggcgctggaggggcgggtcgggtaggtctcccggagctgatgtgtactgtgtgcgccggggaggcgccggcttgtactcggcagcgcgggaataaagtttgctgatttggtgtctagcctggatgcctgggttgcaggccctgcttgtggtggcgctccacagtcatccggctgaagaagacctgttggactggatcttctcgggttttctttcagatattgttttgtatttacccatgaagacattgtttttyggactctgcaaataggacatttcaaagatgagtgaaaaaaaattggaaacaactgcacagcagcggaaatgtcctgaatggatgaatgtgcagaataaaagatgtgctgtagaagaaagaarggcatgtgttcrgaagagtgtttttgaagatgacctccccttcttagaattcactggatccattgtgtatagttacgatgctagtgattgctctttcctgtcagaagatattagcatgagtctatcagatggggatgtggtgggatttgacatggagtggccaccattatacaatagagggaaacttggcaaagttgcactaattcagttgtgtgtttctgagagcaaatgttacttgttccacrtttcttccatgtcagtttttccccagggattaaaaatgttgcttgaaaataaagcagttaaaaaggcaggtgtaggaattgaaggagatcagtggaaacttctacgtgactttgatatcaaattgaagaattttgtggagttgacagatgttgccaataaaaagctgaaatgyacagagacctggagccttaacagtctggttaaacacctcttaggtaaacagctcctgaaagacaagtctatccgctgtagcaattggagtaaatttcctctcactgaggaccagaaactgtatgcagccactgatgcttatgctggttttattatttaccgaaatttagagattttggatgatactgtgcaaaggtttgctataaataaagaggaagaaatcctacttagcgacatgaacaaacagttgacttcaatctctgaggaagtgatggatctggctaagcatcttcctcatgctttcagtaaattggaaaacccacggagggtttctatcttactaaaggatatttcagaaaatctatattcactgaggaggatgataattgggtctactaacattgagactgaactgaggcccagcaataatttaaacttattatcctttgaagattcaactactgggggagtacaacagaaacaaattagagaacatgaagttttaattcacgttgaagatgaaacatgggacccaacacttgatcatttagctaaacatgatggagaagatgtacttggaaataaagtggaacgaaaagaagatggatttgaagatggagtagaagacaacaaattgaaagaraatatrgaaagagcttgtttgatgtcgttagatattacagaacatgaactccaaattttggaacagcagtctcaggaagaatatcttagtgatattgcttataaatctactgagcatttatctcccaatgataatgaaaacgatacgtcctatgtaattgagagtgatgaagatttagaaatggagatgcttaagtctttagaaaacctcaatagtggcacggtagaaccaactcattctaaatgcttaaaaatggaaagaaatctgggtcttcctactaaagaagaagaagaagatgatgaaaatgaagctaatgaaggggaagaagatgatgataaggactttttgtggccagcacccaatgaagagcaagttacttgcctcaagatgtactttggccattccagttttaaaccagttcagtggaaagtgattcattcagtattagaagaaagaagagataatgttgctgtcatggcaactggatatggaaagagtttgtgcttccagtatccacctgtttatgtaggcaagattggccttgttatctctccccttatttctctgatggaagaccaagtgctacagcttaaaatgtccaacatcccagcttgcttccttggatcagcacagtcagaaaatgttctaacagatattaaattaggtaaataccggattgtatacgtaactccagaatactgttcaggtaacatgggcctgctccagcaacttgaggctgatattggtatcacgctcattgctgtggatgaggctcactgtatttctgagtgggggcatgattttagggattcattcaggaagttgggctccctaaagacagcactgccaatggttccaatcgttgcacttactgctactgcaagttcttcaatccgggaagacattgtacgttgcttaaatctgagaaatcctcagatcacctgtactggttttgatcgaccaaacctgtatttagaagttaggcgaaaaacagggaatatcctkcaggatctgcagccatttcttgtcaaaacaagttcccactgggaatttgaaggtccaacaatcatctactgtccttctagaaaaatgacacaacaagttacaggtgaacttaggaaactkaatctatcctgtggaacataccatgcgggcatgagttttagcacaaggaaagacattcatcataggtttgtaagagatgaaattcagtgtgtcatagctaccatagcttttggaatgggcattaataaagctgacattcgccaagtcattcattacggtgctcctaaggacatggaatcatattatcaggagattggtagagctggtcgtgatggacttcaaagttcttgtcacgtcctctgggctcctgcagacattaacttaaataggcaccttcttactgagatacgtaatgagaagtttcgattatacaaattaaagatgatggcaaagatggaaaaatatcttcattctagcagatgtaggagacaaatcatcttgtctcattttgaggacaaacaagtacaaaaagcctccttgggaattatgggaactgaaaaatgctgtgataattgcaggtccagattggatcattgctattccatggatgactcagaggatacatcctgggactttggtccacaagcatttaagcttttgtctgctgtggacatcttaggcgaaaaatttggaattgggcttccaattttatttctccgaggatctaattctcagcgtcttgccgatcaatatcgcaggcacagtttatttggcactggcaaggatcaaacagagagttggtggaaggctttttcccgtcagctgatcactgagggattcttggtagaagtttctcggtataacaaatttatgaagatttgcgcccttacgaaaaagggtagaaattggcttcataaagctaatacagaatctcagagcctcatccttcaagctaatgaagaattgtgtccaaagaagttkcttctgcctagttygaaaactgtatcttcgggcaccaaagagcattgttataatcaagtaccagttgaattaagtacagagaagaagtctaacttggagaagttatattcttataaaccatgtgataagatttcttctgggagtaacatttctaaaaaaagtatcatggtacagtcaccagaaaaagcttacagttcctcacagcctgttatttcggcacaagagcaggagactcagattgtgttatatggcaaattggtagaagctaggcagaaacatgccaataaaatggatgttcccccagctattctggcaacaaacaagatactggtggatatggccaaaatgagaccaactacggttgaaaacgtaaaaaggattgatggtgtttctgaaggcaaagctgccatgttggcccctctgttggaagtcatcaaacatttctgccaaacaaatagtgttcagacagacctcttttcaagtacaaaacctcaagaagaacagaagacgagtctggtagcaaaaaataaaatatgcacactttcacagtctatggccatcacatactctttattccaagaaaagaagatgcctttgaagagcatagctgagagcaggattctgcctctcatgacaattggcatgcacttatcccaagcggtgaaagctggctgcccccttgatttggagcgagcaggcctgactccagaggttcagaagattattgctgatgttatccgaaaccctcccgtcaactcagatatgagtaaaattagcctaatcagaatgttagttcctgaaaacattgacacgtaccttatccacatggcaattgagatccttaaacatggtcctgacagyggacttcaaccttcaygtgatgtcaacaaaaggagatgttttcccggttctgaagagatctgttcaagttctaagagaagcaaggaagaagtaggcatcaatactgagacttcatctgcagagagaaagagacgattacctgtgtggtttgccaaaggaagtgataccagcaagaaattaatggacaaaacgaaaasgggaggtctttttagttaagctggcaattaccagaacaattatgtttcttgctgtattataagaggatagctatattttatttctgaagagtaaggagtagtattttggcttaaaaatcattctaattacaaagttcactgtttattgaagaactggcatcttaaatcagccttccgcaattcatgtagtttctgggtcttctgggagcctacgtgagtacatcacctaacagaatattaaattagacttcctgtaagattgctttaagaaactgttactgtcctgttttctaatctctttattaaaacagtgtatttggaaaatgttatgtgctctgatttgatatagataacagattagtagttacatggtaattatgtgatataaaatattcatatattatcaaaattctgttttgtaaatgtaagaaagcatagttattttacaaattgtttttactgtcttttgaagaagttcttaaatacgttgttaaatggtattagttgaccagggcagtgaaaatgaaaccgcattttgggtgccattaaatagggaaaaaacatgtaaaaaatgtaaaatggagaccaattgcactaggcaagtgtatattttgtattttatatacaatttctattatttttcaagtaataaaacaatgtttttcatactgaatattatatatatattttttagctttcatttacttaattattttaagtacctttatttttccaggatgtcagaatttgattctaatctctcttatgtagcacatgtgacttaatttaaaacctatactgtgacacagagttgggtaaacgatgattatttaactttaagcagttcaccatccatttcaaagcctttgattggcttttttgtaaataaaaataacttgttaagaaacaaatatatctgtcatagaagaactagaaaatccagggaagtgagaaaaatgaaaataaaaatcattcatagttttactagtagctaatcacagtcaacctcttttgtgtatcccaccagacttttttatattcatttgtttttagktaaaatataaaagtctcgtatattcccatttttctgcattgcattachagaaggtagtggcgcctattaaatatgtgatatgttgttgtccagccatggcttctgcatttgcatgcttttgtgtgtgcatctgcaataccctgtgaatatcctgtgtgatggagtggcaagtacgcacagacacgtctgctgcatgcctaggtacgaggctgtctccaggagaagcacttgtttgattatttgagttgccaattgaatttgctgctttttttcatggcttgccattttcactgaaaagaatgactaatgaaaaacgatgattggttattagatttggatgtttggcagacattttctcaaaattgaactaagttggcctcttcacgg

SEQ ID NO: 263 - DNA, 6431 bp, Homo sapiens
cagccgcccctcctgcggccgctgcgggggccgccgcctgacttcggacaccggccccgcacccgccaggaggggagggaaggggaggcggggagagcgacggcggggggcgggcggtggaccccgcctcccccggcacagcctgctgaggggaagagggggtctccgctcttcctcagtgcactctctgactgaagcccggcgcgtggggtgcagcgggagtgcgaggggactggacaggtgggaagatgggaatgaggaccgggcggcgggaatgttctcacttctccggattccaccgggatgcaggactctagctgcccagccgcacctgcgaagagactacacttcccgaggtgctcagcggcagcgagggcctccacgcatgcgcaccgcggcgcgctgggcggggctggatgggctgtggtgggagggttgcagcgccgcgagaaaggcgagccgggccgggggcggggaaaggggtggggcaggaacgggggcggggacggcgctggaggggcgggtcgggtaggtctcccggagctgatgtgtactgtgtgcgccggggaggcgccggcttgtactcggcagcgcgggaataaagtttgctgatttggtgtctagcctggatgcctgggttgcaggccctgcttgtggtggcgctccacagtcatccggctgaagaagacctgttggactggatcttctcgggttttctttcagatattgttttgtatttacccatgaagacattgtttttyggactctgcaaataggacatttcaaagatgagtgaaaaaaaattggaaacaactgcacagcagcggaaatgtcctgaatggatgaatgtgcagaataaaagatgtgctgtagaagaaagaarggcatgtgttcrgaagagtgtttttgaagatgacctccccttcttagaattcactggatccattgtgtatagttacgatgctagtgattgctctttcctgtcagaagatattagcatgagtctatcagatggggatgtggtgggatttgacatggagtggccaccattatacaatagagggaaacttggcaaagttgcactaattcagttgtgtgtttctgagagcaaatgttacttgttccacrtttcttccatgtcagtttttccccagggattaaaaatgttgcttgaaaataaagcagttaaaaaggcaggtgtaggaattgaaggagatcagtggaaacttctacgtgactttgatatcaaattgaagaattttgtggagttgacagatgttgccaataaaaagctgaaatgyacagagacctggagccttaacagtctggttaaacacctcttaggtaaacagctcctgaaagacaagtctatccgctgtagcaattggagtaaatttcctctcactgaggaccagaaactgtatgcagccactgatgcttatgctggttttattatttaccgaaatttagagattttggatgatactgtgcaaaggtttgctataaataaagaggaagaaatcctacttagcgacatgaacaaacagttgacttcaatctctgaggaagtgatggatctggctaagcatcttcctcatgctttcagtaaattggaaaacccacggagggtttctatcttactaaaggatatttcagaaaatctatattcactgaggaggatgataattgggtctactaacattgagactgaactgaggcccagcaataatttaaacttattatcctttgaagattcaactactgggggagtacaacagaaacaaattagagaacatgaagttttaattcacgttgaagatgaaacatgggacccaacacttgatcatttagctaaacatgatggagaagatgtacttggaaataaagtggaacgaaaagaagatggatttgaagatggagtagaagacaacaaattgaaagaraatatrgaaagagcttgtttgatgtcgttagatattacagaacatgaactccaaattttggaacagcagtctcaggaagaatatcttagtgatattgcttataaatctactgagaagcatttatctcccaatgataatgaaaacgatacgtcctatgtaattgagagtgatgaagatttagaaatggagatgcttaagtctttagaaaacctcaatagtggcacggtagaaccaactcattctaaatgcttaaaaatggaaagaaatctgggtcttcctactaaagaagaagaagaagatgatgaaaatgaagctaatgaaggggaagaagatgatgataaggactttttgtggccagcacccaatgaagagcaagttacttgcctcaagatgtactttggccattccagttttaaaccagttcagtggaaagtgattcattcagtattagaagaaagaagagataatgttgctgtcatggcaactggatatggaaagagtttgtgcttccagtatccacctgtttatgtaggcaagattggccttgttatctctccccttatttctctgatggaagaccaagtgctacagcttaaaatgtccaacatcccagcttgcttccttggatcagcacagtcagaaaatgttctaacagatattaaattaggtaaataccggattgtatacgtaactccagaatactgttcaggtaacatgggcctgctccagcaacttgaggctgatattggtatcacgctcattgctgtggatgaggctcactgtatttctgagtgggggcatgattttagggattcattcaggaagttgggctccctaaagacagcactgccaatggttccaatcgttgcacttactgctactgcaagttcttcaatccgggaagacattgtacgttgcttaaatctgagaaatcctcagatcacctgtactggttttgatcgaccaaacctgtatttagaagttaggcgaaaaacagggaatatcctkcaggatctgcagccatttcttgtcaaaacaagttcccactgggaatttgaaggtccaacaatcatctactgtccttctagaaaaatgacacaacaagttacaggtgaacttaggaaactkaatctatcctgtggaacataccatgcgggcatgagttttagcacaaggaaagacattcatcataggtttgtaagagatgaaattcagtgtgtcatagctaccatagcttttggaatgggcattaataaagctgacattcgccaagtcattcattacggtgctcctaaggacatggaatcatattatcaggagattggtagagctggtcgtgatggacttcaaagttcttgtcacgtcctctgggctcctgcagacattaacttaaataggcaccttcttactgagatacgtaatgagaagtttcgattatacaaattaaagatgatggcaaagatggaaaaatatcttcattctagcagatgtaggagacaaatcatcttgtctcattttgaggacaaacaagtacaaaaagcctccttgggaattatgggaactgaaaaatgctgtgataattgcaggtccagattggatcattgctattccatggatgactcagaggatacatcctgggactttggtccacaagcatttaagcttttgtctgctgtggacatcttaggcgaaaaatttggaattgggcttccaattttatttctccgaggatctaattctcagcgtcttgccgatcaatatcgcaggcacagtttatttggcactggcaaggatcaaacagagagttggtggaaggctttttcccgtcagctgatcactgagggattcttggtagaagtttctcggtataacaaatttatgaagatttgcgcccttacgaaaaagggtagaaattggcttcataaagctaatacagaatctcagagcctcatccttcaagctaatgaagaattgtgtccaaagaagttkcttctgcctagttygaaaactgtatcttcgggcaccaaagagcattgttataatcaagtaccagttgaattaagtacagagaagaagtctaacttggagaagttatattcttataaaccatgtgataagatttcttctgggagtaacatttctaaaaaaagtatcatggtacagtcaccagaaaaagcttacagttcctcacagcctgttatttcggcacaagagcaggagactcagattgtgttatatggcaaattggtagaagctaggcagaaacatgccaataaaatggatgttcccccagctattctggcaacaaacaagatactggtggatatggccaaaatgagaccaactacggttgaaaacgtaaaaaggattgatggtgtttctgaaggcaaagctgccatgttggcccctctgttggaagtcatcaaacatttctgccaaacaaatagtgttcagacagacctcttttcaagtacaaaacctcaagaagaacagaagacgagtctggtagcaaaaaataaaatatgcacactttcacagtctatggccatcacatactctttattccaagaaaagaagatgcctttgaagagcatagctgagagcaggattctgcctctcatgacaattggcatgcacttatcccaagcggtgaaagctggctgcccccttgatttggagcgagcaggcctgactccagaggttcagaagattattgctgatgttatccgaaaccctcccgtcaactcagatatgagtaaaattagcctaatcagaatgttagttcctgaaaacattgacacgtaccttatccacatggcaattgagatccttaaacatggtcctgacagyggacttcaaccttcaygtgatgtcaacaaaaggagatgttttcccggttctgaagagatctgttcaagttctaagagaagcaaggaagaagtaggcatcaatactgagacttcatctgcagagagaaagagacgattacctgtgtggtttgccaaaggaagtgataccagcaagaaattaatggacaaaacgaaaasgggaggtctttttagttaagctggcaattaccagaacaattatgtttcttgctgtattataagaggatagctatattttatttctgaagagtaaggagtagtattttggcttaaaaatcattctaattacaaagttcactgtttattgaagaactggcatcttaaatcagccttccgcaattcatgtagtttctgggtcttctgggagcctacgtgagtacatcacctaacagaatattaaattagacttcctgtaagattgctttaagaaactgttactgtcctgttttctaatctctttattaaaacagtgtatttggaaaatgttatgtgctctgatttgatatagataacagattagtagttacatggtaattatgtgatataaaatattcatatattatcaaaattctgttttgtaaatgtaagaaagcatagttattttacaaattgtttttactgtcttttgaagaagttcttaaatacgttgttaaatggtattagttgaccagggcagtgaaaatgaaaccgcattttgggtgccattaaatagggaaaaaacatgtaaaaaatgtaaaatggagaccaattgcactaggcaagtgtatattttgtattttatatacaatttctattatttttcaagtaataaaacaatgtttttcatactgaatattatatatatattttttagctttcatttacttaattattttaagtacctttatttttccaggatgtcagaatttgattctaatctctcttatgtagcacatgtgacttaatttaaaacctatactgtgacacagagttgggtaaacgatgattatttaactttaagcagttcaccatccatttcaaagcctttgattggcttttttgtaaataaaaataacttgttaagaaacaaatatatctgtcatagaagaactagaaaatccagggaagtgagaaaaatgaaaataaaaatcattcatagttttactagtagctaatcacagtcaacctcttttgtgtatcccaccagacttttttatattcatttgtttttagktaaaatataaaagtctcgtatattcccatttttctgcattgcattachagaaggtagtggcgcctattaaatatgtgatatgttgttgtccagccatggcttctgcatttgcatgcttttgtgtgtgcatctgcaataccctgtgaatatcctgtgtgatggagtggcaagtacgcacagacacgtctgctgcatgcctaggtacgaggctgtctccaggagaagcacttgtttgattatttgagttgccaattgaatttgctgctttttttcatggcttgccattttcactgaaaagaatgactaatgaaaaacgatgattggttattagatttggatgtttggcagacattttctcaaaattgaactaagttggcctcttcacgg

SEQ ID NO: 264 - DNA, 6521 bp, Homo sapiens
cagccgcccctcctgcggccgctgcgggggccgccgcctgacttcggacaccggccccgcacccgccaggaggggagggaaggggaggcggggagagcgacggcggggggcgggcggtggaccccgcctcccccggcacagcctgctgaggggaagagggggtctccgctcttcctcagtgcactctctgactgaagcccggcgcgtggggtgcagcgggagtgcgaggggactggacaggtgggaagatgggaatgaggaccgggcggcgggaatgttctcacttctccggattccaccgggatgcaggactctagctgcccagccgcacctgcgaagagactacacttcccgaggtgctcagcggcagcgagggcctccacgcatgcgcaccgcggcgcgctgggcggggctggatgggctgtggtgggagggttgcagcgccgcgagaaaggcgagccgggccgggggcggggaaaggggtggggcaggaacgggggcggggacggcgctggaggggcgggtcgggtaggtctcccggagctgatgtgtactgtgtgcgccggggaggcgccggcttgtactcggcagcgcgggaataaagtttgctgatttggtgtctagcctggatgcctgggttgcaggccctgcttgtggtggcgctccacagtcatccggctgaagaagacctgttggactggatcttctcgggttttctttcagatattgttttgtatttacccatgaagacattgtttttyggactctgcaaataggacatttcaaagatgagtgaaaaaaaattggaaacaactgcacagcagcggaaatgtcctgaatggatgaatgtgcagaataaaagatgtgctgtagaagaaagaarggcatgtgttcrgaagagtgtttttgaagatgacctccccttcttagaattcactggatccattgtgtatagttacgatgctagtgattgctctttcctgtcagaagatattagcatgagtctatcagatggggatgtggtgggatttgacatggagtggccaccattatacaatagagggaaacttggcaaagttgcactaattcagttgtgtgtttctgagagcaaatgttacttgttccacrtttcttccatgtcagtttttccccagggattaaaaatgttgcttgaaaataaagcagttaaaaaggcaggtgtaggaattgaaggagatcagtggaaacttctacgtgactttgatatcaaattgaagaattttgtggagttgacagatgttgccaataaaaagctgaaatgyacagagacctggagccttaacagtctggttaaacacctcttaggtaaacagctcctgaaagacaagtctatccgctgtagcaattggagtaaatttcctctcactgaggaccagaaactgtatgcagccactgatgcttatgctggttttattatttaccgaaatttagagattttggatgatactgtgcaaaggtttgctataaataaagaggaagaaatcctacttagcgacatgaacaaacagttgacttcaatctctgaggaagtgatggatctggctaagcatcttcctcatgctttcagtaaattggaaaacccacggagggtttctatcttactaaaggatatttcagaaaatctatattcactgaggaggatgataattgggtctactaacattgagactgaactgaggcccagcaataatttaaacttattatcctttgaagattcaactactgggggagtacaacagaaacaaattagagaacatgaagttttaattcacgttgaagatgaaacatgggacccaacacttgatcatttagctaaacatgatggagaagatgtacttggaaataaagtggaacgaaaagaagatggatttgaagatggagtagaagacaacaaattgaaagaraatatrgaaagagcttgtttgatgtcgttagatattacagaacatgaactccaaattttggaacagcagtctcaggaagaatatcttagtgatattgcttataaatctactgagcatttatctcccaatgataatgaaaacgatacgtcctatgtaattgagagtgatgaagatttagaaatggagatgcttaaggtatgccctgttaataatagtccttttgtgtttggtgaaaaagatacgacactgtcagtggttttgcttttaagatttcttttaaactttcagtctttagaaaacctcaatagtggcacggtagaaccaactcattctaaatgcttaaaaatggaaagaaatctgggtcttcctactaaagaagaagaagaagatgatgaaaatgaagctaatgaaggggaagaagatgatgataaggactttttgtggccagcacccaatgaagagcaagttacttgcctcaagatgtactttggccattccagttttaaaccagttcagtggaaagtgattcattcagtattagaagaaagaagagataatgttgctgtcatggcaactggatatggaaagagtttgtgcttccagtatccacctgtttatgtaggcaagattggccttgttatctctccccttatttctctgatggaagaccaagtgctacagcttaaaatgtccaacatcccagcttgcttccttggatcagcacagtcagaaaatgttctaacagatattaaattaggtaaataccggattgtatacgtaactccagaatactgttcaggtaacatgggcctgctccagcaacttgaggctgatattggtatcacgctcattgctgtggatgaggctcactgtatttctgagtgggggcatgattttagggattcattcaggaagttgggctccctaaagacagcactgccaatggttccaatcgttgcacttactgctactgcaagttcttcaatccgggaagacattgtacgttgcttaaatctgagaaatcctcagatcacctgtactggttttgatcgaccaaacctgtatttagaagttaggcgaaaaacagggaatatcctkcaggatctgcagccatttcttgtcaaaacaagttcccactgggaatttgaaggtccaacaatcatctactgtccttctagaaaaatgacacaacaagttacaggtgaacttaggaaactkaatctatcctgtggaacataccatgcgggcatgagttttagcacaaggaaagacattcatcataggtttgtaagagatgaaattcagtgtgtcatagctaccatagcttttggaatgggcattaataaagctgacattcgccaagtcattcattacggtgctcctaaggacatggaatcatattatcaggagattggtagagctggtcgtgatggacttcaaagttcttgtcacgtcctctgggctcctgcagacattaacttaaataggcaccttcttactgagatacgtaatgagaagtttcgattatacaaattaaagatgatggcaaagatggaaaaatatcttcattctagcagatgtaggagacaaatcatcttgtctcattttgaggacaaacaagtacaaaaagcctccttgggaattatgggaactgaaaaatgctgtgataattgcaggtccagattggatcattgctattccatggatgactcagaggatacatcctgggactttggtccacaagcatttaagcttttgtctgctgtggacatcttaggcgaaaaatttggaattgggcttccaattttatttctccgaggatctaattctcagcgtcttgccgatcaatatcgcaggcacagtttatttggcactggcaaggatcaaacagagagttggtggaaggctttttcccgtcagctgatcactgagggattcttggtagaagtttctcggtataacaaatttatgaagatttgcgcccttacgaaaaagggtagaaattggcttcataaagctaatacagaatctcagagcctcatccttcaagctaatgaagaattgtgtccaaagaagttkcttctgcctagttygaaaactgtatcttcgggcaccaaagagcattgttataatcaagtaccagttgaattaagtacagagaagaagtctaacttggagaagttatattcttataaaccatgtgataagatttcttctgggagtaacatttctaaaaaaagtatcatggtacagtcaccagaaaaagcttacagttcctcacagcctgttatttcggcacaagagcaggagactcagattgtgttatatggcaaattggtagaagctaggcagaaacatgccaataaaatggatgttcccccagctattctggcaacaaacaagatactggtggatatggccaaaatgagaccaactacggttgaaaacgtaaaaaggattgatggtgtttctgaaggcaaagctgccatgttggcccctctgttggaagtcatcaaacatttctgccaaacaaatagtgttcagacagacctcttttcaagtacaaaacctcaagaagaacagaagacgagtctggtagcaaaaaataaaatatgcacactttcacagtctatggccatcacatactctttattccaagaaaagaagatgcctttgaagagcatagctgagagcaggattctgcctctcatgacaattggcatgcacttatcccaagcggtgaaagctggctgcccccttgatttggagcgagcaggcctgactccagaggttcagaagattattgctgatgttatccgaaaccctcccgtcaactcagatatgagtaaaattagcctaatcagaatgttagttcctgaaaacattgacacgtaccttatccacatggcaattgagatccttaaacatggtcctgacagyggacttcaaccttcaygtgatgtcaacaaaaggagatgttttcccggttctgaagagatctgttcaagttctaagagaagcaaggaagaagtaggcatcaatactgagacttcatctgcagagagaaagagacgattacctgtgtggtttgccaaaggaagtgataccagcaagaaattaatggacaaaacgaaaasgggaggtctttttagttaagctggcaattaccagaacaattatgtttcttgctgtattataagaggatagctatattttatttctgaagagtaaggagtagtattttggcttaaaaatcattctaattacaaagttcactgtttattgaagaactggcatcttaaatcagccttccgcaattcatgtagtttctgggtcttctgggagcctacgtgagtacatcacctaacagaatattaaattagacttcctgtaagattgctttaagaaactgttactgtcctgttttctaatctctttattaaaacagtgtatttggaaaatgttatgtgctctgatttgatatagataacagattagtagttacatggtaattatgtgatataaaatattcatatattatcaaaattctgttttgtaaatgtaagaaagcatagttattttacaaattgtttttactgtcttttgaagaagttcttaaatacgttgttaaatggtattagttgaccagggcagtgaaaatgaaaccgcattttgggtgccattaaatagggaaaaaacatgtaaaaaatgtaaaatggagaccaattgcactaggcaagtgtatattttgtattttatatacaatttctattatttttcaagtaataaaacaatgtttttcatactgaatattatatatatattttttagctttcatttacttaattattttaagtacctttatttttccaggatgtcagaatttgattctaatctctcttatgtagcacatgtgacttaatttaaaacctatactgtgacacagagttgggtaaacgatgattatttaactttaagcagttcaccatccatttcaaagcctttgattggcttttttgtaaataaaaataacttgttaagaaacaaatatatctgtcatagaagaactagaaaatccagggaagtgagaaaaatgaaaataaaaatcattcatagttttactagtagctaatcacagtcaacctcttttgtgtatcccaccagacttttttatattcatttgtttttagktaaaatataaaagtctcgtatattcccatttttctgcattgcattachagaaggtagtggcgcctattaaatatgtgatatgttgttgtccagccatggcttctgcatttgcatgcttttgtgtgtgcatctgcaataccctgtgaatatcctgtgtgatggagtggcaagtacgcacagacacgtctgctgcatgcctaggtacgaggctgtctccaggagaagcacttgtttgattatttgagttgccaattgaatttgctgctttttttcatggcttgccattttcactgaaaagaatgactaatgaaaaacgatgattggttattagatttggatgtttggcagacattttctcaaaattgaactaagttggcctcttcacgg

SEQ ID NO: 265 - DNA, 3087 bp, Homo sapiens
cccctttgtgcgtcacgggtggcgggcgcgggaaggggatttggattgttgcgcctctgctctgaagaaagtgctgtctggctccaactccagttctttcccctgagcarcgcctggaacctaacccttcccactctgtcaccttctcgatcccgccggcgctttagagcsgcagtccagtcttggatccttcagagcctcagccactagctgcgatgcatgtgatcaagcragatggccgccaagaacgagtcatgtttgacaaaattacatctcgaatccagaagctttgttatggactcaatatggattttgttgatcctgctcagatcaccatgaaagtaatccaaggcttgtacagtggggtcaccacagtggaactagatactttggctgctgaaacagctgcaaccttgactactaagcaccctgactatgctatcctggcagccaggatcgctgtctctaacttgcacaaagaaacaaagaaagtgttcagtgatgtgatggaagacctctataactacataaatccacataatggcaaacactctcccatggtggccaagtcaacattggatattgttctggccaataaagatcgcctgaattctgctattatctatgaccgagatttctcttacaattacttcggctttaagacgctagagcggtcttatttgttgaagatcaatggaaaagtggctgaaagaccacaacatatgttgatgagagtatctgttgggatccacaaagaagacattgatgcagcaattgaaacatataatcttctttctgagaggtggtttactcatgcttcgcccactctcttcaatgctggtaccaaccgcccacaactttctagctgttttcttctgagtatgaaagatgacagcattgaaggcatttatgacactctaaagcaatgtgcattgatttctaagtctgctggaggaattggtgttgctgtgagttgtattcgggctactggcagctacattgctgggactaatggcaattccaatggccttgtaccgatgctgagagtatataacaacacagctmgatatgtggatcaaggtgggaacaagcgtcctggggcatttgctatttacctggagccttggcatttagacatctttgaattccttgatttaaagaagaacacaggaaaggaagagcagcgtgccagagatcttttctttgctctttggattccggatctcttcatgaaacgagtggagactaatcaggactggtctttgatgtgtccaaatgagtgtcctggtctggatgaggtttggggagaggaatttgagaaactatatgcaagttatgagaaacaaggtcgtgtccgcaaagttgtaaaagctcagcagctttggtatgccatcattgagtctcagacggaaacaggcaccccgtatatgctctacaaagattcctgtaatcgaaagagcaaccagcagaacctgggaaccatcaaatgcagcaacctgtgcacagaaatagtggagtacaccagcaaagatgaggttgctgtttgtaatttggcttccctggccctgaatatgtatgtcacatcagaacacacatacgactttaagaagttggctgaagtcactaaagtcgttgtccgaaacttgaataaaattattgatataaactactatcctgtaccagaggcatgcctatcaaataaacgccatcgccccattggaattggggtacaaggtctggcagatgcttttatcctgatgagatacccttttgagagtgcagaagcccagttactgaataagcagatctttgaaactatttattatggtgctctggaagccagctgtgaccttgccaaggagcagggcccatacgaaacctatgagggctctccagttagcaaaggaattcttcagtatgatatgtggaatgttactcctacagacctatgggactggaaggttctcaaggagaagattgcaaagtatggtataagaaacagtttacttattgccccgatgcctacagcttccactgctcagatcctggggaataatgagtccattgaaccttacaccagcaacatctatactcgcagagtcttgtcaggagaatttcagattgtaaatcctcacttattgaaagatcttaccgagcggggcctatggcatgaagagatgaaaaaccagattattgcatgcaatggctctattcagagcataccagaaattcctgatgacctgaagcaactttataaaactgtgtgggaaatctctcagaaaactgttctcaagatggcagctgagagaggtgctttcattgatcaaagccaatctttgaacatccacattgctgagcctaactatggcaaactcactagtatgcacttctacggctggaagcagggtttgaagactgggatgtattatttaaggacragaccagcrgctaatccaatccagttcactctaaataaggagaagctaaaagataaagaaaaggtatcaaaagaggaagaagagaaggagaggaacacagcagccatggygtgctctttggagaatagagatgaatgtctgatgtgtggatcctgaggaaagacttggaagagaccagcatgtcttcagtagccaaactacttcttgagcatagataggtatagtgggtttgcttgaggtggtaaggctttgctggaccctgttgcaggcaaaaggagtaattgatttaaagtactgttaatgatgwtaatgatttttttttaaactcatatattgggattttcaccaaaataatgcttttgaaaaaaagaaaaaaaaaacggatatattgagaatcaaagtagaagttttaggaatgcaaaataagtcatcttgcatacagggagtggttaagtaaggtttcatcacccmtttagcactgcttttctgaagacttcagttttgttaaggagatttagttttactgctttgactggtgggtctctagawgcaaaactgagtgataactcatgagaagtactgataggacctttatctggatatggtcctataggttattctgaaataaagataaacatttytaagtgat

SEQ ID NO: 266 - DNA, 1313 bp, Homo sapiens
ggccatggtggagatcagcagcagcttccccacccaggacaaggcctagatgaggaaactgagacccaaaaagagacagcaactggcccagggtcaccagcatgcagatgcctgctatgatgtctctgcttcttgtgtctgtgggcctcatggaagcacttcaggcccagagccaccccatcacacgacgagacctcttctctcaagagattcagctggacatggccctrgcctcctttgatgaccagtacgctggctgtgctgctgccatgacagctgctctcccggatctcaaccacacggagttccaggccaaccaggtgtatgcagacagctggacactggcaagcagccaatggcaggagcgtcaggccaggtggccagagtggagtctcagccccasccrtccatcccygccacccctgggcttccgcgatgagcatggggtggccctcctggcctacacrgccaacagccscctgcacaaggagttcaatgcagccgtgcgtgaggcgggccgctcccgggcccactacctccaccacttctccttcaagacactccatttcctgctgactgaggccctgcagctcctgggcagcggccagcgtccaccccggtgccaccaggtgttccgaggtgtgcacggcctgcgcttccggccagcagggccccgggccaccgtgaggctggggggctttgcttctgcctccctgaagcatgttgcagcccagcagtttggtgaggacaccttcttcggcatctggacctgccttggggcccctatcaagggctactccttcttccctggagaggaagaggtgctgatccccccctttgagaccttccaagtgatcaatgccagcagacyggcccagggccccgcccgcatctacctccgagccctgggcaagcacagcacctacaactgcgagtacatcaaagacaagaagtgcaagtctgggccttgccatctggataattcagccatgggtcagagccccctctctgcagtctggtctttgctgctgctgctctggttcctygtggtgagggcctttccagatggtccaggcctcctttgatgcatgagacacgggacagcctcrcctgctgcctctgcccatcctgaggatgttggccatgtgtgctttcagtgtaaccaagattcctgtcaatcccatctgcagggaactctgggaccttctctggtagctgccagaccggctggtggagaaacaggagacaatctggggactgaaccttacccagggctgtaggagtgagactctgaataaagggttgggccggcg

SEQ ID NO: 267 - DNA, 518 bp, Homo sapiens
tggtggccatggtggagatcagcagcagcttccccacccaggacaaggcctaggctcccagggtgatggagaatgcttcagagacagaaaaatgtgagccctagaagtgggaggctgacagcctgcatgagaactatccactgtacctgcatgtggactcgaagacagtctccgggaatatgggctgaggaatccacagtgtcagatgaggaaactgagacccaaaaagagacagcaactggcccagggtcaccagcatgcagatgcctgctatgatgtctctgcttcttgtgtctgtgggcctcatggaagcacttcaggcccagagccaccccatcacacgacgagactctcttgtcagcacagatgtaacttctgctctaatccatgagtccygaggctcctctcatcacrgctcactgtagcctcaaactcctggtttcaagagatcctcccacctcagcctcccaagtagctgggactacagatatgtgccaccacacctgactaatttttgt

SEQ ID NO: 268 - DNA, 4068 bp, Homo sapiens
gaactacagcgtcgccgcctgggttgtgtcgccgcggtaggcgctgcgctctgagcgcagcgcaggccccgtaccgaccgcccgcccgccctctgtccgcgatggaggtgccggccgcgggtcgcgttcctgccgagggcgccccgacggcggctgtggccgaggtgcgctgcccggggcccgcgccgctgcgcctgctggagtggagggtggcggcgggcgcggccgtgcgcatcggctcggtgctggccgtgttcgaggccgccgcctccgcgcagtcctccggggcctctcagtcccgtgtagcctccgggggctgcgtgcgccccgcgcggccggaacgcaggctgaggtcggagcgcgcgggcgtggtgcgggagctgtgcgcgcagccgggccaggtggtcgccccaggagyggttctggtgaggttggaaggatgcagccacccggttgtcatgaaaggcctgtgtgctgaatgtggccaagacctcacccagttgcagagtaagaacgggaagcagcaggtgccgctgtccacggcgaccgtgtccatggtgcacagcgtgccggagttgatggtgagctccgagcaagctgaacagctgggaagagaagaccagcagcgactgcaccgaaaccggaagctggtgctcatggtggacttggaccagacgttgattcacacaaccgagcagcactgtcagcagatgtcgaataaaggcatctttcacttccagctgggccggggtgagcccatgctgcacacgcgcctgcgtccacactgcaaggacttcctggagaagatcgccaagctgtacgagctgcaygtcttcaccttcggcagccggctgtacgcacacaccatcgcaggctttttagaccccgagaagaagcttttttctcaccgaatattatcaagggatgaatgtattgacccattttctaaaacgggaaaccttagaaatctctttccttgtggagactcaatggtttgcattattgatgatcgagaagatgtctggaagtttgcccccaatctgataactgtgaagaaatatgtatacttccagggcacrggtgatatgaatgcgccccctgggtcccgagaatctcagaygagaaagaaagtaaatcattctcgaggcactgaggtctcagagccatctccgcccgtgagagaccctgagggggtaacgcaggcccctggagtggagcccagcaatggcctggagaagcctgcacgggagctgaacggcagcgaggccgccaccccgcgggactcaccccgccccgggaagccagacgagagggacatctggccccctgcccaggcccccaccagcagccargagctggcaggcgctcctgagccccagggatcctgtgcgcagggtggccgggtggcaccgggacagcggcctgcccagggtgccacgggcactgacctggactttgacttatccagcgacagcgagagcagcagtgagtccgagggcacgaagtcctcctcctccgcctctgatggcgaaagcgaggggaaaagaggccggcagaagccraaggctgccccagagggagccggggcgctggcacagggcagttccctggagccggggcggcctgcagcaccgagtctccccggagaggccgagcmtggcgcgcatgccccggacaaggagcctgagctgggtgggcaggaggagggcgagcgggatggcctctgcggcctgggcaacggctgtgccgacaggaaggaggcggagaccgagtcacagaacagcgagctgtcgggggtcactgcgggtgagtccctggaccagagcatrgaggaggaggaggaggaggacacggatgaggatgaccacctcatctacctggaggagatcctggtccgtgtacacactgactactatgccaagtatgaccgctacctcaacaaggagatcgaggaggcgccggacatccgcaagatcgtgccggagctcaagagcaaggtgctggcagacgtggccataattttcagtgggctacacccgacaaacttcccgatagagaagacgcgggagcattaccacgccacggcgctgggagcraagatcctcactcggctggtgctgagccccgacgcccctgacagggccacgcacctgatcgccgcgcgagctggcacagagaaggtgctgcaggcacaggagtgcggacacctgcacgtggtcaaccctgactggctgtggagctgcctggagcgctgggacaaggtggaggagcagctcttcccgctcagggacgatcacaccaaggcacagagggagaacagccctgcggcctttcccgaccgggagggtgtgccccccaccgcctygttccacccgatgccggttcttcccaaggcccagcctggccccgaggttcggatctaygactccaacacggggaagctcatcaggacsggcgcccgggggcccccagcaccctccagctccctacccatccgccaggagccctcttcyttcagagcggttccgccaccccagccgcagatgtttggtgaagagctgcctgacgctcaggacggagagcagcctggcccttctagaagaaagcracagcccagtatgtctgagacaatgccgctgtacactctttgtaaggaggatttagagagtatggacaaagaggtggacgacatccttggagaaggcagcgacgacagcgacagcgagaagaggaggcctgaggagcaggaggaggagccccagccccggaagccagggacccgcagggagcggacgctcggggcacctgcaggccacaagaggaagctgaatgaagaggacgccgccagcgagtccagcagggagtccagcaacgaggaygagggcagcagctccgaggccgacgagatggccaaggcgctggaggcggagctcaacgacctcatgtgagcgcgggcagcgggcagggactgaagcctgacygacctccagcagcactcrgacgtccccggaccagccctcagtctcggtccacgctgctttcttcccaaaggacatgtatatttgcagagctccacatacagaaacacattattttgcagaaataggtgtttttaagaagttttactacaggaatgtctacttttgtaagtgacaggtgttaaaggcccaggtgtgctgtgccaaagagctcagcagaggctcacgtggcccaggctggtgcgcccgctgtctcggtaaggggcgggttggtgtgttttccccttgtgtaccagagcacattccttaggggacggctttgggggtcccacgagacatggactaggagtttaagcaggacagtgtgcgtgcacgagctccgagcccagcacagacatgcctggaacccccgccgcctgctgctccctcctagggaacccatttccggggaacgccgtgactgtcgggcagcctggagcttcctgcagcctcctacgcagggtccacgccacgtggcctgggctgccatcctgccgtcctcccactggcatcctggcaagggggcgttgcttttcctgggcggccttttatgtcttggagacacctgatgtaaagtttctgtaaatctatttcatatctgacccaccaaacagatttctctttaataaaaatcctttttgtaagttctcttctcgtgggtgtgtggcagcggtgagcacccgcctcctccctcgctgggatccagctccttagctgtgaaacagaaacgaaaaaattcccacggacrggaccgtgtggaacggcagaaatggaaaccgcagaactgcgagcgtgatgatctcagggtttcgcctctgagcataagaaccaggcttgtagctggtattttaaaacggttaagtgtgaagaattactctcttgcattattttcatccttcccttttgtttgtttgggatgcgggggcccgagagctacaggtaggtgctgggctatggccgccgccaggacccctcccggccagcagcctcggctcacgtcccctcctcctcccagcatcagtcccgcagcgtggcggtgggaggctgcacc

SEQ ID NO: 269 - DNA, 4107 bp, Homo sapiens
gaactacagcgtcgccgcctgggttgtgtcgccgcggtaggcgctgcgctctgagcgcagcgcaggccccgtaccgaccgcccgcccgccctctgtccgcgatggaggtgccggccgcgggtcgcgttcctgccgagggcgccccgacggcggctgtggccgaggtgcgctgcccggggcccgcgccgctgcgcctgctggagtggagggtggcggcgggcgcggccgtgcgcatcggctcggtgctggccgtgttcgaggccgccgcctccgcgcagtcctccggggcctctcagtcccgtgtagcctccgggggctgcgtgcgccccgcgcggccggaacgcaggctgaggtcggagcgcgcgggcgtggtgcgggagctgtgcgcgcagccgggccaggtggtcgccccaggagyggttctggtgaggttggaaggatgcagccacccggttgtcatgaaaggcctgtgtgctgaatgtggccaagacctcacccagttgcagagtaagaacgggaagcagcaggtgccgctgtccacggcgaccgtgtccatggtgcacagcgtgccggagttgatggtgagctccgagcaagctgaacagctgggaagagaagaccagcagcgactgcaccgaaaccggaagctggtgctcatggtggacttggaccagacgttgattcacacaaccgagcagcactgtcagcagatgtcgaataaaggcatctttcacttccagctgggccggggtgagcccatgctgcacacgcgcctgcgtccacactgcaaggacttcctggagaagatcgccaagctgtacgagctgcaygtcttcaccttcggcagccggctgtacgcacacaccatcgcaggctttttagaccccgagaagaagcttttttctcaccgaatattatcaagggatgaatgtattgacccattttctaaaacgggaaaccttagaaatctctttccttgtggagactcaatggtttgcattattgatgatcgagaagatgtctggaagtttgcccccaatctgataactgtgaagaaatatgtatacttccagggcacrggtgatatgaatgcgccccctgggtcccgagaatctcagaygagaaagaaagtaaatcattctcgaggcactgaggtctcagagccatctccgcccgtgagagaccctgagggggtaacgcaggcccctggagtggagcccagcaatggcctggagaagcctgcacgggagctgaacggcagcgaggccgccaccccgcgggactcaccccgccccgggaagccagacgagagggacatctggccccctgcccaggcccccaccagcagccargagctggcaggcgctcctgagccccagggatcctgtgcgcagggtggccgggtggcaccgggacagcggcctgcccagggtgccacgggcactgacctggactttgacttatccagcgacagcgagagcagcagtgagtccgagggcacgaagtcctcctcctccgcctctgatggcgaaagcgaggggaaaagaggccggcagaagccraaggctgccccagagggagccggggcgctggcacagggcagttccctggagccggggcggcctgcagcaccgagtctccccggagaggccgagcmtggcgcgcatgccccggacaaggagcctgagctgggtgggcaggaggagggcgagcgggatggcctctgcggcctgggcaacggctgtgccgacaggaaggaggcggagaccgagtcacagaacagcgagctgtcgggggtcactgcgggtgagtccctggaccagagcatrgaggaggaggaggaggaggacacggatgaggatgaccacctcatctacctggaggagatcctggtccgtgtacacactgactactatgccaagtatgaccgctacctcaacaaggagatcgaggaggcgccggacatccgcaagatcgtgccggagctcaagagcaaggtgctggcagacgtggccataattttcagtgggctacacccgacaaacttcccgatagagaagacgcgggagcattaccacgccacggcgctgggagcraagatcctcactcggctggtgctgagccccgacgcccctgacagggccacgcacctgatcgccgcgcgagctggcacagagaaggtgctgcaggcacaggagtgcggacacctgcacgtggtcaaccctgactggctgtggagctgcctggagcgctgggacaaggtggaggagcagctcttcccgctcagggacgatcacaccaaggcacagagggagaacagccctgcggcctttcccgaccgggagggtgtgccccccaccgcctygttccacccgatgccggttcttcccaaggcccagcctggccccgaggttcggatctaygactccaacacggggaagctcatcaggacsggcgcccgggggcccccagcaccctccagctccctacccatccgccaggagccctcttcyttcagagcggttccgccaccccagccgcagatgtttggtgaagagctgcctgacgctcaggacggagagcagcctggcccttctagaagaaagcracagcccagtatgtctgagacaatgccgctgtacactctttgtaaggaggatttagagagtatggacaaagaggtggacgacatccttggagaaggcagcgacgacagcgacagcgagaagaggaggcctgaggagcaggaggaggagccccagccccggaagccagggacccgcagggagcggacgctcggggcacctgcgtccagcgagaggagcgcggcagggggccgggggcccagaggccacaagaggaagctgaatgaagaggacgccgccagcgagtccagcagggagtccagcaacgaggaygagggcagcagctccgaggccgacgagatggccaaggcgctggaggcggagctcaacgacctcatgtgagcgcgggcagcgggcagggactgaagcctgacygacctccagcagcactcrgacgtccccggaccagccctcagtctcggtccacgctgctttcttcccaaaggacatgtatatttgcagagctccacatacagaaacacattattttgcagaaataggtgtttttaagaagttttactacaggaatgtctacttttgtaagtgacaggtgttaaaggcccaggtgtgctgtgccaaagagctcagcagaggctcacgtggcccaggctggtgcgcccgctgtctcggtaaggggcgggttggtgtgttttccccttgtgtaccagagcacattccttaggggacggctttgggggtcccacgagacatggactaggagtttaagcaggacagtgtgcgtgcacgagctccgagcccagcacagacatgcctggaacccccgccgcctgctgctccctcctagggaacccatttccggggaacgccgtgactgtcgggcagcctggagcttcctgcagcctcctacgcagggtccacgccacgtggcctgggctgccatcctgccgtcctcccactggcatcctggcaagggggcgttgcttttcctgggcggccttttatgtcttggagacacctgatgtaaagtttctgtaaatctatttcatatctgacccaccaaacagatttctctttaataaaaatcctttttgtaagttctcttctcgtgggtgtgtggcagcggtgagcacccgcctcctccctcgctgggatccagctccttagctgtgaaacagaaacgaaaaaattcccacggacrggaccgtgtggaacggcagaaatggaaaccgcagaactgcgagcgtgatgatctcagggtttcgcctctgagcataagaaccaggcttgtagctggtattttaaaacggttaagtgtgaagaattactctcttgcattattttcatccttcccttttgtttgtttgggatgcgggggcccgagagctacaggtaggtgctgggctatggccgccgccaggacccctcccggccagcagcctcggctcacgtcccctcctcctcccagcatcagtcccgcagcgtggcggtgggaggctgcacc

SEQ ID NO: 270 - DNA, 3944 bp, Homo sapiens
gaactacagcgtcgccgcctgggttgtgtcgccgcggtaggcgctgcgctctgagcgcagcgcaggccccgtaccgaccgcccgcccgccctctgtccgcgatggaggtgccggccgcgggtcgcgttcctgccgagggcgccccgacggcggctgtggccgaggtgcgctgcccggggcccgcgccgctgcgcctgctggagtggagggtggcggcgggcgcggccgtgcgcatcggctcggtgctggccgtgttcgaggccgccgcctccgcgcagtcctccggggcctctcagtcccgtgtagcctccgggggctgcgtgcgccccgcgcggccggaacgcaggctgaggtcggagcgcgcgggcgtggtgcgggagctgtgcgcgcagccgggccaggtggtcgccccaggagyggttctggtgaggttggaaggatgcagccacccggttgtcatgaaaggcctgtgtgctgaatgtggccaagacctcacccagttgcagagtaagaacgggaagcagcaggtgccgctgtccacggcgaccgtgtccatggtgcacagcgtgccggagttgatggtgagctccgagcaagctgaacagctgggaagagaagaccagcagcgactgcaccgaaaccggaagctggtgctcatggtggacttggaccagacgttgattcacacaaccgagcagcactgtcagcagatgtcgaataaaggcatctttcacttccagctgggccggggtgagcccatgctgcacacgcgcctgcgtccacactgcaaggacttcctggagaagatcgccaagctgtacgagctgcaygtcttcaccttcggcagccggctgtacgcacacaccatcgcaggctttttagaccccgagaagaagcttttttctcaccgaatattatcaagggatgaatgtattgacccattttctaaaacgggaaaccttagaaatctctttccttgtggagactcaatggtttgcattattgatgatcgagaagatgtctggaagtttgcccccaatctgataactgtgaagaaatatgtatacttccagggcacrggtgatatgaatgcgccccctgggtcccgagaatctcagaygagaaagaaagtaaatcattctcgaggcactgaggtctcagagccatctccgcccgtgagagaccctgagggggtaacgcaggcccctggagtggagcccagcaatggcctggagaagcctgcacgggagctgaacggcagcgaggccgccaccccgcgggactcaccccgccccgggaagccagacgagagggacatctggccccctgcccaggcccccaccagcagccargagctggcaggcgctcctgagccccagggatcctgtgcgcagggtggccgggtggcaccgggacagcggcctgcccagggtgccacgggcactgacctggactttgacttatccagcgacagcgagagcagcagtgagtccgagggcacgaagtcctcctcctccgcctctgatggcgaaagcgaggggaaaagaggccggcagaagccraaggctgccccagagggagccggggcgctggcacagggcagttccctggagccggggcggcctgcagcaccgagtctccccggagaggccgagcmtggcgcgcatgccccggacaaggagcctgagctgggtgggcaggaggagggcgagcgggatggcctctgcggcctgggcaacggctgtgccgacaggaaggaggcggagaccgagtcacagaacagcgagctgtcgggggtcactgcgggtgagtccctggaccagagcatrgaggaggaggaggaggaggacacggatgaggatgaccacctcatctacctggaggagatcctggtccgtgtacacactgactactatgccaagtatgaccgctacctcaacaaggagatcgaggaggcgccggacatccgcaagatcgtgccggagctcaagagcaaggtgctggcagacgtggccataattttcagtgggctacacccgacaaacttcccgatagagaagacgcgggagcattaccacgccacggcgctgggagcraagatcctcactcggctggtgctgagccccgacgcccctgacagggccacgcacctgatcgccgcgcgagctggcacagagaaggtgctgcaggcacaggagtgcggacacctgcacgtggtcaaccctgactggctgtggagctgcctggagcgctgggacaaggtggaggagcagctcttcccgctcagggacgatcacaccaaggcacagagggagaacagccctgcggcctttcccgaccgggagggtgtgccccccaccgcctygttccacccgatgccggttcttcccaaggcccagcctggccccgaggttcggatctaygactccaacacggggaagctcatcaggacsggcgcccgggggcccccagcaccctccagctccctacccatccgccaggagccctcttcyttcaggtggacgacatccttggagaaggcagcgacgacagcgacagcgagaagaggaggcctgaggagcaggaggaggagccccagccccggaagccagggacccgcagggagcggacgctcggggcacctgcgtccagcgagaggagcgcggcagggggccgggggcccagaggccacaagaggaagctgaatgaagaggacgccgccagcgagtccagcagggagtccagcaacgaggaygagggcagcagctccgaggccgacgagatggccaaggcgctggaggcggagctcaacgacctcatgtgagcgcgggcagcgggcagggactgaagcctgacygacctccagcagcactcrgacgtccccggaccagccctcagtctcggtccacgctgctttcttcccaaaggacatgtatatttgcagagctccacatacagaaacacattattttgcagaaataggtgtttttaagaagttttactacaggaatgtctacttttgtaagtgacaggtgttaaaggcccaggtgtgctgtgccaaagagctcagcagaggctcacgtggcccaggctggtgcgcccgctgtctcggtaaggggcgggttggtgtgttttccccttgtgtaccagagcacattccttaggggacggctttgggggtcccacgagacatggactaggagtttaagcaggacagtgtgcgtgcacgagctccgagcccagcacagacatgcctggaacccccgccgcctgctgctccctcctagggaacccatttccggggaacgccgtgactgtcgggcagcctggagcttcctgcagcctcctacgcagggtccacgccacgtggcctgggctgccatcctgccgtcctcccactggcatcctggcaagggggcgttgcttttcctgggcggccttttatgtcttggagacacctgatgtaaagtttctgtaaatctatttcatatctgacccaccaaacagatttctctttaataaaaatcctttttgtaagttctcttctcgtgggtgtgtggcagcggtgagcacccgcctcctccctcgctgggatccagctccttagctgtgaaacagaaacgaaaaaattcccacggacrggaccgtgtggaacggcagaaatggaaaccgcagaactgcgagcgtgatgatctcagggtttcgcctctgagcataagaaccaggcttgtagctggtattttaaaacggttaagtgtgaagaattactctcttgcattattttcatccttcccttttgtttgtttgggatgcgggggcccgagagctacaggtaggtgctgggctatggccgccgccaggacccctcccggccagcagcctcggctcacgtcccctcctcctcccagcatcagtcccgcagcgtggcggtgggaggctgcacc

SEQ ID NO: 271 - DNA, 480 bp, Homo sapiens
atgtttggtgaagagctgcctgacgctcaggacggagagcagcctggcccttctagaagaaagcracagcccagtatgtctgagacaatgccgctgtacactctttgtaaggaggatttagagagtatggacaaagaggtgagccaaccccacgccccggtgcccgcgccagcgctcgtgctggggccgcagagctctggccgccccctgatagaaggttccacaacagtccggatgttagggatgggcgatctgcgcagcaccgtccttcggagactgttctttaggaggactgtcctggaaaaccacatcccatgtcctcctgtcttcatgttcccaccagagcctatcctccctgcccgcctggcaccgctgtcctctggagagagccaccattctgtttgcatccagaaggcagcagaggttcttgaggaggaaaacagctcctgtgtatcttcaacagtagcagaaaaatgcaga

SEQ ID NO: 272 - DNA, 1590 bp, Homo sapiens
atgcgcgtgcgcggcccggcccggctgmtcgcttcgggtgctcgactcctgttgcgcatgctcagcgcgctgcccggctggggacccrcgcacctgcagcgcccgctgctcggccctgcatcctgcctgggcatcctgcgcccggccatgacggcgcactcattcgccctcccggtcatcatcttcaccacgttctggggcctcgtcggcatcgccgggccctggttcgtgccgaagggacccaaccgcgggccttgtgaggtgctggctgcatttgttctgacccgtgtcctcttctgctgcagagtgatcatcaccatgctggtcgccaccgccgtctgctgttacctcttggcctgcctggttcctggaagtcttcccagtcttcccagccagcccgggccctggggagccctgggcacagcagcggccgaggggatgtcctgctccaatacccgcactgctctggagtttgccctctttcccaaggagatgctgctggggagctggtatgggtggggtctttccctttacagacggggcagatgccaggactcagcccatcctgaggaggacacgtgtcctcatggagagggtgctccggcccaggcgggggagtcrgtgcccagtcagcagctctgccaccatcctgctgggaactgggggggcctctattgggttataggcaaggccttttctctggcatggaattgttaattttctgacacgtctagatgtgaaatttctgaaaatgttgaagcagagaaacattcacacacaaaaagcaacatagtcatgtgggtccagatggcctcagtcctagatgttggcaccctttgctgtgtctcctcagagtatcctgttccgcctcctgccacctggacctccctcagtggatgtcttccctcccccgaccccagcctgtcagtccgagcacagtgcaggtttggctctgacttgggcttttggctgcagtgggggtggatttcagagcctctcatggcagcatctaagtgaccagagctgggatgagagaggggaaggggcaatgtgagtggcgctatgggacgggccagccctgctcctgagccagccccgccctctgccccctggccctgggctctgtgctagggatggtgaagaatgggggcgtgccagcctggcaggagtgggaagcaacacgcaggggtcccggacctctccagccttgccctcacgcttatccgagctcccagtgtggttagcacagagctcacccaccttgcctggctcccagctggggcctgtcctcactggtgctccaggggaagaaacgacagcctcacttctgtatggactgctgatgtggcctgccatcctgttcagcgggcattgtctttggagcagcaggagamtaggatgcctctcactcacatgccagttcctggctggccagctgctcagggctcaggctggggcctcccattgacatcctccccctacactccctctctgagcctccgtcgcccctcctgttgggtaagggtgttgagtgtgacttgtgctgaaaacctggttcatatataataaataatggtgatgaaaagatta

SEQ ID NO: 273 - DNA, 1991 bp, Homo sapiens
gagcttgccgctgcgctttacggaaacgagtggccttcagytctgtcaatctggagctggaggcctcaaagtggggaggaggaggagggtgggataaagaggaaaggagcgtggaggacgtgtggttactcaaagaacagctaagaattttgcaatcggcctgagcggggcggtggtggggctgagcaaaaggaggaggagccaggagacattgggaatggacccaggagttccggacgcccgtcttccagcgcagcctcggtgggagggcggggcmtaaagtcccgccacgcccccacaatatttacatatttatgaggaaccatcgagatctttgaagaaccagctagcctagaggagccagaacatctcgctccycgcgcgtttccgtttccgctaggactctggcrgttggtgagcatcatggcaaccgttacagccacaaccaaagtcccggagatccgtgatgtaacaaggattgagcgaatcggtgcccactcccacatccggggactggggctggacgatgccttggagcctcggcaggcttcgcarggcatggtgggtcagctggcggcacggcgggcggcyggcgtggtgctggagatgatccgggaagggaagattgccggtcgggcagtccttattgctggccagccgggcacggggaagacggccatcgccatgggcatggcgcaggccctgggccctgacacgccattcacagccatcgccggcagtgaaatcttctccctggagatgagcaagaccgaggcgctgacgcaggccttccggcggtccatcggcgttcgcatcaaggaggagacggagatcatcgaaggggaggtggtggagatccagattgatcgaccagcaacagggacgggctccaaggtgggcaaactgaccctcaagaccacagagatggagaccatctacgacctgggcaccaagatgattgagtccctgaccaaggacaaggtccaggccggggacgtgatcaccatcgacaaggcgacgggcaagatctccaagytgggccgctccttcacacgcgcccgcgactacgacgctatgggctcccagaccaagttcgtgcagtgcccagatggggagctccagaaacgcaaggaggtggtgcacaccgtgtccctgcacgagatcgacgtcatcaactctcgcacccagggcttcctggcgctcttctcaggtgacacaggggagatcaagtcagaagtccgtgagcagatcaatgccaaggtggctgagtggcgcgaggagggcaaggcggagatcatccctggagtgctgttcatcgacgaggtccacatgctggacatcgagagcttctccttcctcaaccgggccctggagagtgacatggcgcctgtcctgatcatggccaccaaccgtggcatcacgcgaatccggggcaccagctaccagagccctcacggcatccccatagacctgctggaccggctgcttatcgtctccaccaccccctacagcgagaaagacacgaagcagatcctccgcatccggtgcgaggaagaagatgtggagatgagtgaggacgcctacacggtgctgacccgcatcgggctggagacgtcactgcgctacgccatccagctcatcacagctgccagcttggtgtgccggaaacgcaagggtacagaagtgcaggtggatgacatcaagcgggtctactcactcttcctggacgagtcccgctccacgcagtacatgaaggagtaccaggacgccttcctcttcaacgaactcaaaggcgagaccatggacacctcctgagttggatgtcatcccccgaccccaccctgttttccaccagagttctgacactgtgactctgtataaaatggttgggaagctgcacccaccctgtgtatgtgtggttgccctgagcccacagaaagacacckccagagtgcrgattgagaagcctttattgtgggaggatcggggtg

SEQ ID NO: 274 - DNA, 1970 bp, Homo sapiens
gagcttgccgctgcgctttacggaaacgagtggccttcagytctgtcaatctggagctggaggcctcaaagtggggaggaggaggagggtgggataaagaggaaaggagcgtggaggacgtgtggttactcaaagaacagctaagaattttgcaatcggcctgagcggggcggtggtggggctgagcaaaaggaggaggagccaggagacattgggaatggacccaggagttccggacgcccgtcttccagcgcagcctcggtgggagggcggggcmtaaagtcccgccacgcccccacaatatttacatatttatgaggaaccatcgagatctttgaagaaccagctagcctagaggagccagaacatctcgctccycgcgcgtttccgtttccgctaggactctggcrgttgacagccacaaccaaagtcccggagatccgtgatgtaacaaggattgagcgaatcggtgcccactcccacatccggggactggggctggacgatgccttggagcctcggcaggcttcgcarggcatggtgggtcagctggcggcacggcgggcggcyggcgtggtgctggagatgatccgggaagggaagattgccggtcgggcagtccttattgctggccagccgggcacggggaagacggccatcgccatgggcatggcgcaggccctgggccctgacacgccattcacagccatcgccggcagtgaaatcttctccctggagatgagcaagaccgaggcgctgacgcaggccttccggcggtccatcggcgttcgcatcaaggaggagacggagatcatcgaaggggaggtggtggagatccagattgatcgaccagcaacagggacgggctccaaggtgggcaaactgaccctcaagaccacagagatggagaccatctacgacctgggcaccaagatgattgagtccctgaccaaggacaaggtccaggccggggacgtgatcaccatcgacaaggcgacgggcaagatctccaagytgggccgctccttcacacgcgcccgcgactacgacgctatgggctcccagaccaagttcgtgcagtgcccagatggggagctccagaaacgcaaggaggtggtgcacaccgtgtccctgcacgagatcgacgtcatcaactctcgcacccagggcttcctggcgctcttctcaggtgacacaggggagatcaagtcagaagtccgtgagcagatcaatgccaaggtggctgagtggcgcgaggagggcaaggcggagatcatccctggagtgctgttcatcgacgaggtccacatgctggacatcgagagcttctccttcctcaaccgggccctggagagtgacatggcgcctgtcctgatcatggccaccaaccgtggcatcacgcgaatccggggcaccagctaccagagccctcacggcatccccatagacctgctggaccggctgcttatcgtctccaccaccccctacagcgagaaagacacgaagcagatcctccgcatccggtgcgaggaagaagatgtggagatgagtgaggacgcctacacggtgctgacccgcatcgggctggagacgtcactgcgctacgccatccagctcatcacagctgccagcttggtgtgccggaaacgcaagggtacagaagtgcaggtggatgacatcaagcgggtctactcactcttcctggacgagtcccgctccacgcagtacatgaaggagtaccaggacgccttcctcttcaacgaactcaaaggcgagaccatggacacctcctgagttggatgtcatcccccgaccccaccctgttttccaccagagttctgacactgtgactctgtataaaatggttgggaagctgcacccaccctgtgtatgtgtggttgccctgagcccacagaaagacacckccagagtgcrgattgagaagcctttattgtgggaggatcggggtg

SEQ ID NO: 275 - DNA, 1911 bp, Homo sapiens
gactctggcrgttggtgagcatcatggcaaccgttgaactccaactttcaaaatcatcttggcgcaacggccggttccgcagtccttggcgccagtgtgtgatgaggagggttgtaggaccttgcgcttcgagccatttgggagccttggattgttagtggtgccaatggcacttgagttccaagctggaagcacaggcaggtgtggtggtgcaggcctgtaatcccagctactcagaaggctgaggcaggagaatcgcttgaacctgggaggcagaagttgcagtgagccaagatcgcgccactgcattccagcctgggcgacaaagcgagactctgtctccaaaaaaaaaaagacagccacaaccaaagtcccggagatccgtgatgtaacaaggattgagcgaatcggtgcccactcccacatccggggactggggctggacgatgccttggagcctcggcaggcttcgcarggcatggtgggtcagctggcggcacggcgggcggcyggcgtggtgctggagatgatccgggaagggaagattgccggtcgggcagtccttattgctggccagccgggcacggggaagacggccatcgccatgggcatggcgcaggccctgggccctgacacgccattcacagccatcgccggcagtgaaatcttctccctggagatgagcaagaccgaggcgctgacgcaggccttccggcggtccatcggcgttcgcatcaaggaggagacggagatcatcgaaggggaggtggtggagatccagattgatcgaccagcaacagggacgggctccaaggtgggcaaactgaccctcaagaccacagagatggagaccatctacgacctgggcaccaagatgattgagtccctgaccaaggacaaggtccaggccggggacgtgatcaccatcgacaaggcgacgggcaagatctccaagytgggccgctccttcacacgcgcccgcgactacgacgctatgggctcccagaccaagttcgtgcagtgcccagatggggagctccagaaacgcaaggaggtggtgcacaccgtgtccctgcacgagatcgacgtcatcaactctcgcacccagggcttcctggcgctcttctcaggtgacacaggggagatcaagtcagaagtccgtgagcagatcaatgccaaggtggctgagtggcgcgaggagggcaaggcggagatcatccctggagtgctgttcatcgacgaggtccacatgctggacatcgagagcttctccttcctcaaccgggccctggagagtgacatggcgcctgtcctgatcatggccaccaaccgtggcatcacgcgaatccggggcaccagctaccagagccctcacggcatccccatagacctgctggaccggctgcttatcgtctccaccaccccctacagcgagaaagacacgaagcagatcctccgcatccggtgcgaggaagaagatgtggagatgagtgaggacgcctacacggtgctgacccgcatcgggctggagacgtcactgcgctacgccatccagctcatcacagctgccagcttggtgtgccggaaacgcaagggtacagaagtgcaggtggatgacatcaagcgggtctactcactcttcctggacgagtcccgctccacgcagtacatgaaggagtaccaggacgccttcctcttcaacgaactcaaaggcgagaccatggacacctcctgagttggatgtcatcccccgaccccaccctgttttccaccagagttctgacactgtgactctgtataaaatggttgggaagctgcacccaccctgtgtatgtgtggttgccctgagcccacagaaagacacckccagagtgcrgattgagaagcctttattgtgggaggatcggggtg

SEQ ID NO: 276 - DNA, 1556 bp, Homo sapiens
acagccacaaccaaagtcccggagatccgtgatgtaacaaggattgagcgaatcggtgcccactcccacatccggggactggggctggacgatgccttggagcctcggcaggcttcgcarggcatggtgggtcagctggcggcacggcgggcggcyggcgtggtgctggagatgatccgggaagggaagattgccggtcgggcagtccttattgctggccagccgggcacggggaagacggccatcgccatgggcatggcgcaggccctgggccctgacacgccattcacagccatcgccggcagtgaaatcttctccctggagatgagcaagaccgaggcgctgacgcaggccttccggcggtccatcggcgttcgcatcaaggaggagacggagatcatcgaaggggaggtggtggagatccagattgatcgaccagcaacagggacgggctccaaggtgggcaaactgaccctcaagaccacagagatggagaccatctacgacctgggcaccaagatgattgagtccctgaccaaggacaaggtccaggccggggacgtgatcaccatcgacaaggcgacgggcaagatctccaagytgggccgctccttcacacgcgcccgcgactacgacgctatgggctcccagaccaagttcgtgcagtgcccagatggggagctccagaaacgcaaggaggtggtgcacaccgtgtccctgcacgagatcgacgtcatcaactctcgcacccagggcttcctggcgctcttctcaggtgacacaggggagatcaagtcagaagtccgtgagcagatcaatgccaaggtggctgagtggcgcgaggagggcaaggcggagatcatccctggagtgctgttcatcgacgaggtccacatgctggacatcgagagcttctccttcctcaaccgggccctggagagtgacatggcgcctgtcctgatcatggccaccaaccgtggcatcacgcgaatccggggcaccagctaccagagccctcacggcatccccatagacctgctggaccggctgcttatcgtctccaccaccccctacagcgagaaagacacgaagcagatcctccgcatccggtgcgaggaagaagatgtggagatgagtgaggacgcctacacggtgctgacccgcatcgggctggagacgtcactgcgctacgccatccagctcatcacagctgccagcttggtgtgccggaaacgcaagggtacagaagtgcaggtggatgacatcaagcgggtctactcactcttcctggacgagtcccgctccacgcagtacatgaaggagtaccaggacgccttcctcttcaacgaactcaaaggcgagaccatggacacctcctgagttggatgtcatcccccgaccccaccctgttttccaccagagttctgacactgtgactctgtataaaatggttgggaagctgcacccaccctgtgtatgtgtggttgccctgagcccacagaaagacacckccagagtgcrgattgagaagcctttattgtgggaggatcggggtg

SEQ ID NO: 277 - DNA, 1740 bp, Homo sapiens
atttcaagtcctgccctcccaccagcgcctgcgccccgcagcagtgtccggctccctgccgacgccctggagctgggacggcctggggcgctggtcggccgccttcccccagaaggaggcgtgagcggggcgtggccggaacgtctctcttcggagccgcgccccgggcgggcacagttacgcgccgcacggatcatggccgcagccgctctggggcagatctgggcacgaaagcttctctctgtcccttggcttctgtgtggtcccagaagatatgcctcctccagtttcaaggctgcagacctgcagctggaaatgacacagaagcctcataagaagcctggccccggcgagcccctggtgtttgggaagacatttaccgaccacatgctgatggtggaatggaatgacaagggctggggccagccccgaatccagcccttccagaacctcacgctgcacccagcctcctccagcctccactactccctgcagctgtttgagggcatgaaggcgttcaaaggcaaagaccagcaggtgcgcctcttccgcccctggctcaacatggaccggatgctgcgctcagccatgcgcctgtgcctgccgagtttcgacaagctggagttgctggagtgcatccgccggctcatcgaagtggacaaggactgggtccccgatgccgccggcaccagcctctatgtgcggcctgtgctcattgggaacgagccctcgctgggtgtcagccagcccasgcgcgcgctcctgttcgtcattctctgcccagtgggtgcctacttccctggaggctccgtgaccccggtctccctcctggccgacccagccttcatccgggcctgggtgggcggggtcggcaactacaagttaggtgggaattatgggcccaccgtgttagtgcaacaggaggcactcaagcggggctgtgaacaggtcctctggctgtatgggcccgaccaccagctcaccgaggtgggaaccatgaacatctttgtctactggacccacgaagatggggtgctggagctggtgacgcccccgctgaatggtgttatcctgcctggagtggtcagacagagtctactggacatggctcagacctggggtgagttccgggtggtggagcgcacgatcaccatgaagcagttgctgcgggccytggaggagggccgcgtgcgggaagtctttggctcgggcaccgcttgccaggtctgcccagtgcaccgaatcctgtacaaagacaggaacctccacattcccaccatggaaaatgggcctgagctgatcctccgcttccagaaggagctgaaggagatccagtacggaatcagagcccacgagtggatgttcccggtgtgaagctgcaggctgtgctccagatccaccgacccgtrgcatctcgtcacgccagcactcgcctccctaccaatgaytcacctgaagtgcaatacgaaataaaaggccagcgggcggcgtctgggtctctggcgcccccatgtggttgcgamactcccaaagccgtaagggccgacccaggcatcttggcccccagcccctcgtcgcgggttcaggtccgcccattactccttgtcgtgcggtcaaggatacaccttggccccgattccggatctctccgttctcaggccagacccctggtgctgccgttgatttttttttctctgtctttgctgcaattttgaaataaaatgccaaagaacacacatt

SEQ ID NO: 278 - DNA, 1521 bp, Homo sapiens
atctgggcacgaaagcttctctctgtcccttggcttctgtgtggtcccagaagatatgcctcctccagtttcaaggctgcagacctgcagctggaaatgacacagaagcctcataagaagcctggccccggcgagcccctggtgtttgggaagacatttaccgaccacatgctgatggtggaatggaatgacaagggctggggccagccccgaatccagcccttccagaacctcacgctgcacccagcctcctccagcctccactactccctgcagctgtttgagggcatgaaggcgttcaaaggcaaagaccagcaggtgcgcctcttccgcccctggctcaacatggaccggatgctgcgctcagccatgcgcctgtgcctgccgagtttcgacaagctggagttgctggagtgcatccgccggctcatcgaagtggacaaggactgggtccccgatgccgccggcaccagcctctatgtgcggcctgtgctcattgggaacgagccctcgctgggtgtcagccagcccasgcgcgcgctcctgttcgtcattctctgcccagtgggtgcctacttccctggaggctccgtgaccccggtctccctcctggccgacccagccttcatccgggcctgggtgggcggggtcggcaactacaagttaggtgggaattatgggcccaccgtgttagtgcaacaggaggcactcaagcggggctgtgaacaggtcctctggctgtatgggcccgaccaccagctcaccgaggtgggaaccatgaacatctttgtctactggacccacgaagatggggtgctggagctggtgacgcccccgctgaatggtgttatcctgcctggagtggtcagacagagtctactggacatggctcagacctggggtgagttccgggtggtggagcgcacgatcaccatgaagcagttgctgcgggccytggaggagggccgcgtgcgggaagtctttggctcgggcaccgcttgccaggtctgcccagtgcaccgaatcctgtacaaagacaggaacctccacattcccaccatggaaaatgggcctgagctgatcctccgcttccagaaggagctgaaggagatccagtacggaatcagagcccacgagtggatgttcccggtgtgaagctgcaggctgtgctccagatccaccgacccgtrgcatctcgtcacgccagcactcgcctccctaccaatgaytcacctgaagtgcaatacgaaataaaaggccagcgggcggcgtctgggtctctggcgcccccatgtggttgcgamactcccaaagccgtaagggccgacccaggcatcttggcccccagcccctcgtcgcgggttcaggtccgcccattactccttgtcgtgcggtcaaggatacaccttggccccgattccggatctctccgttctcaggccagacccctggtgctgccgttgatttttttttctctgtctttgctgcaattttgaaataaaatgccaaagaacacacatt

SEQ ID NO: 279 - DNA, 2210 bp, Homo sapiens
tttgagacggagtctcactctgtcgcccaggctggagtgcagtggcatcatctcggctcactgcaacctctgcctccccgattcaagcaattctcctgcctcagctttccgagtagctaagattacaggcgcccgccaccacgcccggstaattttttgtatttttagtagagacggggtttcatcatgttggaccaggctggtctctaactcctgacctcaggtaatccgcccgcttcggcctcccaaagtgctaagattacagacctgagccacttcgcctggcagggaccgtatttcaagtcctgccctcccaccagcgcctgcgccccgcagcagtgtccggctccctgccgacgccctggagctgggacggcctggggcgctggtcggccgccttcccccagaaggaggcgtgagcggggcgtggccggaacgtctctcttcggagccgcgccccgggcgggcacagttacgcgccgcacggatcatggccgcagccgctctggggcaggtgggttcgcagccccgcgccggggtctgggaaataaccgggggaggcgcacttccgggaagaccactggcctgcagccggtccgactcggcgccgctcctcccgccctggggttccgctgcagggcgcggaggaggatggcgccctttggaaaggagcacgaggctttaatgggatctgggcacgaaagcttctctctgtcccttggcttctgtgtggtcccagaagatatgcctcctccagtttcaaggctgcagacctgcagctggaaatgacacagaagcctcataagaagcctggccccggcgagcccctggtgtttgggaagacatttaccgaccacatgctgatggtggaatggaatgacaagggctggggccagccccgaatccagcccttccagaacctcacgctgcacccagcctcctccagcctccactactccctgcagctgtttgagggcatgaaggcgttcaaaggcaaagaccagcaggtgcgcctcttccgcccctggctcaacatggaccggatgctgcgctcagccatgcgcctgtgcctgccgagtttcgacaagctggagttgctggagtgcatccgccggctcatcgaagtggacaaggactgggtccccgatgccgccggcaccagcctctatgtgcggcctgtgctcattgggaacgagccctcgctgggtgtcagccagcccasgcgcgcgctcctgttcgtcattctctgcccagtgggtgcctacttccctggaggctccgtgaccccggtctccctcctggccgacccagccttcatccgggcctgggtgggcggggtcggcaactacaagttaggtgggaattatgggcccaccgtgttagtgcaacaggaggcactcaagcggggctgtgaacaggtcctctggctgtatgggcccgaccaccagctcaccgaggtgggaaccatgaacatctttgtctactggacccacgaagatggggtgctggagctggtgacgcccccgctgaatggtgttatcctgcctggagtggtcagacagagtctactggacatggctcagacctggggtgagttccgggtggtggagcgcacgatcaccatgaagcagttgctgcgggccytggaggagggccgcgtgcgggaagtctttggctcgggcaccgcttgccaggtctgcccagtgcaccgaatcctgtacaaagacaggaacctccacattcccaccatggaaaatgggcctgagctgatcctccgcttccagaaggagctgaaggagatccagtacggaatcagagcccacgagtggatgttcccggtgtgaagctgcaggctgtgctccagatccaccgacccgtrgcatctcgtcacgccagcactcgcctccctaccaatgaytcacctgaagtgcaatacgaaataaaaggccagcgggcggcgtctgggtctctggcgcccccatgtggttgcgamactcccaaagccgtaagggccgacccaggcatcttggcccccagcccctcgtcgcgggttcaggtccgcccattactccttgtcgtgcggtcaaggatacaccttggccccgattccggatctctccgttctcaggccagacccctggtgctgccgttgatttttttttctctgtctttgctgcaattttgaaataaaatgccaaagaacacacatt

SEQ ID NO: 280 - DNA, 3377 bp, Homo sapiens
gcctggcgttccaggggcggccggatgtggcctgcctttgcggagggtgcgctccggccacgaaaagcggactgtggatctgccacctgcaagcagctcggccatgtggctccggagccatcgtcagctctgcctggycttcctgctagtctgtgtcctctctgtaatcttcttcctccatatccatcaagacagctttccacatggcctaggcctgtcgatcctgtgtccagaccgccgcctggtgacacccccagtggccatcttctgcctgccgggtactgcgatgggccccaacgcctcctcttcctgtccccagcaccctgcttccctctccggcacctggactgtctaccccaatggccggtttggtaatcagatgggacagtatgccacgctgctggctctggcccagctcaacggccgccgggcctttatcctgcctgccatgyatgccgccctggccccggtattccgcatcaccctgcccgtgctggccccagaagtggacagccgcacgccgtggcgggagctgcagcttcackactggatgtcggaggagyrmgcggacttgagagatcctttcctgaagcwctctggcttcccctgctcttgsactttcttccaccatctccgggaacagatccgcagagagttcaccctgcacgaccaccttcgggaagaggcgcagagtgtgctgggtcagctccgcctgggccgcacaggggaccgcccgcgcacctttgtcggcgtccacgtgyrccgtggggactatctgcaggttatgcctcagcgctrgaagggtgtggtgggcgacagcgccyacckccggcaggccatggactggttccgggcacggcacgaagcccccgttttcgwggtcaccagcaacggcatggagtgstgtaaagaaaacatcgacacmtccyagggcratgtgacgtttgctggcgatggacaggaggctacaccgtggaaagactttgccctgctcacacagtgcaaccacaccattatgaccattggcaccttcggcttctgggctgyctasctggctggcggagacactgtctacctggccaacttcaccctgccagactctgagttcctgaagatctttaagccggaggcggccttcctgcccragtgsgtgggcattaatgcagacttgtctccactctggacattggctaagccttgagagccagggagactttctgaagtagcctgatctttctagagccagcagtacrtggcttcagaggcctggcatcttctggagaagcttgtggtgttcctgaagcaaatgggtgcccgtatccagagtgattctagttgggagagttggagagaagggggacgtttctggaactgtctgaayattctagaactagcaaaacatcttttcctgatggctggcaggcagttctagaagccacagtgcccacctgctcttcccagcccatatctacagtacttccagatggctgcccccaggaatggggaactctccctctggtctactctagaagaggggttacttctcccctgggtcctccaaagactgaaggagcatatgattgctccagagcaagcattcaccaagtccccttctgtgtttctggagtgattctagagggagacttgttctagagaggaccaggtttgatgcctgtgaagaaccctgcagggcccttatggacaggatggggttctggaaatccagataactaaggtgaagaatctttttagttttttttttttttttttggagacagggtctcgctctgttgcccaggctggagtgcagtggcgtgatcttggctcactgcaacttccgcctcctgtgttcaagcgattctcctgtctcagcctcctgagtagatgggactacaggcacaggccattatgcctggctaatttttgtatttttagtagagacarggtttcaccatgttggccaggatggtctcgatctcctgaccttgtcatccacctgtcttggcctcccaaagtgctgggattactggcatgagccactgtgcccagcccggatatttttttttwaattatttatttatttatttatttattgagacggagtcttgctctgtagcccaggccagagtgcagtggcgcgatctcagctcactgcaagctctgcctcccgggttcatgccattctgcctcagcctcctgagtagctgggactacaggcgcccgccaccacgcccggctaattttttttgtatttttagtagagacggggtttcatcgtgttaaccaggatggtctcgatctcctgacctcgtgatctgcccacctcggcctcccacagtgctgggattaccggcgtgagccaccatgcctggcccggataattttttttaatttttgtagagacgaggtcttgtgatattgcccaggctgttcttcaactcctgggctcaagcagtcctcccaccttggcctcccagaatgctgggtttayagatgtgagccagcacaccgggccaagtgaagaatctaatgaatgtgcaacctaattgtagcatctaatgaatgttccaccattgctggaaaaattgagatggaaaacaaaccatctctagttggccagcgtcttgctctgttcacagtctctggaaaagctggggtagttggtgagcagagcgggactctgtccaacaagccccacagcccctcaaagacttttttttgtttgttttgagcagacaggctaaaatgtgaacgtggggtgagggatcactgccaaaatggtacagcttctggagcagaactttccagggatccagggacacttttttttaaagctcataaactgccaagagctccatatattgggtgtgagttcaggttgcctctyacaatgaaggaagttggtctttgtctgcaggtgggctgctgagggtctgggatctkttttctggaagtgtgcaggtataaacacaccctctgtgcttgtgacaaactggcaggtaccgtgctcattgctaaccactgtctgtccctgaactcccagaaccactacatctggctttgggcaggtctgagataaaacgatctaaaggtaggcagaccctggacccagcctcagatccaggcaggagcacgaggtctggccaaggtggacggggttgtcgagatctcaggagccccttgctgttttttggagggtgaaagaagaaaccttaaacatagtcagctctgatcacatcccctgtctactcatccagaccccatgcctgtaggcttatcagggagttacagttacaattgttacagtactgttcccaactcagctgccacgggtgagagagcaggaggtatgaattaaaagtctacagcactaaccc

SEQ ID NO: 281 - DNA, 617 bp, Homo sapiens
tgtccaggttaccccagcatcctatcacctcctggtggccttgccgcccccacaaccccgaggtatawagccagatacacgaggcaggggatgcaccaaggatggagatgctccaggggctgctgctgttgctgctgctgagcatgggcggggcatgggcatccagggagccgcttcggccayggtgccrccccatcaatgccaycctggctgtsgagaaggagggctgcccmgtgtgcatcaccgtcaacaccaccatctgtgccggctactgccccaccatgatgcgcgtgctgcaggcggtcctgccgcccctgcctcrggtggtgtgcacctaccgtgatgtgcgcttcgagtccatccggctccctggctgcccgcgtggygtggaccccgtggtctccttccctgtggctctcagctgtcgctgtggaccctgccgccgcagcacctctgactgtgggrgtcccaaagaccaccccttgacctgtgaccacccccaactctcaggcctcctcttcctctaaagaccctccccgcagccttccaagtccatcccgactcctggagccctgacaccccgatcctcccacaataaaggcttctcaatcygcact

SEQ ID NO: 282 - DNA, 501 bp, Homo sapiens
gggctgctgctgttgctgctgctgagcatgggcggggcatgggcatccagggagccgcttcggccayggtgccrccccatcaatgccaycctggctgtsgagaaggagggctgcccmgtgtgcatcaccgtcaacaccaccatctgtgccggctactgccccaccatgatgcgcgtgctgcaggcggtcctgccgcccctgcctcrggtggtgtgcacctaccgtgatgtgcgcttcgagtccatccggctccctggctgcccgcgtggygtggaccccgtggtctccttccctgtggctctcagctgtcgctgtggaccctgccgccgcagcacctctgactgtgggrgtcccaaagaccaccccttgacctgtgaccacccccaactctcaggcctcctcttcctctaaagaccctccccgcagccttccaagtccatcccgactcctggagccctgacaccccgatcctcccacaataaaggcttctcaatcygcact

SEQ ID NO: 283 - DNA, 7526 bp, Homo sapiens
caacggtcaataatgaaggtggctgcggcgcggcggcaggctcagctgcgccgggcgggggcggcgccggggccgcgcctgtaggactcggggccgacgccgcgggatggggacgcggcgcggggagtgaggcagtggcggcggcggcggtaagcggaacttcggcccgaggggctcgcccgctcccgcctctgtcttgtcggcctccacctgcagccccgcggcccccgcgccccgcgggacccggacggcgacgacgggggaatgtggcgctggatccggcagcagctgggttttgacccaccacatcagagtgacacaagaaccatctacgtagccaacaggtttcctcagaatggcctttacacacctcagaaatttatagataacaggatcatttcatctaagtacactgtgtggaattttgttccaaaaaatttatttgaacagttcagaagagtggcaaacttttattttcttattatatttttggttcagcttatgattgatacacctaccagtccagttaccagtggacttccattattctttgtgataacagtaactgccataaagcagggatatgaagattggttacggcataactcagataatgaagtaaatggagctcctgtttatgttgttcgaagtggtggccttgtaaaaactagatcaaraaacattcgggtgggtgatattgttcgaatagccaaagatgaaatttttcctgcagacttggtgcttctgtcctcagatcgactggatggttcctgtcacgttacaactgctagtttggacggagaaactaacctgaagacacatgtggcagttccagaaacagcattattacaaacagttgccaatttggacactctagtagctgtaatagaatgccagcaaccagaagcagacttatacagattcatgggacgaatgatcataacccaacaaatggaaraaattgtaagacctctggggccggagagtctcctgcttcgtggagccagattaaaaaacacaaaagaaatttttggtgttgcggtatacactggaatggaaactaagatggcattaaattacaagagcaaatcacagaaacgatctgcagtagaaaagtcaatgaatacatttttgataatttatctagtaattcttatatctgaagctgtcatcagcactatcttgaagtatacatggcaagctgaagaaaaatgggatgaaccttggtataaccaaaaaacagaacatcaaagaaatagcagtaagattctgagatttatttcagacttccttgcttttttggttctctacaatttcatcattccaatttcattatatgtgacagtcgaaatgcagaaatttcttggatcattttttattggctgggatcttgatctgtatcatgaagaatcagatcagaaagctcaagtcaatacttccgatctgaatgaagagcttggacaggtagagtacgtgtttacagataaaactggtacactgacagaaaatgagatgcagtttcgggaatgttcaattaatggcatgaaataccaagaaattaatggtagacttgtacccgaaggaccaacaccagactcttcagaaggaaacttatcttatcttagtagtttatcccatcttaacaacttatcccatcttacaaccagttcctctttcagaaccagtcctgaaaatgaaactgaactaattaaagaacatgatctcttctttaaagcagtcagtctctgtcacactgtacagattagcaatgttcaaactgactgcactggtgatggtccctggcaatccaacctggcaccatcgcagttggagtactatgcatcttcaccagatgaaaaggctctagtagaagctgctgcaaggattggtattgtgtttattggcaattctgaagaaactatggaggttaaaactcttggaaaactggaacggtacaaactgcttcatattctggaatttgattcagatcgtaggagaatgagtgtaattgttcaggcaccttcaggtaaccaatctaaactttcatgaatttttatttatgtaatattaagagtctgataactcattttttttgtctctaggtgagaagttattatttgctaaaggagctgagtcatcaattctccctaaatgtataggtggagaaatagaaaaaaccagaattcatgtagatgaatttgctttgaaagggctaagaactctgtgtatagcatatagaaaatttacatcaaaagagtatgaggaaatagataaacgcatatttgaagccaggactgccttgcagcagcgggaagagaaattggcagctgttttccagttcatagagaaagacctgatattacttggagccacagcagtagaagacagactacaagataaagttcgagaaactattgaagcattgagaatggctggtatcaaagtatgggtacttactggggataaacatgaaacagctgttagtgtgagtttatcatgtggccattttcatagaaccatgaacatccttgaacttataaaccagaaatcagacagcgagtgtgctgaacaattgaggcagcttgccagaagaattacagaggatcatgtgattcagcatgggctggtagtggatgggaccagcctatctcttgcactcagggagcatgaaaaactatttatggaagtttgcagaaattgttcagctgtattatgctgtcgtatggctccactgcagaaagcaaaagtaataagactaataaaaatatcacctgagaaacctataacattggctgttggtgatggtgctaatgacgaatcatgggtaaagaaggaagacaggctgcaagaaacagtgactatgcaatagccagatttaagttcctctccaaattgctttttgttcatggtcatttttattatattagaatagctacccttgtacagtattttttttataagaatgtgtgctttatcacaccccagtttttatatcagttctactgtttgttttctcagcaaacattgtatgacagcgtgtacctgactttatacaatatttgttttacttccctacctattctgatatatagtcttttggaacagcatgtagaccctcatgtgttacaaaataagcccaccctttatcgagacattagtaaaaaccgcctcttaagtattaaaacatttctttattggaccatcctgggcttcagtcatgcctttattttcttttttggatcctatttactaatagggaaagatacatctctgcttggaaatggccagatgttyggaaactggacatttggcactttggtcttcacagtcatggttattacagtcacagtaaagatggctctggaaactcatttttggacttggatcaaccatctcgttacctggggatctattatattttattttgtattttccttgttttatggagggattctctggccatttttgggctcccagaatatgtattttgtgtttattcagctcctgtcaagtggttctgcttggtttgccataatcctcatggttgttacatgtctatttcttgatatcataaagaaggtctttgaccgacacctccaccctacaagtactgaaaaggcacagcttactgaaacaaatgcaggtatcaagtgcttggactccatgtgctgtttcccggaaggagaagcagcgtgtgcatctgttggaagaatgctggaacgagttataggaagatgtagtccaacccacatcagcagatcatggagtgcatcggatcctttctataccaacgacaggagcatcttgactctctccacaatggactcatctacttgttaaaggggcagtagtactttgtgggagccagttcacctcctttcctaaaattcagtgtgatcaccctgttaatggccacactagctctgaaattaatttccaaaatctttgtagtagttcatacccactcagagttataatggcaaacaaacagaaagcattagtacaagcccctcccaacacccttaatttgaatctgaacatgttaaaatttgagaataaagagacatttttcatctctttgtctggtttgtcccttgtgcttatgggactcctaatggcatttcagtctgttgctgaggccattatattttaatataaatgtagaaaaaagagagaaatcttagtaaagagtattttttagtattagcttgattattgactcttctatttaaatctgcttctgtaaattatgctgaaagtttgccttgagaactctatttttttattagagttatatttaaagcttttcatgggaaaagttaatgtgaatactgaggaattttggtccctcagtgacctgtgttgttaattcattaatgcattctgagttcacagagcaaattaggagaatcatttccaaccattatttactgcagtatggggagtaaatttataccaattcctctaactgtactgtaacacagcctgtaaagttagccatataaatgcaagggtatatcatatatacaaatcaggaatcaggtccgttcaccgaacttcaaattgatgtttactaatatttttgtgacagagtataaagaccctatagtgggtaaattagatactattagcatattattaatttaatgtctttatcattggatcttttgcatgctttaatctggttaacatatttaaatttgctttttttctctttacctgaaggctctgtgtatagtatttcatgacatcgttgtacagtttaactatatcaataaaaagtttggacagtatttaaatattgcaaatatgtttaattatacaaatcagaatagtatgggtaattaaatgaatacaaaaagaagagcctctttctgcagccgacttagacatgctcttccctttctataagctagattttagaataaagggtttcagttaataatcttattttcaggttatgtcatctaacttatagcaaactaccacaatacagtgagttctgccagtgtcccagtacaaggcatatttcaggtgtggctgtggaatgtaaaaatgctcaacttgtatcaggtaatgttagcaataaattaaatgctaagaatgattaatcgggtacatgttactgtaattaactcattgcacttcaaaacctaacttccatcctgaatttatcaagtagttcagtattgtcatttgtttttgttttattgaaaagtaatgttgtcttaagatttagaagtgattattagcttgagaactattacccagctctaagcaaataatgattgtatacatattaagataatggttaaatgcggttttaccaagttttcccttgaaaatgtaattcctttatggagatttattgtgcagccctaagcttccttcccatttcatgaatataaggcttctagaattggactggcaggggaaagaatggtagagacagaaattaagactttatccttgtttgcttgtaaactattattttcttgctaatgtaacatttgtctgttccagtgatgtaaggatattaagttattaagctaaatattaattttcaaaaatagtccttctttaacttagatatttcatagctggatttaggaagatctgttattctggaagtactaaaaagaataatacaacgtacaatgtctgcattcactaattcatgttccagaagaggaaataatgaagatatactcagtagagtactaggtgggaggatatggaaatttgctcataaaatctcttataaaacgtgcatataacaaaatgacacccagtaggcctgcattacatttacatgaccgtgtttatttgccatcaaataaactgagtactgacaccagacaaagactccaaagtcataaaatagcctatgaccaactgcagcaagacaggaggtcagctcgcctataatggtgcttaaagtgtgattgatgtaattttctgtactcaccatttgaagttagttaaggagaactttatttttttaaaaaaagtaaatggcaaccactagtgtgctcatcctgaactgttactccaaatccactccgtttttaaagcaaaattatcttgtgattttaagaaaagagttttctatttatttaagaaagtaacaatgcagtctgcaagctttcagtagttttctagtgctatattcatcctgtaaaactcttactacgtaaccagtaatcacaaggaaagtgtcccctttgcatatttctttaaaattctttctttggaaagtatgatgttgataattaacttacccttatctgccaaaaccagagcaaaatgctaaatacgttattgctaatcagtggtctcaaatcgatttgcctccctttgcctcgtctgagggctgtaagcctgaagatagtggcaagcaccaagtcagtttccaaaattgcccctcagctgctttaagtgactcagcaccctgcctcagcttcagcaggcgtaggctcaccctgggcggagcaaagtatgggccagggagaactacagctacgaagacctgctgtcgagttgagaaaaggggagaatttatggtctgaattttctaactgtcctctttcttgggtctaaagctcataatacacaaaggcttccagacctgagccacacccaggccctatcctgaacaggagactaaacagaggcaaatcaaccctaggaaatacttgcattctgccctacggttagtaccaggactgaggtcatttctactggaaaagattgtgagattgaacttatctgatcgcttgagactcctaataggcaggagtcaaggccactagaaaattgacagttaagagccaaaagtttttaaaatatgctactctgaaaaatctcgtgaaggctgtaggaaaagggagaatcttccatgttggtgtttttcctgtaaagatcagtttggggtatgatataagcaggtattaataaaaataacacaccaaagagttacgtaaaacatgttttattaattttggtccccacgtacagacattttatttctattttgaaatgagttatctattttcataaaagtaaaacrctattaaagtgctgttttatgtgaaataacttgaatgttgttcctataaaaaatagatcataactcatgatatgtttgtaatcatggtaatttagatttttatgaggaatgagtatctggaaatattgtagcaatacttggtttaaaattttggacctgagacactgtggctgtctaatgtaatcctttaaaaattctctgcattgtcagtaaatgtagtatattattgtacagctactcataattttttaaagtttatgaagttatatttatcaaataaaaactttcctatataattaaaagtgttcctttatttaagcattttaagcctgtctctgtttatcacaacctgcactgccaaacttgtttcaagttaagttttactgtatttacccttcattatagcacagggatatcatttatgcctttcactgactgcagttttttaaaatgtagt

SEQ ID NO: 284 - DNA, 7463 bp, Homo sapiens
caacggtcaataatgaaggtggctgcggcgcggcggcaggctcagctgcgccgggcgggggcggcgccggggccgcgcctgtaggactcggggccgacgccgcgggatggggacgcggcgcggggagtgaggcagtggcggcggcggcggtaagcggaacttcggcccgaggggctcgcccgctcccgcctctgtcttgtcggcctccacctgcagccccgcggcccccgcgccccgcgggacccggacggcgacgacgggggaatgtggcgctggatccggcagcagctgggttttgacccaccacatcagagtgacacaagaaccatctacgtagccaacaggtttcctcagaatggcctttacacacctcagaaatttatagataacaggatcatttcatctaagtacactgtgtggaattttgttccaaaaaatttatttgaacagttcagaagagtggcaaacttttattttcttattatatttttggttcagcttatgattgatacacctaccagtccagttaccagtggacttccattattctttgtgataacagtaactgccataaagcagggatatgaagattggttacggcataactcagataatgaagtaaatggagctcctgtttatgttgttcgaagtggtggccttgtaaaaactagatcaaraaacattcgggtgggtgatattgttcgaatagccaaagatgaaatttttcctgcagacttggtgcttctgtcctcagatcgactggatggttcctgtcacgttacaactgctagtttggacggagaaactaacctgaagacacatgtggcagttccagaaacagcattattacaaacagttgccaatttggacactctagtagctgtaatagaatgccagcaaccagaagcagacttatacagattcatgggacgaatgatcataacccaacaaatggaaraaattgtaagacctctggggccggagagtctcctgcttcgtggagccagattaaaaaacacaaaagaaatttttggtgttgcggtatacactggaatggaaactaagatggcattaaattacaagagcaaatcacagaaacgatctgcagtagaaaagtcaatgaatacatttttgataatttatctagtaattcttatatctgaagctgtcatcagcactatcttgaagtatacatggcaagctgaagaaaaatgggatgaaccttggtataaccaaaaaacagaacatcaaagaaatagcagtaagattctgagatttatttcagacttccttgcttttttggttctctacaatttcatcattccaatttcattatatgtgacagtcgaaatgcagaaatttcttggatcattttttattggctgggatcttgatctgtatcatgaagaatcagatcagaaagctcaagtcaatacttccgatctgaatgaagagcttggacaggtagagtacgtgtttacagataaaactggtacactgacagaaaatgagatgcagtttcgggaatgttcaattaatggcatgaaataccaagaaattaatggtagacttgtacccgaaggaccaacaccagactcttcagaaggaaacttatcttatcttagtagtttatcccatcttaacaacttatcccatcttacaaccagttcctctttcagaaccagtcctgaaaatgaaactgaactaattaaagaacatgatctcttctttaaagcagtcagtctctgtcacactgtacagattagcaatgttcaaactgactgcactggtgatggtccctggcaatccaacctggcaccatcgcagttggagtactatgcatcttcaccagatgaaaaggctctagtagaagctgctgcaaggattggtattgtgtttattggcaattctgaagaaactatggaggttaaaactcttggaaaactggaacggtacaaactgcttcatattctggaatttgattcagatcgtaggagaatgagtgtaattgttcaggcaccttcaggtgagaagttattatttgctaaaggagctgagtcatcaattctccctaaatgtataggtggagaaatagaaaaaaccagaattcatgtagatgaatttgctttgaaagggctaagaactctgtgtatagcatatagaaaatttacatcaaaagagtatgaggaaatagataaacgcatatttgaagccaggactgccttgcagcagcgggaagagaaattggcagctgttttccagttcatagagaaagacctgatattacttggagccacagcagtagaagacagactacaagataaagttcgagaaactattgaagcattgagaatggctggtatcaaagtatgggtacttactggggataaacatgaaacagctgttagtgtgagtttatcatgtggccattttcatagaaccatgaacatccttgaacttataaaccagaaatcagacagcgagtgtgctgaacaattgaggcagcttgccagaagaattacagaggatcatgtgattcagcatgggctggtagtggatgggaccagcctatctcttgcactcagggagcatgaaaaactatttatggaagtttgcagaaattgttcagctgtattatgctgtcgtatggctccactgcagaaagcaaaagtaataagactaataaaaatatcacctgagaaacctataacattggctgttggtgatggtgctaatgacgtaagcatgatacaagaagcccatgttggcataggaatcatgggtaaagaaggaagacaggctgcaagaaacagtgactatgcaatagccagatttaagttcctctccaaattgctttttgttcatggtcatttttattatattagaatagctacccttaatgtgtgctttatcacaccccagtttttatatcagttctactgtttgttttctcagcaaacattgtatgacagcgtgtacctgactttatacaatatttgttttacttccctacctattctgatatatagtcttttggaacagcatgtagaccctcatgtgttacaaaataagcccaccctttatcgagacattagtaaaaaccgcctcttaagtattaaaacatttctttattggaccatcctgggcttcagtcatgcctttattttcttttttggatcctatttactaatagggaaagatacatctctgcttggaaatggccagatgttyggaaactggacatttggcactttggtcttcacagtcatggttattacagtcacagtaaagatggctctggaaactcatttttggacttggatcaaccatctcgttacctggggatctattatattttattttgtattttccttgttttatggagggattctctggccatttttgggctcccagaatatgtattttgtgtttattcagctcctgtcaagtggttctgcttggtttgccataatcctcatggttgttacatgtctatttcttgatatcataaagaaggtctttgaccgacacctccaccctacaagtactgaaaaggcacagcttactgaaacaaatgcaggtatcaagtgcttggactccatgtgctgtttcccggaaggagaagcagcgtgtgcatctgttggaagaatgctggaacgagttataggaagatgtagtccaacccacatcagcagatcatggagtgcatcggatcctttctataccaacgacaggagcatcttgactctctccacaatggactcatctacttgttaaaggggcagtagtactttgtgggagccagttcacctcctttcctaaaattcagtgtgatcaccctgttaatggccacactagctctgaaattaatttccaaaatctttgtagtagttcatacccactcagagttataatggcaaacaaacagaaagcattagtacaagcccctcccaacacccttaatttgaatctgaacatgttaaaatttgagaataaagagacatttttcatctctttgtctggtttgtcccttgtgcttatgggactcctaatggcatttcagtctgttgctgaggccattatattttaatataaatgtagaaaaaagagagaaatcttagtaaagagtattttttagtattagcttgattattgactcttctatttaaatctgcttctgtaaattatgctgaaagtttgccttgagaactctatttttttattagagttatatttaaagcttttcatgggaaaagttaatgtgaatactgaggaattttggtccctcagtgacctgtgttgttaattcattaatgcattctgagttcacagagcaaattaggagaatcatttccaaccattatttactgcagtatggggagtaaatttataccaattcctctaactgtactgtaacacagcctgtaaagttagccatataaatgcaagggtatatcatatatacaaatcaggaatcaggtccgttcaccgaacttcaaattgatgtttactaatatttttgtgacagagtataaagaccctatagtgggtaaattagatactattagcatattattaatttaatgtctttatcattggatcttttgcatgctttaatctggttaacatatttaaatttgctttttttctctttacctgaaggctctgtgtatagtatttcatgacatcgttgtacagtttaactatatcaataaaaagtttggacagtatttaaatattgcaaatatgtttaattatacaaatcagaatagtatgggtaattaaatgaatacaaaaagaagagcctctttctgcagccgacttagacatgctcttccctttctataagctagattttagaataaagggtttcagttaataatcttattttcaggttatgtcatctaacttatagcaaactaccacaatacagtgagttctgccagtgtcccagtacaaggcatatttcaggtgtggctgtggaatgtaaaaatgctcaacttgtatcaggtaatgttagcaataaattaaatgctaagaatgattaatcgggtacatgttactgtaattaactcattgcacttcaaaacctaacttccatcctgaatttatcaagtagttcagtattgtcatttgtttttgttttattgaaaagtaatgttgtcttaagatttagaagtgattattagcttgagaactattacccagctctaagcaaataatgattgtatacatattaagataatggttaaatgcggttttaccaagttttcccttgaaaatgtaattcctttatggagatttattgtgcagccctaagcttccttcccatttcatgaatataaggcttctagaattggactggcaggggaaagaatggtagagacagaaattaagactttatccttgtttgcttgtaaactattattttcttgctaatgtaacatttgtctgttccagtgatgtaaggatattaagttattaagctaaatattaattttcaaaaatagtccttctttaacttagatatttcatagctggatttaggaagatctgttattctggaagtactaaaaagaataatacaacgtacaatgtctgcattcactaattcatgttccagaagaggaaataatgaagatatactcagtagagtactaggtgggaggatatggaaatttgctcataaaatctcttataaaacgtgcatataacaaaatgacacccagtaggcctgcattacatttacatgaccgtgtttatttgccatcaaataaactgagtactgacaccagacaaagactccaaagtcataaaatagcctatgaccaactgcagcaagacaggaggtcagctcgcctataatggtgcttaaagtgtgattgatgtaattttctgtactcaccatttgaagttagttaaggagaactttatttttttaaaaaaagtaaatggcaaccactagtgtgctcatcctgaactgttactccaaatccactccgtttttaaagcaaaattatcttgtgattttaagaaaagagttttctatttatttaagaaagtaacaatgcagtctgcaagctttcagtagttttctagtgctatattcatcctgtaaaactcttactacgtaaccagtaatcacaaggaaagtgtcccctttgcatatttctttaaaattctttctttggaaagtatgatgttgataattaacttacccttatctgccaaaaccagagcaaaatgctaaatacgttattgctaatcagtggtctcaaatcgatttgcctccctttgcctcgtctgagggctgtaagcctgaagatagtggcaagcaccaagtcagtttccaaaattgcccctcagctgctttaagtgactcagcaccctgcctcagcttcagcaggcgtaggctcaccctgggcggagcaaagtatgggccagggagaactacagctacgaagacctgctgtcgagttgagaaaaggggagaatttatggtctgaattttctaactgtcctctttcttgggtctaaagctcataatacacaaaggcttccagacctgagccacacccaggccctatcctgaacaggagactaaacagaggcaaatcaaccctaggaaatacttgcattctgccctacggttagtaccaggactgaggtcatttctactggaaaagattgtgagattgaacttatctgatcgcttgagactcctaataggcaggagtcaaggccactagaaaattgacagttaagagccaaaagtttttaaaatatgctactctgaaaaatctcgtgaaggctgtaggaaaagggagaatcttccatgttggtgtttttcctgtaaagatcagtttggggtatgatataagcaggtattaataaaaataacacaccaaagagttacgtaaaacatgttttattaattttggtccccacgtacagacattttatttctattttgaaatgagttatctattttcataaaagtaaaacrctattaaagtgctgttttatgtgaaataacttgaatgttgttcctataaaaaatagatcataactcatgatatgtttgtaatcatggtaatttagatttttatgaggaatgagtatctggaaatattgtagcaatacttggtttaaaattttggacctgagacactgtggctgtctaatgtaatcctttaaaaattctctgcattgtcagtaaatgtagtatattattgtacagctactcataattttttaaagtttatgaagttatatttatcaaataaaaactttcctatataattaaaagtgttcctttatttaagcattttaagcctgtctctgtttatcacaacctgcactgccaaacttgtttcaagttaagttttactgtatttacccttcattatagcacagggatatcatttatgcctttcactgactgcagttttttaaaatgtagt

SEQ ID NO: 285 - DNA, 6150 bp, Homo sapiens
ggactcggggccgacgccgcgggatggggacgcggcgcggggagtgaggcagtggcggcggcggcggtaagcggaacttcggcccgaggggctcgcccgctcccgcctctgtcttgtcggcctccacctgcagccccgcggcccccgcgccccgcgggacccggacggcgacgacgggggaatacactgtgtggaattttgttccaaaaaatttatttgaacagttcagaagagtggcaaacttttattttcttattatatttttggttcagcttatgattgatacacctaccagtccagttaccagtggacttccattattctttgtgataacagtaactgccataaagcagggatatgaagattggttacggcataactcagataatgaagtaaatggagctcctgtttatgttgttcgaagtggtggccttgtaaaaactagatcaaraaacattcgggtgggtgatattgttcgaatagccaaagatgaaatttttcctgcagacttggtgcttctgtcctcagatcgactggatggttcctgtcacgttacaactgctagtttggacggagaaactaacctgaagacacatgtggcagttccagaaacagcattattacaaacagttgccaatttggacactctagtagctgtaatagaatgccagcaaccagaagcagacttatacagattcatgggacgaatgatcataacccaacaaatggaaraaattgtaagacctctggggccggagagtctcctgcttcgtggagccagattaaaaaacacaaaagaaatttttggtgttgcggtatacactggaatggaaactaagatggcattaaattacaagagcaaatcacagaaacgatctgcagtagaaaagtcaatgaatacatttttgataatttatctagtaattcttatatctgaagctgtcatcagcactatcttgaagtatacatggcaagctgaagaaaaatgggatgaaccttggtataaccaaaaaacagaacatcaaagaaatagcagtaagattctgagatttatttcagacttccttgcttttttggttctctacaatttcatcattccaatttcattatatgtgacagtcgaaatgcagaaatttcttggatcattttttattggctgggatcttgatctgtatcatgaagaatcagatcagaaagctcaagtcaatacttccgatctgaatgaagagcttggacaggtagagtacgtgtttacagataaaactggtacactgacagaaaatgagatgcagtttcgggaatgttcaattaatggcatgaaataccaagaaattaatggtagacttgtacccgaaggaccaacaccagactcttcagaaggaaacttatcttatcttagtagtttatcccatcttaacaacttatcccatcttacaaccagttcctctttcagaaccagtcctgaaaatgaaactgaactaattaaagaacatgatctcttctttaaagcagtcagtctctgtcacactgtacagattagcaatgttcaaactgactgcactggtgatggtccctggcaatccaacctggcaccatcgcagttggagtactatgcatcttcaccagatgaaaaggctctagtagaagctgctgcaaggattggtattgtgtttattggcaattctgaagaaactatggaggttaaaactcttggaaaactggaacggtacaaactgcttcatattctggaatttgattcagatcgtaggagaatgagtgtaattgttcaggcaccttcaggtgagaagttattatttgctaaaggagctgagtcatcaattctccctaaatgtataggtggagaaatagaaaaaaccagaattcatgtagatgaatttgctttgaaagggctaagaactctgtgtatagcatatagaaaatttacatcaaaagagtatgaggaaatagataaacgcatatttgaagccaggactgccttgcagcagcgggaagagaaattggcagctgttttccagttcatagagaaagacctgatattacttggagccacagcagtagaagacagactacaagataaagttcgagaaactattgaagcattgagaatggctggtatcaaagtatgggtacttactggggataaacatgaaacagctgttagtgtgagtttatcatgtggccattttcatagaaccatgaacatccttgaacttataaaccagaaatcagacagcgagtgtgctgaacaattgaggcagcttgccagaagaattacagaggatcatgtgattcagcatgggctggtagtggatgggaccagcctatctcttgcactcagggagcatgaaaaactatttatggaagtttgcagaaattgttcagctgtattatgctgtcgtatggctccactgcagaaagcaaaagtaataagactaataaaaatatcacctgagaaacctataacattggctgttggtgatggtgctaatgacgtaagcatgatacaagaagcccatgttggcataggaatcatgggtaaagaaggaagacaggctgcaagaaacagtgactatgcaatagccagatttaagttcctctccaaattgctttttgttcatggtcatttttattatattagaatagctacccttgtacagtattttttttataagaatgtgtgctttatcacaccccagtttttatatcagttctactgtttgttttctcagcaaacattgtatgacagcgtgtacctgactttatacaatatttgttttacttccctacctattctgatatatagtcttttggaacagcatgtagaccctcatgtgttacaaaataagcccaccctttatcgagacattagtaaaaaccgcctcttaagtattaaaacatttctttattggaccatcctgggcttcagtcatgcctttattttcttttttggatcctatttactaatagggaaagatacatctctgcttggaaatggccagatgttyggaaactggacatttggcactttggtcttcacagtcatggttattacagtcacagtaaagatggctctggaaactcatttttggacttggatcaaccatctcgttacctggggatctattatattttattttgtattttccttgttttatggagggattctctggccatttttgggctcccagaatatgtattttgtgtttattcagctcctgtcaagtggttctgcttggtttgccataatcctcatggttgttacatgtctatttcttgatatcataaagaaggtctttgaccgacacctccaccctacaagtactgaaaaggcacagcttactgaaacaaatgcaggtatcaagtgcttggactccatgtgctgtttcccggaaggagaagcagcgtgtgcatctgttggaagaatgctggaacgagttataggaagatgtagtccaacccacatcagcagatcatggagtgcatcggatcctttctataccaacgacaggagcatcttgactctctccacaatggactcatctacttgttaaaggggcagtagtactttgtgggagccagttcacctcctttcctaaaattcagtgtgatcaccctgttaatggccacactagctctgaaattaatttccaaaatctttgtagtagttcatacccactcagagttataatggcaaacaaacagaaagcattagtacaagcccctcccaacacccttaatttgaatctgaacatgttaaaatttgagaataaagagacatttttcatctctttgtctggtttgtcccttgtgcttatgggactcctaatggcatttcagtctgttgctgaggccattatattttaatataaatgtagaaaaaagagagaaatcttagtaaagagtattttttagtattagcttgattattgactcttctatttaaatctgcttctgtaaattatgctgaaagtttgccttgagaactctatttttttattagagttatatttaaagcttttcatgggaaaagttaatgtgaatactgaggaattttggtccctcagtgacctgtgttgttaattcattaatgcattctgagttcaagtaaatttataccaattcctctaactgtactgtaacacagcctgtaaagttagccatataaatgcaagggtatatcatatatacaaatcaggaatcaggtccgttcaccgaacttcaaattgatgtttactaatatttttgtgacagagtataaagaccctatagtgggtaaattagatactattagcatattattaatttaatgtctttatcattggatcttttgcatgctttaatctggttaacatatttaaatttgctttttttctctttacctgaaggctctgtgtatagtatttcatgacatcgttgtacagtttaactatatcaataaaaagtttggacagtatttaaatattgcaaatatgtttaattatacaaatcagaatagtatgggtaattaaatgaatacaaaaagaagagcctctttctgcagccgacttagacatgctcttccctttctataagctagattttagaataaagggtttcagttaataatcttattttcaggttatgtcatctaacttatagcaaactaccacaatacagtgagttctgccagtgtcccagtacaaggcatatttcaggtgtggctgtggaatgtaaaaatgctcaacttgtatcaggtaatgttagcaataaattaaatgctaagaatgattaatcgggtacatgttactgtaattaactcattgcacttcaaaacctaacttccatcctgaatttatcaagtagttcagtattgtcatttgtttttgttttattgaaaagtaatgttgtcttaagatttagaagtgattattagcttgagaactattacccagctctaagcaaataatgattgtatacatattaagataatggttaaatgcggttttaccaagttttcccttgaaaatgtaattcctttatggagatttattgtgcagccctaagcttccttcccatttcatgaatataaggcttctagaattggactggcaggggaaagaatggtagagacagaaattaagactttatccttgtttgcttgtaaactattattttcttgctaatgtaacatttgtctgttccagtgatgtaaggatattaagttattaagctaaatattaattttcaaaaatagtccttctttaacttagatatttcatagctggatttaggaagatctgttattctggaagtactaaaaagaataatacaacgtacaatgtctgcattcactaattcatgttccagaagaggaaataatgaagatatactcagtagagtactaggtgggaggatatggaaatttgctcataaaatctcttataaaacgtgcatataacaaaatgacacccagtaggcctgcattacatttacatgaccgtgtttatttgccatcaaataaactgagtactgacaccagacaaagactccaaagtcataaaatagcctatgaccaactgcagcaagacaggaggtcagctcgcctataatggtgcttaaagtgtgattgatgtaattttctgtactcaccatttgaagttagttaaggagaactttatttttttaaaaaaagtaaatggcaaccactagtgtgctcatcctgaactgttactccaaatccactccgtttttaaagcaaaattatcttgtgattttaagaaaagagttttctatttatttaagaaagtaacaatgcagtctgcaagctttcagtagttttctagtgctatattcatcctgtaaaactcttactacgtaaccagtaatcacaaggaaagtgtcccctttgcatatttctttaaaattctttctttggaaagtatgatgttgataattaacttacccttatctgccaaaaccagagcaaaatgctaaatacgttattgctaatcagtggtctcaaatcgatttgcctccctttgcctcgtctgagggctgtaagcctgaagatagtggcaagcaccaagtcagtttccaaaattgcccctcagctgctttaagtgactcagcaccctgcctcagcttcagcag

SEQ ID NO: 286 - DNA, 6376 bp, Homo sapiens
caacggtcaataatgaaggtggctgcggcgcggcggcaggctcagctgcgccgggcgggggcggcgccggggccgcgcctgtaggactcggggccgacgccgcgggatggggacgcggcgcggggagtgaggcagtggcggcggcggcggtaagcggaacttcggcccgaggggctcgcccgctcccgcctctgtcttgtcggcctccacctgcagccccgcggcccccgcgccccgcgggacccggacggcgacgacgggggaatgtggcgctggatccggcagcagctgggttttgacccaccacatcagagtgacacaagaaccatctacgtagccaacaggtttcctcagaatggcctttacacacctcagaaatttatagataacaggatcatttcatctaagtacactgtgtggaattttgttccaaaaaatttatttgaacagttcagaagagtggcaaacttttattttcttattatatttttggttcagcttatgattgatacacctaccagtccagttaccagtggacttccattattctttgtgataacagtaactgccataaagcagggatatgaagattggttacggcataactcagataatgaagtaaatggagctcctgtttatgttgttcgaagtggtggccttgtaaaaactagatcaaraaacattcgggtgggtgatattgttcgaatagccaaagatgaaatttttcctgcagacttggtgcttctgtcctcagatcgactggatggttcctgtcacgttacaactgctagtttggacggagaaactaacctgaagacacatgtggcagttccagaaacagcattattacaaacagttgccaatttggacactctagtagctgtaatagaatgccagcaaccagaagcagacttatacagattcatgggacgaatgatcataacccaacaaatggaaraaattgtaagacctctggggccggagagtctcctgcttcgtggagccagattaaaaaacacaaaagaaatttttggtgttgcggtatacactggaatggaaactaagatggcattaaattacaagagcaaatcacagaaacgatctgcagtagaaaagtcaatgaatacatttttgataatttatctagtaattcttatatctgaagctgtcatcagcactatcttgaagtatacatggcaagctgaagaaaaatgggatgaaccttggtataaccaaaaaacagaacatcaaagaaatagcagtaagattctgagatttatttcagacttccttgcttttttggttctctacaatttcatcattccaatttcattatatgtgacagtcgaaatgcagaaatttcttggatcattttttattggctgggatcttgatctgtatcatgaagaatcagatcagaaagctcaagtcaatacttccgatctgaatgaagagcttggacaggtagagtacgtgtttacagataaaactggtacactgacagaaaatgagatgcagtttcgggaatgttcaattaatggcatgaaataccaagaaattaatggtagacttgtacccgaaggaccaacaccagactcttcagaaggaaacttatcttatcttagtagtttatcccatcttaacaacttatcccatcttacaaccagttcctctttcagaaccagtcctgaaaatgaaactgaactaattaaagaacatgatctcttctttaaagcagtcagtctctgtcacactgtacagattagcaatgttcaaactgactgcactggtgatggtccctggcaatccaacctggcaccatcgcagttggagtactatgcatcttcaccagatgaaaaggctctagtagaagctgctgcaaggattggtattgtgtttattggcaattctgaagaaactatggaggttaaaactcttggaaaactggaacggtacaaactgcttcatattctggaatttgattcagatcgtaggagaatgagtgtaattgttcaggcaccttcaggtgagaagttattatttgctaaaggagctgagtcatcaattctccctaaatgtataggtggagaaatagaaaaaaccagaattcatgtagatgaatttgctttgaaagggctaagaactctgtgtatagcatatagaaaatttacatcaaaagagtatgaggaaatagataaacgcatatttgaagccaggactgccttgcagcagcgggaagagaaattggcagctgttttccagttcatagagaaagacctgatattacttggagccacagcagtagaagacagactacaagataaagttcgagaaactattgaagcattgagaatggctggtatcaaagtatgggtacttactggggataaacatgaaacagctgttagtgtgagtttatcatgtggccattttcatagaaccatgaacatccttgaacttataaaccagaaatcagacagcgagtgtgctgaacaattgaggcagcttgccagaagaattacagaggatcatgtgattcagcatgggctggtagtggatgggaccagcctatctcttgcactcagggagcatgaaaaactatttatggaagtttgcagaaattgttcagctgtattatgctgtcgtatggctccactgcagaaagcaaaagtaataagactaataaaaatatcacctgagaaacctataacattggctgttggtgatggtgctaatgacgtaagcatgatacaagaagcccatgttggcataggaatcatgggtaaagaaggaagacaggctgcaagaaacagtgactatgcaatagccagatttaagttcctctccaaattgctttttgttcatggtcatttttattatattagaatagctacccttgtacagtattttttttataagaatgtgtgctttatcacaccccagtttttatatcagttctactgtttgttttctcagcaaacattgtatgacagcgtgtacctgactttatacaatatttgttttacttccctacctattctgatatatagtcttttggaacagcatgtagaccctcatgtgttacaaaataagcccaccctttatcgagacattagtaaaaaccgcctcttaagtattaaaacatttctttattggaccatcctgggcttcagtcatgcctttattttcttttttggatcctatttactaatagggaaagatacatctctgcttggaaatggccagatgttyggaaactggacatttggcactttggtcttcacagtcatggttattacagtcacagtaaagatggctctggaaactcatttttggacttggatcaaccatctcgttacctggggatctattatattttattttgtattttccttgttttatggagggattctctggccatttttgggctcccagaatatgtattttgtgtttattcagctcctgtcaagtggttctgcttggtttgccataatcctcatggttgttacatgtctatttcttgatatcataaagaaggtctttgaccgacacctccaccctacaagtactgaaaaggcacagcttactgaaacaaatgcaggtatcaagtgcttggactccatgtgctgtttcccggaaggagaagcagcgtgtgcatctgttggaagaatgctggaacgagttataggaagatgtagtccaacccacatcagcagatcatggagtgcatcggatcctttctataccaacgacaggagcatcttgactctctccacaatggactcatctacttgttaaaggggcagtagtactttgtgggagccagttcacctcctttcctaaaattcagtgtgatcaccctgttaatggccacactagctctgaaattaatttccaaaatctttgtagtagttcatacccactcagagttataatggcaaacaaacagaaagcattagtacaagcccctcccaacacccttaatttgaatctgaacatgttaaaatttgagaataaagagacatttttcatctctttgtctggtttgtcccttgtgcttatgggactcctaatggcatttcagtctgttgctgaggccattatattttaatataaatgtagaaaaaagagagaaatcttagtaaagagtattttttagtattagcttgattattgactcttctatttaaatctgcttctgtaaattatgctgaaagtttgccttgagaactctatttttttattagagttatatttaaagcttttcatgggaaaagttaatgtgaatactgaggaattttggtccctcagtgacctgtgttgttaattcattaatgcattctgagttcaagtaaatttataccaattcctctaactgtactgtaacacagcctgtaaagttagccatataaatgcaagggtatatcatatatacaaatcaggaatcaggtccgttcaccgaacttcaaattgatgtttactaatatttttgtgacagagtataaagaccctatagtgggtaaattagatactattagcatattattaatttaatgtctttatcattggatcttttgcatgctttaatctggttaacatatttaaatttgctttttttctctttacctgaaggctctgtgtatagtatttcatgacatcgttgtacagtttaactatatcaataaaaagtttggacagtatttaaatattgcaaatatgtttaattatacaaatcagaatagtatgggtaattaaatgaatacaaaaagaagagcctctttctgcagccgacttagacatgctcttccctttctataagctagattttagaataaagggtttcagttaataatcttattttcaggttatgtcatctaacttatagcaaactaccacaatacagtgagttctgccagtgtcccagtacaaggcatatttcaggtgtggctgtggaatgtaaaaatgctcaacttgtatcaggtaatgttagcaataaattaaatgctaagaatgattaatcgggtacatgttactgtaattaactcattgcacttcaaaacctaacttccatcctgaatttatcaagtagttcagtattgtcatttgtttttgttttattgaaaagtaatgttgtcttaagatttagaagtgattattagcttgagaactattacccagctctaagcaaataatgattgtatacatattaagataatggttaaatgcggttttaccaagttttcccttgaaaatgtaattcctttatggagatttattgtgcagccctaagcttccttcccatttcatgaatataaggcttctagaattggactggcaggggaaagaatggtagagacagaaattaagactttatccttgtttgcttgtaaactattattttcttgctaatgtaacatttgtctgttccagtgatgtaaggatattaagttattaagctaaatattaattttcaaaaatagtccttctttaacttagatatttcatagctggatttaggaagatctgttattctggaagtactaaaaagaataatacaacgtacaatgtctgcattcactaattcatgttccagaagaggaaataatgaagatatactcagtagagtactaggtgggaggatatggaaatttgctcataaaatctcttataaaacgtgcatataacaaaatgacacccagtaggcctgcattacatttacatgaccgtgtttatttgccatcaaataaactgagtactgacaccagacaaagactccaaagtcataaaatagcctatgaccaactgcagcaagacaggaggtcagctcgcctataatggtgcttaaagtgtgattgatgtaattttctgtactcaccatttgaagttagttaaggagaactttatttttttaaaaaaagtaaatggcaaccactagtgtgctcatcctgaactgttactccaaatccactccgtttttaaagcaaaattatcttgtgattttaagaaaagagttttctatttatttaagaaagtaacaatgcagtctgcaagctttcagtagttttctagtgctatattcatcctgtaaaactcttactacgtaaccagtaatcacaaggaaagtgtcccctttgcatatttctttaaaattctttctttggaaagtatgatgttgataattaacttacccttatctgccaaaaccagagcaaaatgctaaatacgttattgctaatcagtggtctcaaatcgatttgcctccctttgcctcgtctgagggctgtaagcctgaagatagtggcaagcaccaagtcagtttccaaaattgcccctcagctgctttaagtgactcagcaccctgcctcagcttcagcag

SEQ ID NO: 287 - DNA, 5472 bp, Homo sapiens
tacactttaaatgtgtggtttattgtatgccagttataacgcaatatagctgttaaacacaaacacaataaagttgaaaaaccagcaggcattccctgattaatcagtattctggggaggtaaggggctcacaggaacgcaaaagaaattcaggctgtaaatccagttggacgccccgctgccccatcccctccatccgggaccgcccgactcctctcccacctccttccccaggcctcccccaggcctccagtccggaagatgcgacgaggttagcggggcccgaccactccttggcttcccaggggtgagcctcgcgagttaggagttgggtagagagtcagcccggggcccggcatccgctttttcgttgaagcaacgactttggccggatgactccccagggtcggcatcagcgtgggactgggaacaggtgaagggaaacagaagagagcctgagaagaccgctctcctccgatcctaattgactgagccaatgagagccaaagaggtcacatgctcaactgggcggggagcgggtttccacctgcggcatctttcgcgagcggggagatgagtggggcggaatatgggagaaagggagggcccgccacgctctggctggacacggccttaatcggcccgttcactcgacgtttttggttctacgttgaccccgagaaaccgaaaccgcagggcctagggcgggtggaacgagagggaactacatttcccagcaggctgcggaaacgggactgcggccactacttccggcgtgtaccgagagactggcgtccggcgtgtaccgagagactggcgtccggtgtgcaggtggccacatggatcctggcagccggtggcggaacctgcccagcgggcctagcctaaagcacttgactgacccctcttatggaatcccgcgggaacagcaaaaggcagcgttgcaggagctgacgcgggcgcacgtggagtccttcaactacgctgtgcacgagggtctcggcctcgcggtgcaggctatacctccctttgaatttgctttcaaagatgagcgtatctcttttactattctggatgctgttatcagtccacctacagttccaaaagggaccatctgcaaagaggccaatgtttatccagcagaatgccggggccgaaggagtacctaccgtgggaagttgacagctgatatcaactgggcagtgaatggaatctcaaaaggaatcattaagcagtttcttggctatgttcccatcatggtgaaatccaagctttgcaacttacgtaaccttcccccacaagccctcattgagcaccatgaggaggcagaggaaatggggggctattttataatcaatggcattgaaaaagtcatccgaatgttgattatgcctcggagaaattttcccattgcaatgataagaccaaaatggaaaaccagagggcctggttatactcagtatggagtttcaatgcactgtgtgagggaagaacattccgctgtcaatatgaacctccactacttggaaaatggcacwgttatgttgaactttatttaccgaaaagaactgttctttcttcctttgggatttgcacttaaggcacttgtcagcttttctgattatcagatctttcaggagctcatcaaaggaaaagaggatgattctttccttaggaactctgtttctcagatgttaaggattgtaatggaagagggttgttygacacaaaaacaggtccttaactacctaggtgaatgcttcagagtaaaactcaatgttcctgactggtacccaaatgagcaagctgcggagttcctgtttaaccagtgcatctgtatccacttgaaatccaatactgaaaagttttatatgctttgtctcatgacgcgaaagctctttgctttagccaaaggagagtgcatggaggacaatcctgatagtttggtgmaccaggaagtcctcacaccgggtcagctcttccttatgttcctgaaggaaaaactggaaggttggttagtgtctattaaaatagcttttgataagaaggctcagaagaccagtgtttccatgaacactgacaatttgatgaggatttttacaatgggcatagaccttacaaaaccatttgaatacctttttgctactgggaatctgcgttctaaaacaggtcttggcctcctacaagattctggactttgtgttgtggctgacaagctgaacttcatacgctacctctcccatttccgctgcgtgcacagaggggctgattttgccaagatgaggaccaccacagtacgcaggctgctgccagagtcctggggcttcctttgtcccgtgcataccccagacggggagccctgtggcctgatgaaccacctaactgccgtatgtgaggttgtcacacagtttgtgtatacggcatctattccagctttactgtgcaacttgggsgtcactcccattgatggagctccccaccgatcatacagtgagtgctaycctgtcctgctggacggtgtcatggttggctgggtggataaggatcttgctccaggcatcgcagattctcttcgtcattttaaggtgttgagagagaaaagaattcctccctggatggaagtggtccttatacccatgacaggaaaaccaagtctgtacccaggattgttcctttttaccactccttgtagactggtacggcctgtgcagaacttagcaytgggcaaagaagagctaattggaactatggaacagatcttcatgaatgtcgctatctttgaggatgaagtttttgctggagttaccacacaccaggaactctttccacacagcctgctgagtgtgattgccaacttcatccctttctctgatcacaaccagagtccacggaacatgtaccaatgccagatgggtaagcaaactatgggctttccacttctcacttatcaagaccgatcggataacaaactgtatcgtcttcagactcctcagagtcccttggtgagaccctccatgtatgattattatgacatggataactatccaattgggaccaatgccatcgttgctgtgatttcttacactggctatgatatggaagatgccatgattgtgaataaggcctcttgggaacgaggctttgcccatggaagtgtctacaagtctgagttcatagacctctctgaaaaaattaaacaaggagatagtagcctggtgtttggcatcaaacctggtgacccacgcgttctgcagaagttagatgacgatggattgccgtttataggagcaaaactgcagtacggagatccgtattacagctacctcaacctcaacaccggggaaagtttttgaaactggatgttgtttaacttgatgttgaccttttggattaagaggactatcagattaaagcaaaatgtaattttaattcaatgaagatatcattaccaggttactcttgagatttttcaayggtgttagaactctcaaccaagacctgaaaaccaagtatgcaaggtttctgaatctctctggtagattaactattgacaatgattttytgttatctttgttcaaaaagttcatgtcttctcaaaatatgaaatattgataaatggaagagcatacggtgacaagtctcctttccaaccccaggttccctacaccctgctctcagcaggcagtgagtgtcacacacctgttaatccatcttgagcaggacagtactatacaaatagaatgcaagctgtaatgtaattttatattttcttatagccacgttgaagtaaaaacaaacaggtacagtgttttttaccagctttatagaagtacagttgttacatatttaatgaatacaatttgatgggtctgactatatgcacacacctttgataccatcaccacaatcagggtaataaacatacctgtcatctccacaagtttcctcctgcccctttgttttttgctttttggttgctgttgagtttttgttttgtcttctgtggtaagaacacttaactcaagacctaccctcttaacaaatctttaagtgcacgatatagtattgttaattccaggcaccatgttgtacaacagatctttagaccttacttgtcttgcataactgaagctttatacctgttgaacaactctccatttccctggcccctagcaaccacccttctaccctgtttctatgagtttgactattacagatatctcatatagtgggatcatgcaatatttgtcctgtgactggcttatttcacttagcatagtgaaataagattcatccattttggaagccaggcatggtgctgtgcatctatagtccctgctatttgagaggctgaggtgggaggatcatttgagtgcaggagttcaaggacagcctgggtaatataggaagaccctgtcttgaagaccctgacctcaagtgatccacccacctcggcctccgaaagtgctaggattacaggtgtgagccactgtgcctggcctccggtgagtattttatatttagtctacacttccatacttggcttttttctgcttttatattgatctgctttcatagcagtgtgtagagtgccacttatgttttctttcttgtgtacagtattttattgtatggatttaccatcccctgtgtatttaagttgttccattctttggccattataacttttttctgcaaatattctggtgacttatctttggccattataaactgttgataatagatcatcttgtatatacttctgcaattataagatgttttttgatgatgaaagctttcctaaggtaattctttcctgagtttggttcagatggtctgtcactaattataaggcagataggaacagacagaaaaatctatcatttcaagataggcttagcaggatgggcgcagtggctcacgccactaatcccaacattttaggaggcctaggcaggagcaatcacttgtgcctgggagttctagactagcctgggcgagacttcatctctacaaaaaaagcaacaacgacaaaaaaaattagccaagcatagtggcacacccctgtagtcccagctacttgggaggctgaggtgggaggattgcttgaacccaagaggtcgaggctgcagtgagccaagattgtgccactgcactccagcctgggtgacagagcaggaccctgtctctattttataaattaaaaaaggctgggtgtggtggctcacacccataatcccaacactttggctcagcagattgcttgaacccaggaattcaagtccaatctgggcaacatggggaaaccccagctctacaaaaaaaattagcctggtgtggtggcacatgcctgtagttccagctactcaggaggctgaggtgggagaatctcctgagcctggaaggtccaggcagtgagccaagattgtgccaccacactccagcctgggcgacagaatgagaccctgtctc

SEQ ID NO: 288 - DNA, 4881 bp, Homo sapiens
gagactggcgtccggtgtgcaggtggccacatggatcctggcagccggtggcggaacctgcccagcgggcctagcctaaagcacttgactgacccctcttatggaatcccgcgggaacagcaaaaggcagcgttgcaggagctgacgcgggcgcacgtggagtccttcaactacgctgtgcacgagggtctcggcctcgcggtgcaggctgatatcaactgggcagtgaatggaatctcaaaaggaatcattaagcagtttcttggctatgttcccatcatggtgaaatccaagctttgcaacttacgtaaccttcccccacaagccctcattgagcaccatgaggaggcagaggaaatggggggctattttataatcaatggcattgaaaaagtcatccgaatgttgattatgcctcggagaaattttcccattgcaatgataagaccaaaatggaaaaccagagggcctggttatactcagtatggagtttcaatgcactgtgtgagggaagaacattccgctgtcaatatgaacctccactacttggaaaatggcacwgttatgttgaactttatttaccgaaaagaactgttctttcttcctttgggatttgcacttaaggcacttgtcagcttttctgattatcagatctttcaggagctcatcaaaggaaaagaggatgattctttccttaggaactctgtttctcagatgttaaggattgtaatggaagagggttgttygacacaaaaacaggtccttaactacctaggtgaatgcttcagagtaaaactcaatgttcctgactggtacccaaatgagcaagctgcggagttcctgtttaaccagtgcatctgtatccacttgaaatccaatactgaaaagttttatatgctttgtctcatgacgcgaaagctctttgctttagccaaaggagagtgcatggaggacaatcctgatagtttggtgmaccaggaagtcctcacaccgggtcagctcttccttatgttcctgaaggaaaaactggaaggttggttagtgtctattaaaatagcttttgataagaaggctcagaagaccagtgtttccatgaacactgacaatttgatgaggatttttacaatgggcatagaccttacaaaaccatttgaatacctttttgctactgggaatctgcgttctaaaacaggtcttggcctcctacaagattctggactttgtgttgtggctgacaagctgaacttcatacgctacctctcccatttccgctgcgtgcacagaggggctgattttgccaagatgaggaccaccacagtacgcaggctgctgccagagtcctggggcttcctttgtcccgtgcataccccagacggggagccctgtggcctgatgaaccacctaactgccgtatgtgaggttgtcacacagtttgtgtatacggcatctattccagctttactgtgcaacttgggsgtcactcccattgatggagctccccaccgatcatacagtgagtgctaycctgtcctgctggacggtgtcatggttggctgggtggataaggatcttgctccaggcatcgcagattctcttcgtcattttaaggtgttgagagagaaaagaattcctccctggatggaagtggtccttatacccatgacaggaaaaccaagtctgtacccaggattgttcctttttaccactccttgtagactggtacggcctgtgcagaacttagcaytgggcaaagaagagctaattggaactatggaacagatcttcatgaatgtcgctatctttgaggatgaagtttttgctggagttaccacacaccaggaactctttccacacagcctgctgagtgtgattgccaacttcatccctttctctgatcacaaccagagtccacggaacatgtaccaatgccagatgggtaagcaaactatgggctttccacttctcacttatcaagaccgatcggataacaaactgtatcgtcttcagactcctcagagtcccttggtgagaccctccatgtatgattattatgacatggataactatccaattgggaccaatgccatcgttgctgtgatttcttacactggctatgatatggaagatgccatgattgtgaataaggcctcttgggaacgaggctttgcccatggaagtgtctacaagtctgagttcatagacctctctgaaaaaattaaacaaggagatagtagcctggtgtttggcatcaaacctggtgacccacgcgttctgcagaagttagatgacgatggattgccgtttataggagcaaaactgcagtacggagatccgtattacagctacctcaacctcaacaccggggaaagttttgtgatgtactataagagtaaagaaaattgtgttgtggataacatcaaagtgtgcagtaatgacactgggagtggaaaattcaagtgtgtttgcatcactatgagagtgcctcggaacccaactatcggagataaatttgccagtcgccatgggcagaagggcattttaagcagattgtggccggctgaggacatgccttttactgagagtgggatggtcccagacattctgttcaatccccatggttttccatcccgcatgaccattgggatgttaattgagagtatggccgggaagtctgcagctttgcatggtctctgccatgatgctacacccttcatcttctcagaggagaactcggccttagaatactttggtgagatgttaaaggctgctggctacaatttctatggcacygagaggttatatagtggcatcagtgggctagaactggaagcagacatcttcataggagtggtttattatcarcgcttacgccatatggtctcagacaaatttcaagtaaggacaactggagcccgagacagagtcaccaaccagcctattgggggaagaaatgtccagggtggaatccgttttggggagatggaacgggatgcgcttttagctcatggtacatcttttctccttcatgaccgcctcttcaactgctcagatcggtcggtagcccatgtgtgtgtgaagtgtggcagtttactctctccactgttggagaagccacccccttcttggtctgccatgcgcaacagaaaatacaactgtactctgtgtagtcgcagtgacactatcgatactgtttctgtgccttatgtttttcggtattttgtagctgaactggcagctatgaacatcaaagtgaaactggatgttgtttaacttgatgttgaccttttggattaagaggactatcagattaaagcaaaatgtaattttaattcaatgaagatatcattaccaggttactcttgagatttttcaayggtgttagaactctcaaccaagacctgaaaaccaagtatgcaaggtttctgaatctctctggtagattaactattgacaatgattttytgttatctttgttcaaaaagttcatgtcttctcaaaatatgaaatattgataaatggaagagcatacggtgacaagtctcctttccaaccccaggttccctacaccctgctctcagcaggcagtgagtgtcacacacctgttaatccatcttgagcaggacagtactatacaaatagaatgcaagctgtaatgtaattttatattttcttatagccacgttgaagtaaaaacaaacaggtacagtgttttttaccagctttatagaagtacagttgttacatatttaatgaatacaatttgatgggtctgactatatgcacacacctttgataccatcaccacaatcagggtaataaacatacctgtcatctccacaagtttcctcctgcccctttgttttttgctttttggttgctgttgagtttttgttttgtcttctgtggtaagaacacttaactcaagacctaccctcttaacaaatctttaagtgcacgatatagtattgttaattccaggcaccatgttgtacaacagatctttagaccttacttgtcttgcataactgaagctttatacctgttgaacaactctccatttccctggcccctagcaaccacccttctaccctgtttctatgagtttgactattacagatatctcatatagtgggatcatgcaatatttgtcctgtgactggcttatttcacttagcatagtgaaataagattcatccattttggaagccaggcatggtgctgtgcatctatagtccctgctatttgagaggctgaggtgggaggatcatttgagtgcaggagttcaaggacagcctgggtaatataggaagaccctgtcttgaagaccctgacctcaagtgatccacccacctcggcctccgaaagtgctaggattacaggtgtgagccactgtgcctggcctccggtgagtattttatatttagtctacacttccatacttggcttttttctgcttttatattgatctgctttcatagcagtgtgtagagtgccacttatgttttctttcttgtgtacagtattttattgtatggatttaccatcccctgtgtatttaagttgttccattctttggccattataacttttttctgcaaatattctggtgacttatctttggccattataaactgttgataatagatcatcttgtatatacttctgcaattataagatgttttttgatgatgaaagctttcctaaggtaattctttcctgagtttggttcagatggtctgtcactaattataaggcagataggaacagacagaaaaatctatcatttcaagataggcttagcaggatgggcgcagtggctcacgccactaatcccaacattttaggaggcctaggcaggagcaatcacttgtgcctgggagt

SEQ ID NO: 289 - DNA, 3903 bp, Homo sapiens
tacactttaaatgtgtggtttattgtatgccagttataacgcaatatagctgttaaacacaaacacaataaagttgaaaaaccagcaggcattccctgattaatcagtattctggggaggtaaggggctcacaggaacgcaaaagaaattcaggctgtaaatccagttggacgccccgctgccccatcccctccatccgggaccgcccgactcctctcccacctccttccccaggcctcccccaggcctccagtccggaagatgcgacgaggttagcggggcccgaccactccttggcttcccaggggtgagcctcgcgagttaggagttgggtagagagtcagcccggggcccggcatccgctttttcgttgaagcaacgactttggccggatgactccccagggtcggcatcagcgtgggactgggaacaggtgaagggaaacagaagagagcctgagaagaccgctctcctccgatcctaattgactgagccaatgagagccaaagaggtcacatgctcaactgggcggggagcgggtttccacctgcggcatctttcgcgagcggggagatgagtggggcggaatatgggagaaagggagggcccgccacgctctggctggacacggccttaatcggcccgttcactcgacgtttttggttctacgttgaccccgagaaaccgaaaccgcagggcctagggcgggtggaacgagagggaactacatttcccagcaggctgcggaaacgggactgcggccactacttccggcgtgtaccgagagactggcgtccggcgtgtaccgagagactggcgtccggtgtgcaggtggccacatggatcctggcagccggtggcggaacctgcccagcgggcctagcctaaagcacttgactgacccctcttatggaatcccgcgggaacagcaaaaggcagcgttgcaggagctgacgcgggcgcacgtggagtccttcaactacgctgtgcacgagggtctcggcctcgcggtgcaggctatacctccctttgaatttgctttcaaagatgagcgtatctcttttactattctggatgctgttatcagtccacctacagttccaaaagggaccatctgcaaagaggccaatgtttatccagcagaatgccggggccgaaggagtacctaccgtgggaagttgacagctgatatcaactgggcagtgaatggaatctcaaaaggaatcattaagcagtttcttggctatgttcccatcatggtgaaatccaagctttgcaacttacgtaaccttcccccacaagccctcattgagcaccatgaggaggcagaggaaatggggggctattttataatcaatggcattgaaaaagtcatccgaatgttgattatgcctcggagaaattttcccattgcaatgataagaccaaaatggaaaaccagagggcctggttatactcagtatggagtttcaatgcactgtgtgagggaagaacattccgctgtcaatatgaacctccactacttggaaaatggcacwgttatgttgaactttatttaccgaaaagaactgttctttcttcctttgggatttgcacttaaggcacttgtcagcttttctgattatcagatctttcaggagctcatcaaaggaaaagaggatgattctttccttaggaactctgtttctcagatgttaaggattgtaatggaagagggttgttygacacaaaaacaggtccttaactacctaggtgaatgcttcagagtaaaactcaatgttcctgactggtacccaaatgagcaagctgcggagttcctgtttaaccagtgcatctgtatccacttgaaatccaatactgaaaagttttatatgctttgtctcatgacgcgaaagctctttgctttagccaaaggagagtgcatggaggacaatcctgatagtttggtgmaccaggaagtcctcacaccgggtcagctcttccttatgttcctgaaggaaaaactggaaggttggttagtgtctattaaaatagcttttgataagaaggctcagaagaccagtgtttccatgaacactgacaatttgatgaggatttttacaatgggcatagaccttacaaaaccatttgaatacctttttgctactgggaatctgcgttctaaaacaggtcttggcctcctacaagattctggactttgtgttgtggctgacaagctgaacttcatacgctacctctcccatttccgctgcgtgcacagaggggctgattttgccaagatgaggaccaccacagtacgcaggctgctgccagagtcctggggcttcctttgtcccgtgcataccccagacggggagccctgtggcctgatgaaccacctaactgccgtatgtgaggttgtcacacagtttgtgtatacggcatctattccagctttactgtgcaacttgggsgtcactcccattgatggagctccccaccgatcatacagtgagtgctaycctgtcctgctggacggtgtcatggttggctgggtggataaggatcttgctccaggcatcgcagattctcttcgtcattttaaggtgttgagagagaaaagaattcctccctggatggaagtggtccttatacccatgacaggaaaaccaagtctgtacccaggattgttcctttttaccactccttgtagactggtacggcctgtgcagaacttagcaytgggcaaagaagagctaattggaactatggaacagatcttcatgaatgtcgctatctttgaggatgaagtttttgctggagttaccacacaccaggaactctttccacacagcctgctgagtgtgattgccaacttcatccctttctctgttctcacttatcaagaccgatcggataacaaactgtatcgtcttcagactcctcagagtcccttggtgagaccctccatgtatgattattatgacatggataactatccaattgggaccaatgccatcgttgctgtgatttcttacactggctatgatatggaagatgccatgattgtgaataaggcctcttgggaacgaggctttgcccatggaagtgtctacaagtctgagttcatagacctctctgaaaaaattaaacaaggagatagtagcctggtgtttggcatcaaacctggtgacccacgcgttctgcagaagttagatgacgatggattgccgtttataggagcaaaactgcagtacggagatccgtattacagctacctcaacctcaacaccggggaaagttttgtgatgtactataagagtaaagaaaattgatgttgtttaacttgatgttgaccttttggattaagaggactatcagattaaagcaaaatgtaattttaattcaatgaagatatcattaccaggttactcttgagatttttcaayggtgttagaactctcaaccaagacctgaaaaccaagtatgcaaggtttctgaatctctctggtagattaactattgacaatgattttytgttatctttgttcaaaaagttcatgtcttctcaaaatatgaaatattgataaatggaagagcatacggtgacaagtctcctttccaaccccaggttccctacaccctgctctcagcaggcagtgagtgtcacacacctgttaatccatcttgagcaggacagtactatacaaatagaatgcaagctgtaatgtaattttatattttcttatagccacgttgaagtaaaaacaaacaggtacagtgttttttaccagctttatagaagtacagttgttacatatttaatgaatacaatttgatgggtctgactatatgcacacacctttgataccatcaccacaatcagggtaataaacatacctgtcatctccacaagtttcctcc

SEQ ID NO: 290 - DNA, 5858 bp, Homo sapiens
tacactttaaatgtgtggtttattgtatgccagttataacgcaatatagctgttaaacacaaacacaataaagttgaaaaaccagcaggcattccctgattaatcagtattctggggaggtaaggggctcacaggaacgcaaaagaaattcaggctgtaaatccagttggacgccccgctgccccatcccctccatccgggaccgcccgactcctctcccacctccttccccaggcctcccccaggcctccagtccggaagatgcgacgaggttagcggggcccgaccactccttggcttcccaggggtgagcctcgcgagttaggagttgggtagagagtcagcccggggcccggcatccgctttttcgttgaagcaacgactttggccggatgactccccagggtcggcatcagcgtgggactgggaacaggtgaagggaaacagaagagagcctgagaagaccgctctcctccgatcctaattgactgagccaatgagagccaaagaggtcacatgctcaactgggcggggagcgggtttccacctgcggcatctttcgcgagcggggagatgagtggggcggaatatgggagaaagggagggcccgccacgctctggctggacacggccttaatcggcccgttcactcgacgtttttggttctacgttgaccccgagaaaccgaaaccgcagggcctagggcgggtggaacgagagggaactacatttcccagcaggctgcggaaacgggactgcggccactacttccggcgtgtaccgagagactggcgtccggcgtgtaccgagagactggcgtccggtgtgcaggtggccacatggatcctggcagccggtggcggaacctgcccagcgggcctagcctaaagcacttgactgacccctcttatggaatcccgcgggaacagcaaaaggcagcgttgcaggagctgacgcgggcgcacgtggagtccttcaactacgctgtgcacgagggtctcggcctcgcggtgcaggctatacctccctttgaatttgctttcaaagatgagcgtatctcttttactattctggatgctgttatcagtccacctacagttccaaaagggaccatctgcaaagaggccaatgtttatccagcagaatgccggggccgaaggagtacctaccgtgggaagttgacagctgatatcaactgggcagtgaatggaatctcaaaaggaatcattaagcagtttcttggctatgttcccatcatggtgaaatccaagctttgcaacttacgtaaccttcccccacaagccctcattgagcaccatgaggaggcagaggaaatggggggctattttataatcaatggcattgaaaaagtcatccgaatgttgattatgcctcggagaaattttcccattgcaatgataagaccaaaatggaaaaccagagggcctggttatactcagtatggagtttcaatgcactgtgtgagggaagaacattccgctgtcaatatgaacctccactacttggaaaatggcacwgttatgttgaactttatttaccgaaaagaactgttctttcttcctttgggatttgcacttaaggcacttgtcagcttttctgattatcagatctttcaggagctcatcaaaggaaaagaggatgattctttccttaggaactctgtttctcagatgttaaggattgtaatggaagagggttgttygacacaaaaacaggtccttaactacctaggtgaatgcttcagagtaaaactcaatgttcctgactggtacccaaatgagcaagctgcggagttcctgtttaaccagtgcatctgtatccacttgaaatccaatactgaaaagttttatatgctttgtctcatgacgcgaaagctctttgctttagccaaaggagagtgcatggaggacaatcctgatagtttggtgmaccaggaagtcctcacaccgggtcagctcttccttatgttcctgaaggaaaaactggaaggttggttagtgtctattaaaatagcttttgataagaaggctcagaagaccagtgtttccatgaacactgacaatttgatgaggatttttacaatgggcatagaccttacaaaaccatttgaatacctttttgctactgggaatctgcgttctaaaacaggtcttggcctcctacaagattctggactttgtgttgtggctgacaagctgaacttcatacgctacctctcccatttccgctgcgtgcacagaggggctgattttgccaagatgaggaccaccacagtacgcaggctgctgccagagtcctggggcttcctttgtcccgtgcataccccagacggggagccctgtggcctgatgaaccacctaactgccgtatgtgaggttgtcacacagtttgtgtatacggcatctattccagctttactgtgcaacttgggsgtcactcccattgatggagctccccaccgatcatacagtgagtgctaycctgtcctgctggacggtgtcatggttggctgggtggataaggatcttgctccaggcatcgcagattctcttcgtcattttaaggtgttgagagagaaaagaattcctccctggatggaagtggtccttatacccatgacaggaaaaccaagtctgtacccaggattgttcctttttaccactccttgtagactggtacggcctgtgcagaacttagcaytgggcaaagaagagctaattggaactatggaacagatcttcatgaatgtcgctatctttgaggatgaagtttttgctggagttaccacacaccaggaactctttccacacagcctgctgagtgtgattgccaacttcatccctttctctgatcacaaccagagtccacggaacatgtaccaatgccagatgggtaagcaaactatgggctttccacttctcacttatcaagaccgatcggataacaaactgtatcgtcttcagactcctcagagtcccttggtgagaccctccatgtatgattattatgacatggataactatccaattgggaccaatgccatcgttgctgtgatttcttacactggctatgatatggaagatgccatgattgtgaataaggcctcttgggaacgaggctttgcccatggaagtgtctacaagtctgagttcatagacctctctgaaaaaattaaacaaggagatagtagcctggtgtttggcatcaaacctggtgacccacgcgttctgcagaagttagatgacgatggattgccgtttataggagcaaaactgcagtacggagatccgtattacagctacctcaacctcaacaccggggaaagttttgtgatgtactataagagtaaagaaaattgtgttgtggataacatcaaagtgtgcagtaatgacactgggagtggaaaattcaagtgtgtttgcatcactatgagagtgcctcggaacccaactatcggagataaatttgccagtcgccatgggcagaagggcattttaagcagattgtggccggctgaggacatgccttttactgagagtgggatggtcccagacattctgttcaatccccatggttttccatcccgcatgaccattgggatgttaattgagagtatggccgggaagtctgcagctttgcatggtctctgccatgatgctacacccttcatcttctcagaggagaactcggccttagaatactttggtgagatgttaaaggctgctggctacaatttctatggcacygagaggttatatagtggcatcagtgggctagaactggaagcagacatcttcataggagtggtttattatcarcgcttacgccatatggtctcagacaaatttcaagtaaggacaactggagcccgagacagagtcaccaaccagcctattgggggaagaaatgtccagggtggaatccgttttggggagatggaacgggatgcgcttttagctcatggtacatcttttctccttcatgaccgcctcttcaactgctcagatcggtcggtagcccatgtgtgtgtgaagtgtggcagtttactctctccactgttggagaagccacccccttcttggtctgccatgcgcaacagaaaatacaactgtactctgtgtagtcgcagtgacactatcgatactgtttctgtgccttatgtttttcggtattttgtagctgaactggcagctatgaacatcaaagtgaaactggatgttgtttaacttgatgttgaccttttggattaagaggactatcagattaaagcaaaatgtaattttaattcaatgaagatatcattaccaggttactcttgagatttttcaayggtgttagaactctcaaccaagacctgaaaaccaagtatgcaaggtttctgaatctctctggtagattaactattgacaatgattttytgttatctttgttcaaaaagttcatgtcttctcaaaatatgaaatattgataaatggaagagcatacggtgacaagtctcctttccaaccccaggttccctacaccctgctctcagcaggcagtgagtgtcacacacctgttaatccatcttgagcaggacagtactatacaaatagaatgcaagctgtaatgtaattttatattttcttatagccacgttgaagtaaaaacaaacaggtacagtgttttttaccagctttatagaagtacagttgttacatatttaatgaatacaatttgatgggtctgactatatgcacacacctttgataccatcaccacaatcagggtaataaacatacctgtcatctccacaagtttcctcctgcccctttgttttttgctttttggttgctgttgagtttttgttttgtcttctgtggtaagaacacttaactcaagacctaccctcttaacaaatctttaagtgcacgatatagtattgttaattccaggcaccatgttgtacaacagatctttagaccttacttgtcttgcataactgaagctttatacctgttgaacaactctccatttccctggcccctagcaaccacccttctaccctgtttctatgagtttgactattacagatatctcatatagtgggatcatgcaatatttgtcctgtgactggcttatttcacttagcatagtgaaataagattcatccattttggaagccaggcatggtgctgtgcatctatagtccctgctatttgagaggctgaggtgggaggatcatttgagtgcaggagttcaaggacagcctgggtaatataggaagaccctgtcttgaagaccctgacctcaagtgatccacccacctcggcctccgaaagtgctaggattacaggtgtgagccactgtgcctggcctccggtgagtattttatatttagtctacacttccatacttggcttttttctgcttttatattgatctgctttcatagcagtgtgtagagtgccacttatgttttctttcttgtgtacagtattttattgtatggatttaccatcccctgtgtatttaagttgttccattctttggccattataacttttttctgcaaatattctggtgacttatctttggccattataaactgttgataatagatcatcttgtatatacttctgcaattataagatgttttttgatgatgaaagctttcctaaggtaattctttcctgagtttggttcagatggtctgtcactaattataaggcagataggaacagacagaaaaatctatcatttcaagataggcttagcaggatgggcgcagtggctcacgccactaatcccaacattttaggaggcctaggcaggagcaatcacttgtgcctgggagt

SEQ ID NO: 291 - DNA, 3102 bp, Homo sapiens
atcttcatgaatgtcgctatctttgaggatgaagtttttgctggagttaccacacaccaggaactctttccacacagcctgctgagtgtgattgccaacttcatccctttctctgatcacaaccagagtccacggaacatgtaccaatgccagatgggtaagcaaactatgggctttccacttctcacttatcaagaccgatcggataacaaactgtatcgtcttcagactcctcagagtcccttggtgagaccctccatgtatgattattatgacatggataactatccaattgggaccaatgccatcgttgctgtgatttcttacactggctatgatatggaagatgccatgattgtgaataaggcctcttgggaacgaggctttgcccatggaagtgtctacaagtctgagttcatagacctctctgaaaaaattaaacaaggagatagtagcctggtgtttggcatcaaacctggtgacccacgcgttctgcagaagttagatgacgatggattgccgtttataggagcaaaactgcagtacggagatccgtattacagctacctcaacctcaacaccggggaaagttttgtgatgtactataagagtaaagaaaattgtgttgtggataacatcaaagtgtgcagtaatgacactgggagtggaaaattcaagtgtgtttgcatcactatgagagtgcctcggaacccaactatcggagataaatttgccagtcgccatgggcagaagggcattttaagcagattgtggccggctgaggacatgccttttactgagagtgggatggtcccagacattctgttcaatccccatggttttccatcccgcatgaccattgggatgttaattgagagtatggccgggaagtctgcagctttgcatggtctctgccatgatgctacacccttcatcttctcagaggagaactcggccttagaatactttggtgagatgttaaaggctgctggctacaatttctatggcacygagaggttatatagtggcatcagtgggctagaactggaagcagacatcttcataggagtggtttattatcarcgcttacgccatatggtctcagacaaatttcaagtaaggacaactggagcccgagacagagtcaccaaccagcctattgggggaagaaatgtccagggtggaatccgttttggggagatggaacgggatgcgcttttagctcatggtacatcttttctccttcatgaccgcctcttcaactgctcagatcggtcggtagcccatgtgtgtgtgaagtgtggcagtttactctctccactgttggagaagccacccccttcttggtctgccatgcgcaacagaaaatacaactgtactctgtgtagtcgcagtgacactatcgatactgtttctgtgccttatgtttttcggtattttgtagctgaactggcagctatgaacatcaaagtgaaactggatgttgtttaacttgatgttgaccttttggattaagaggactatcagattaaagcaaaatgtaattttaattcaatgaagatatcattaccaggttactcttgagatttttcaayggtgttagaactctcaaccaagacctgaaaaccaagtatgcaaggtttctgaatctctctggtagattaactattgacaatgattttytgttatctttgttcaaaaagttcatgtcttctcaaaatatgaaatattgataaatggaagagcatacggtgacaagtctcctttccaaccccaggttccctacaccctgctctcagcaggcagtgagtgtcacacacctgttaatccatcttgagcaggacagtactatacaaatagaatgcaagctgtaatgtaattttatattttcttatagccacgttgaagtaaaaacaaacaggtacagtgttttttaccagctttatagaagtacagttgttacatatttaatgaatacaatttgatgggtctgactatatgcacacacctttgataccatcaccacaatcagggtaataaacatacctgtcatctccacaagtttcctcctgcccctttgttttttgctttttggttgctgttgagtttttgttttgtcttctgtggtaagaacacttaactcaagacctaccctcttaacaaatctttaagtgcacgatatagtattgttaattccaggcaccatgttgtacaacagatctttagaccttacttgtcttgcataactgaagctttatacctgttgaacaactctccatttccctggcccctagcaaccacccttctaccctgtttctatgagtttgactattacagatatctcatatagtgggatcatgcaatatttgtcctgtgactggcttatttcacttagcatagtgaaataagattcatccattttggaagccaggcatggtgctgtgcatctatagtccctgctatttgagaggctgaggtgggaggatcatttgagtgcaggagttcaaggacagcctgggtaatataggaagaccctgtcttgaagaccctgacctcaagtgatccacccacctcggcctccgaaagtgctaggattacaggtgtgagccactgtgcctggcctccggtgagtattttatatttagtctacacttccatacttggcttttttctgcttttatattgatctgctttcatagcagtgtgtagagtgccacttatgttttctttcttgtgtacagtattttattgtatggatttaccatcccctgtgtatttaagttgttccattctttggccattataacttttttctgcaaatattctggtgacttatctttggccattataaactgttgataatagatcatcttgtatatacttctgcaattataagatgttttttgatgatgaaagctttcctaaggtaattctttcctgagtttggttcagatggtctgtcactaattataaggcagataggaacagacagaaaaatctatcatttcaagataggcttagcaggatgggcgcagtggctcacgccactaatcccaacattttaggaggcctaggcaggagcaatcacttgtgcctgggagt

SEQ ID NO: 292 - DNA, 2740 bp, Homo sapiens
gtcacagcagccagctgctgtagaagaggggaggaaacaagccagtgcaaggggagcaaaagagaaaaggagccaggctgggcttcctgatcccacagcatcgcagagctcrggaggcacagctcacagacacaggaaacacaggactgctattctgctctcctgcccacggtgatctggtgccagctggtggaacagtgggtgatggcgtccctgctgcaagaccagctgaccactgatcaggacttgctgctgatgcaggaaggcatgccgatgcgcaaggtgaggtccaaaagctggaagaagctaagatacttcagacttcagaatgacggcatgacagtctggcatgcacggcaggccaggggcagtgccaagcccagcttctcaatctctgatgtggagacaatacgtaatggccatgattccgagttgctgcgtagcctggcagaggagctccccctggagcagggcttcaccattgtcttccatggccgccgctccaacctggacctgatggccaacagtgttgaggaggcccagatatggatgcgagggctccagctgttggtggatcttgtcaccagcatggaccatcaggagcgcctggaccacgattggtttcaacgtggagacaaaaatcaggatggtaagatgagtttccaagaagttcagcggttattgcacctaatgaatgtggaaatggaccaagaatatgccttcagtctttttcaggcagcagacacgtcccagtctggaaccctggaaggagaagaattcgtacagttctataaggcattgactaaacgtgctgaggtgcaggaactgtttgaaagtttttcagctgatgggcagaagctgactctgctggaatttttggatttcctccaagaggagcagaaggagagagactgcacctctgagcttgctctggaactcattgaccgctatgaaccttcagacagtggcaaactgcggcatgtgctgagtatggatggcttcctcagctacctctgctctaaggatggagacatcttcaacccagcctgcctccccatctatcaggatatgactcaacccctgaaccactacttcatctgctcttctcataacacctacctagtgggggaccagctttgyggccagagcagcgtcgagggatatataygggccctgaagcgggggtgccgctgcgtggaggtggatgtatgggatggacctagcggggaacctgtcgtttaccacggacacaccctgacctcccgcatcctgttcaaagatgtcgtggccacagtagcacagtatgccttccagacatcagactacccagtcatcttgtccctggagacccactgcagctgggagcagcagcagaccatggcccgtcatctgactgagatcctgggggagcagctgctgagcaccaccttggatggggtgctgcccactcagctgccctcgcctgaggagcttcggaggaagatcctggtgaaggggaagaagttaacacttgaggaagacctggaatatgaggaagaggaagcagaacctgagttggaagagtcagaattggcgctggagtcccagtttgagactgagcctgagccccaggagcagaaccttcagaataaggacaaaaagaagaaatccaagcccatcttgtgtccagccctctcttccctggttatctacttgaagtctgtctcattccgcagcttcacacattcaaaggagcactaccacttctacgagatatcatctttctctgaaaccaaggccaagcgcctcatcaaggaggctggcaatgagtttgtgcagcacaatacttggcagttaagccgtgtgtatcccagcggcctgaggacagactcttccaactacaacccccaggaactctggaatgcaggctgccagatggtggccatgaatatgcagactgcagggcttgaaatggacatctgtgatgggcatttccgccagaatggcggctgtggctatgtgctgaagccagacttcctgcgtgatatccagagttctttccaccctgagaagcccatcagccctttcaaagcccagactctcttaatccaggtgatcagcggtcagcaactccccaaagtggacaagaccaaagaggggtccattgtggatccactggtgaaagtgcagatctttggcgttcgtctagacacagcacggcaggagaccaactatgtggagaacaatggttttaatccatactgggggcagacactatgtttccgggtgctggtgcctgaacttgccatgctgcgttttgtggtaatggattatgactggaaatcccgaaatgactttattggtcagtacaccctgccttggacctgcatgcaacaaggttaccgccacattcacctgctgtccaaagatggcatcagcctccgcccagcttccatctttgtgtatatctgcatccaggaaggcctggagggggatgagtcctgaggttgcaactagaaattcagaggggcttggaatagagaaacctaaagaagcatcatcccctccatccccaacttcctcaaagcccaaagccaagggaaggataaatcaaggctcaaggcttccccagcaaagattagggaaagagacttgaccccaggactgtactacgactcttaagagaacactgcacagcactcaaagtcccccactggactgcttcctccttagccccactggtataaatacatctctctcc

SEQ ID NO: 293 - DNA, 3097 bp, Homo sapiens
gtcacagcagccagctgctgtagaagaggggaggaaacaagccagtgcaaggggagcaaaagagaaaaggagccaggctgggcttcctgatcccacagcatcgcagagctcrggaggcacagctcacagacacaggaaacacaggactgctattctgctctcctgcccacggtgatctggtgccagctggtggaacagtgggtgatggcgtccctgctgcaagaccagctgaccactgatcaggacttgctgctgatgcaggaaggcatgccgatgcgcaaggtgaggtccaaaagctggaagaagctaagatacttcagacttcagaatgacggcatgacagtctggcatgcacggcaggccaggggcagtgccaagcccagcttctcaatctctgatgtggagacaatacgtaatggccatgattccgagttgctgcgtagcctggcagaggagctccccctggagcagggcttcaccattgtcttccatggccgccgctccaacctggacctgatggccaacagtgttgaggaggcccagatatggatgcgagggctccagctgttggtggatcttgtcaccagcatggaccatcaggagcgcctggaccaatggctgagcgattggtttcaacgtggagacaaaaatcaggatggtaagatgagtttccaagaagttcagcggttattgcacctaatgaatgtggaaatggaccaagaatatgccttcagtctttttcaggcagcagacacgtcccagtctggaaccctggaaggagaagaattcgtacagttctataaggcattgactaaacgtgctgaggtgcaggaactgtttgaaagtttttcagctgatgggcagaagctgactctgctggaatttttggatttcctccaagaggagcagaaggagagagactgcacctctgagcttgctctggaactcattgaccgctatgaaccttcagacagtggcaaactgcggcatgtgctgagtatggatggcttcctcagctacctctgctctaaggatggagacatcttcaacccagcctgcctccccatctatcaggatatgactcaacccctgaaccactacttcatctgctcttctcataacacctacctagtgggggaccagctttgyggccagagcagcgtcgagggatatataygggccctgaagcgggggtgccgctgcgtggaggtggatgtatgggatggacctagcggggaacctgtcgtttaccacggacacaccctgacctcccgcatcctgttcaaagatgtcgtggccacagtagcacagtatgccttccagacatcagactacccagtcatcttgtccctggagacccactgcagctgggagcagcagcagaccatggcccgtcatctgactgagatcctgggggagcagctgctgagcaccaccttggatggggtgctgcccactcagctgccctcgcctgaggagcttcggaggaagatcctggtgaaggggaagaagttaacacttgaggaagacctggaatatgaggaagaggaagcagaacctgagttggaagagtcagaattggcgctggagtcccagtttgagactgagcctgagccccaggagcagaaccttcagaataaggacaaaaagaagaaatccaagcccatcttgtgtccagccctctcttccctggttatctacttgaagtctgtctcattccgcagcttcacacattcaaaggagcactaccacttctacgagatatcatctttctctgaaaccaaggccaagcgcctcatcaaggaggctggcaatgagtttgtgcagcacaatacttggcagttaagccgtgtgtatcccagcggcctgaggacagactcttccaactacaacccccaggaactctggaatgcaggctgccagatggtggccatgaatatgcagactgcagggcttgaaatggacatctgtgatgggcatttccgccagaatggcggctgtggctatgtgctgaagccagacttcctgcgtgatatccagagttctttccaccctgagaagcccatcagccctttcaaagcccagactctcttaatccaggtgatcagcggtcagcaactccccaaagtggacaagaccaaagaggggtccattgtggatccactggtgaaagtgcagatctttggcgttcgtctagacacagcacggcaggagaccaactatgtggagaacaatggttttaatccatactgggggcagacactatgtttccgggtgctggtgcctgaacttgccatgctgcgttttgtggtaatggattatgactggaaatcccgaaatgactttattggtcagtacaccctgccttggacctgcatgcaacaaggttaccgccacattcacctgctgtccaaagatggcatcagcctccgcccagcttccatctttgtgtatatctgcatccaggaaggcctggagggggatgagtcctgaggtgggcatttcaygggaagggttggtrtgctggctttagacggggagaaacatctggaaggatgctcgagagaacaaatggaggtggtgaaaatcaagctttggattgtgcattcctaggcacaaaattacctcattcttcctaacaagcaatctgggacctgattttccaccttttttctcttttcttcccttcctttgttttcataagcctttggtatctttcctgcccttttcctttgtgtactctatactggagttcccttcttcctcttgctgtaggctcaatcccataccgacatctacaactaatctttcccatcaactctgtgtgaaggcaggttgcaactagaaattcagaggggcttggaatagagaaacctaaagaagcatcatcccctccatccccaacttcctcaaagcccaaagccaagggaaggataaatcaaggctcaaggcttccccagcaaagattagggaaagagacttgaccccaggactgtactacgactcttaagagaacactgcacagcactcaaagtcccccactggactgcttcctccttagccccactggtataaatacatctctctccaatttggc

SEQ ID NO: 294 - DNA, 1062 bp, Homo sapiens
gactacacaaggactgaaccagaaggaagaggacagagcaaagccatgaacatcatcctagaaatccttctgcttctgatcaccatcatctactcytacttggagtcgttggtgaagtttttcattcctcagaggagaaaatctgtggctggggagattgttctcattactggagctgggcatggaataggcaggcagactacttatgaatttgcaaaacgacagagcatattggttctgtgggatattaataagcgcggtgtggaggaaactgcagctgagtgccgaaaactaggcgtcactgcgcatgcgtatgtggtagactgcagcaacagagaagagatctatcgctctctaaatcaggtgaagaaagaagtgggtgatgtaacaatcgtggtgaataatgctgggacagtatatccagccgatcttctcagcaccaaggatgaagagattaccaagacatttgaggtcaacatcctaggacatttttgratcacaaaagcacttcttccatcgatgatggagagaaatcatggccacatcgtcacagtggcttcagtgtgcggccacgaagggattccttacctcatcccatattgttccagcaaatttgccgctgttggctttcacagaggtctgacatcagaacttcaggccttgggaaaaactggtatcaaaacctcatgtctctgcccagtttttgtgaatactgggttcaccaaaaatccaagcacaagattatggcctgtattggagacagatgaagtcgtaagaagtctgatagatggaatacttaccaataagaaaatgatttttgttccatcgtatatcaatatctttctgagactacagaagtttcttcctgaacgcgcctcagcgattttaaatcgtatgcagaatattcaatttgaagcagtggttggccacaaaatcaaaatgaaatgaataaataagctccagccagagatgtatgcatgataatgatatgaatagtttcgaatcaatgctgcaaagctttatttcacattttttcagtcctgataatattaaaaacattgg

SEQ ID NO: 295 - DNA, 740 bp, Homo sapiens
gactacacaaggactgaaccagaaggaagaggacagagcaaagccatgaacatcatcctagaaatccttctgcttctgatcaccatcatctactcytacttggagtcgttggtgaagtttttcattcctcagaggagaaaatctgtggctggggagattgttctcattactggagctgggcatggaataggcaggcagactacttatgaatttgcaaaacgacagagcatattggttctgtgggatattaataagcgcggtgtggaggaaactgcagctgagtgccgaaaactaggcgtcactgcgcatgcgtatgtggtagactgcagcaacagagaagagatctatcgctctctaaatcaggtgaagaaagaagtgggtgatgtaacaatcgtggtgaataatgctgggacagtatatccagccgatcttctcagcaccaaggatgaagagattaccaagacatttgaggtcaacatcctaggacatttttgratcacaaaagcacttcttccatcgatgatggagagaaatcatggccacatcgtcacagtggcttcagtgtgcggccacgaagggattccttacctcatcccatattgttccagcaaatttgccgctgttggctttcacagaggtctgacatcagaacttcaggccttgggaaaaactggtatcaaaacctcatgtctctgcccagtttttgtgaatactgggttcaccaaaaatccaagcacaag

SEQ ID NO: 296 - DNA, 1131 bp, Homo sapiens
ctgcatcttctcatgcattgccagctgcatcgctgaggtagtgaaggtgatggccggagtcaacggatttggtcgtattggatgcctggtcaccagggttgcttttaactctggaaaagtggatattgtcgccatcaatgaccrcttcattgacctcaactacatggctgagaatgggaagcttgtcatcagtggaaatcccattaccatcttccaggagcgagatccctccaaaatcaaatggggcaatgctgacgctgagtacgttgtggagtccactggtgttttcaccccyatggagaaggctggagctcacttgcaggaaggagccaaaagggtcatcatctctccccactttgttgacgcccccatgttagtgatgggcatgaaccatgagaagtatgacaacagcctcaagatcatcagcaatgccttctgcaccaccaactgcttagcgcccctggccaatgtcatccatgacaactttggtatcgtggaaggactcatgactacagtccatgccatcactgccacccagaagactgtggatggcccctctgggaaactgtggcgtgacagctgcagggctctccagaacatcatccctgmctctactggtgctgccaaggctgtgggaaaggccctctctgagctgaatgggaagctcactggcatggccttctgtgtcaccactgccaaggtgtcggtcattaacctgacctgccatctggaaaaacctgccaaatatgatgacatcaagaaggtggtgaagcagacatcggagggccccctcaagggcatcctgggctacactgagcaccaggctgtctcctccaacttcaacagcaacaygcactcttccaccttcaatgttagggctggcattgccctcaacaaccactttgtcaagatcatttcttggtatagcgatgaatttggctacagcaacaaggtcgtggacctcatggcccacatggcctccaaaaggaagaccaccagaccaccagccccagagagagcatgagaggaagagagaggtcgtcactgctggggagtccctgccacactcagtcccccactacactgagaatctcccctcctcactttccatgtagaactcctgaagaggga

SEQ ID NO: 297 - DNA, 2349 bp, Homo sapiens
tcctcccgctgctcctcctccgcctccttcccctgcccgcgcccgccctactgccccgtgccgagtttcctgtttaagatggcgtcccccgtagcagcgcaggccgggaagcttctgcgagccctagcgctgcggccccgcttcctggcggccgggtcccaggcagttcaattaacctccagaagatggctgaacctgcaggaataccagagcaagaaactgatgtctgacaacggagtgagagttcaaagattctttgtagcagacactgcaaatgaagctctcgaggctgctaagagactaaatgcaaaagaaattgttttaaaagcccagatcttagctggaggaagaggaaaaggtgtcttcaatagtggtttgaaaggaggtgttcatttaacaaaagaccctaatgttgtgggacagctgrctaaacagatgattgggtacaatctagcgacaaaacaaactccaaaagaaggtgtgaaagttaacaaggtgatggttgctgaagccttggatatttccagagaaacctacctggcaattctgatggaccggtcctgcaatggccccgtgctggtgggcagcccccaggggggcgtcgacattgaagaggtggctgcttcaaacccggagctcatttttaaggagcaaattgacatttttgaaggaataaaggacagccaagctcagcggatggccgaaaatctaggcttcgttgggcctttgaaaagccaggctgcagatcaaattacgaagctgtataatctcttcctgaaaattgatgctactcaggtggaagtgaatccctttggtgaaactccagaaggacaagttgtctgttttgatgccaagataaactttgatgacaacgcagaattccgacaaaaagacatatttgctatggacgacaaatcagagaatgagcccattgaaaatgaagctgccaaatatgatctaaaatacataggactagatgggaacattgcctgctttgtgaatggtgctgggctcgccatggctacttgtgatatcattttccttaatggtgggaagccagccaacttcttggatcttggaggtggtgtaaaggaagctcaagtatatcaagcattcarattgctcacagctgatcctaaggttgaagccatccttgtcaatatatttggtggtatcgtcaactgtgccatcattgccaatgggatcaccaaagcctgcygggagctagaactcaaggtgcccctggtggtccggcttgaaggarccaacgtccaagaggcccagaagatactcaacaacagcggactccccattacttcagccattgacctggaggatgcagccaagaaggctgtggccagtgtggccaagaagtgatgtctttgtcctgatccaatggagaaagaaagccatttttccrtaaaaagggatggttcatcattgtgaaagaaatggttatctcattggggaagaaaaggggagggggaaggcaagaatcactgaaaaatcttaaatctgtgttttctggaataagatatctagacagcctaaatctgattttrgtyttttaggcagtgttttgcagactttggggagtggtctatgtggccaaatattgtgtgtatagacagaatttgaaatcaagtcctgcttcatttacaagaattttggtgggcatckaatcctacataatgaaaaagaaaaacagaccatttaaaaactcagacaagattatatttaatatattaattactaaaaaggcayaagattacactgaacatattagctactaaaaaggcactgctaagacattcaagcaaatagctattacacactactgcagattttacaggtttctaattctaacatatgtttgaaaaatccgtgagtattccaaaatatatttaataatggaatatctgcattaatataccatccatgtgtttttaccatttgccttaatattgaatatactgtttacctcacactaaaaagaaaaccagaagccttatttgtgattttgggagtggaagcttccatttttgtgtcaaaaatgaatcctgattcttatggaaatctctgttattaagatatttcaagatgagacaacactgaagatcaaattgtgtttagtatcactatcttctctcctcgtttctctcttactcctcatcctcccagaatctaccagtttatggtagaaagatgggaaccttatttgaatgtgtttttttttttccatgatgtccaattttgttgtgggaaaggatttggataaaatttttgtttaaattttggtagatttttatctatacaaatttaaataaaattatgttttgtaagctgtaa

SEQ ID NO: 298 - DNA, 2403 bp, Homo sapiens
tcctcccgctgctcctcctccgcctccttcccctgcccgcgcccgccctactgccccgtgccgagtttcctgtttaagatggcgtcccccgtagcagcgcaggccgggaagcttctgcgagccctagcgctgcggccccgcttcctggcggccgggtcccaggcagttcaattaacctccagaagatggctgaacctgcaggaataccagagcaagaaactgatgtctgacaacggagtgagagttcaaagattctttgtagcagacactgcaaatgaagctctcgaggctgctaagagactaaatgcaaaagaaattgttttaaaagcccagatcttagctggaggaagaggaaaaggtgtcttcaatagtggtttgaaaggaggtgttcatttaacaaaagaccctaatgttgtgggacagctgrctaaacagatgattgggtacaatctagcgacaaaacaaactccaaaagaaggtgtgaaagttaacaaggtgatggttgctgaagccttggatatttccagagaaacctacctggcaattctgatggaccggtcctgcaatggccccgtgctggtgggcagcccccaggggggcgtcgacattgaagaggtggctgcttcaaacccggagctcatttttaaggagcaaattgacatttttgaaggaataaaggacagccaagctcagcggatggccgaaaatctaggcttcgttgggcctttgaaaagccaggctgcagatcaaattacgaagctgtataatctcttcctgaaaattgatgctactcaggtggaagtgaatccctttggtgaaactccagaaggacaagttgtctgttttgatgccaagataaactttgatgacaacgcagaattccgacaaaaagacatatttgctatggacgacaaatcagagaatgagcccattgaaaatgaagctgccaaatatgatctaaaatacataggactagatgggaacattgcctgctttgtgaatggtgctgggctcgccatggctacttgtgatatcattttccttaatggtgggaagccagccaacttcttggatcttggaggtggtgtaaaggaagctcaagtatatcaagcattcarattgctcacagctgatcctaaggttgaagccatccttgtcaatatatttggtggtatcgtcaactgtgccatcattgccaatgggatcaccaaagcctgcygggagctagaactcaaggtgcccctggtggtccggcttgaaggarccaacgtccaagaggcccagaagatactcaacaacagcggactccccattacttcagccattgacctggaggatgcagccaagaaggctgtggccagtgtggccaagaagtgatgtctttgtcctgatccaatggagaaagaaagccatttttccrtaaaaagggatggttcatcattgtgaaagaaatggttatctcattggggaagaaaaggggagggggaaggcaagaatcactgaaaaatcttaaatctgtgttttctggaataagatatctagacagcctaaatctgattttrgtytttataaaaataatrtmttgtgttctcatacttttctgtcactgtaagcctgcccagtaggcagtgttttgcagactttggggagtggtctatgtggccaaatattgtgtgtatagacagaatttgaaatcaagtcctgcttcatttacaagaattttggtgggcatckaatcctacataatgaaaaagaaaaacagaccatttaaaaactcagacaagattatatttaatatattaattactaaaaaggcayaagattacactgaacatattagctactaaaaaggcactgctaagacattcaagcaaatagctattacacactactgcagattttacaggtttctaattctaacatatgtttgaaaaatccgtgagtattccaaaatatatttaataatggaatatctgcattaatataccatccatgtgtttttaccatttgccttaatattgaatatactgtttacctcacactaaaaagaaaaccagaagccttatttgtgattttgggagtggaagcttccatttttgtgtcaaaaatgaatcctgattcttatggaaatctctgttattaagatatttcaagatgagacaacactgaagatcaaattgtgtttagtatcactatcttctctcctcgtttctctcttactcctcatcctcccagaatctaccagtttatggtagaaagatgggaaccttatttgaatgtgtttttttttttccatgatgtccaattttgttgtgggaaaggatttggataaaatttttgtttaaattttggtagatttttatctatacaaatttaaataaaattatgttttgtaagctgtaa

SEQ ID NO: 299 - DNA, 927 bp, Homo sapiens
atgacaggcggcctgattgatcatgccggttgtgaggtttatgctagtcaacaggagctgcccggggaaaagcagagaggggaccttagtaaccggaaaagtagtaacagctaccacttacaggggatggccgtgcatcagatgctgctgcacgggttatgcatgttttcatccacttctgctcctccactctggggaacaggcgctgttggcttcccaagccatggtcggttctctaaatatatgcccaatgtcaagaaggatgaagaggtgctgaagaagaactgcctgcatatcgtcgtggggactccaggccgtatcctagccctggctggarataagagcctcaacctcaaacacataaaacactttatttcaaatgaatgtgataagacgtttgaacagctcaacatgtgtcgggatgtccagggaatttttcgcatgaccccaccggctaccttgagcaaagagatccgtccagtctgccacaagttcatgcaagatccagtggagatcttcrtggataatgagatgaagttgatgctgcatgggttgcagcagtactacatgaaactgaaggacaaccagaagaactggaagcgctatgaccttctgaatgtccttgagttcaaccaggtgatgatctttttgaagtctgtgcagcggcgcattgcctcagcccagctactgggaatggacattgagcgggtgaacattgcttttaattatgacatgcctgaggattctgacacctacctgcattgggtggccagagccagccggtttggcaccaagrgcttggctatcacatttgtgtctgacgagaatgatgccaagatcctcaawgacatgcaggatcgctttgaggtcaatcgtagtgatctgcctgatgagagagacatcttctcctgctttgaaaagacmtgg

SEQ ID NO: 300 - DNA, 1023 bp, Homo sapiens
aggtggagccccagtccggaagccggggatccgcggccatgacggtgccggtccgcggcttctcgctgctccgcggccgccttggccgagcgccggcgttgggcagaagcacagcaccctccgtaagggcaccgggagagcccgggagtgcgttccggggctttcggagcagcggtgtgaggaccagcagagagaagagattccatcttccagagacatgaagccattattatatcaggaaccgaaatggccaagcatatccagaaagaaatacagcgaggtgtggaatcatgggtttcccttggaaacagaagacctcacctcagtataattttagtgggagataacccagcaagccatacatatgtcaggaataagataagagctgcctctgctrtaggtatttgtagtgagctcattctaaaacctaaggatgtttctcaggaagaacttttggacgtaactgatcaattgaatatggacccaagagtcagcggtatattagttcagttaccactaccagaccacgttgatgagcgaacaatatgcaatggaattgccccagaaaaagatgtagatggatttcatattatcaatattggaagattgtgccttgatcagcattctctcatacctgccactgccagtgctgtttgggaaataataaaaagaacaggaattcaaacatttggaaaaaatgtggttgtggctggaagatccaagaacgtagggatgcctattgccatgcttttacacactgatggagagcatgaacggccaggaggtgatgcaactgtgacaatagctcacagatacacccccaaagagcaactgaagattcatacgcagctggcagatattatcatagttgctgcagggtctctctctatttcccatgctggagtgcagtggcgcaatcatggctcactgtagccttgacctcctgggcccaagtgatcctcccacctcagcctcctaagtaggtgcacaccaccaygcgtagctaatttttgtattttttgt

SEQ ID NO: 301 - DNA, 1702 bp, Homo sapiens
gttagaggaggtcctgtgcagccttctgactcctttattactttcacagagtcagattgctttcttctaaaatagcccctctatgtgatgcaactgtgacaatagctcacagatacacccccaaagagcaactgaagattcatacgcagctggcagatattatcatagttgctgcaggtattccaaagttgattacgtctgatatggttaaagaaggtgctgctgtaattgatgtgggtatcaactatgtccacgatccagtgacaggaaagacaaaattagttggagatgtggacttcgaagctgttaaaaagaaagctggctttatcactccagttccaggaggtgtgggacccatgacagtggcaatgcttctgaagaacacccttctggcagctaaaaaaatcatttactagatcacrtgaaaggataaagcaaactgaagtcatgctatttgtttatttgacaaagggtaaaacctttatattttactacaaagctatttatttctacatggtatttattttttcatgggtgaaatcattgtgaatcaattgattcacatagttttatgcatttcctgctaatttattttgagttttaagaaaacaaccaaaacaattccaatgaaaattttagtaacaattgtttattttgagggtatttgttcataacattaaaacaataaagggctcataataaataaatatatttttgacacaattaaatattacatagagtatgtttacaacaaatatcctgtcagccaaatggttacccatataaaatgtaatttaggttttgctacttgcatgctaacatttttaatgtattttatgatctatgtcatatattaaaaaagagcttgcttactacaagaaaaatattgaaatattgaaaatattgaaaatattattattgaaaataaaatcttgatctcaactatcccccaaatgcatcctataagtccatcctaatgagaaatgatgttctatttaaggaaaggaaaatattccgggaaggcaaaaaatgcagtgctgtttggaagtgtaatgattttatcacatggtgaatgactactaagagtaatgattatatcacattgtgaatgactacttgccacagtaaaaatacatgaagaatgtgttaggtttaaacgtcgtttctttcttctaaaaaatatttggttagtaccttcactgagcaatagtggaaaaataaaaaaataagtaaacagaaaaaactaaagttgtattttcccacaaatatagtatgaatgaggtcatattaaagaacagcaactgttaatgtttgttcacaaattcagaaatctaataggaaaacatgatactttcaatgtgccaaaactaaaccttagtatacaactaaaaatctcctgccttcttgcctacctgtcttccctcttctgttacagaatttgttcctcaaagtagatgcaatgtttctaacacaatttaaattaggaaatatatatgaatgtcgttgaagtctattttgagactgctaaagctattaattgatactgtgtttttatgcccaaatcccagtatgtttatgtaccaataatgactcttacccagcgcatgtctttatcagtgtgtactcgtgacgatttgtgtgaaaatagacttgatgtttataattaataccattacaactgtataataaaagcaatttgaag

SEQ ID NO: 302 - DNA, 1408 bp, Homo sapiens
gactcgttcaccagagcacctactatgttccaggtggtatcataagaacttgggagacatcactaaacaaaatagaaaaatccctgcccttatggagctgacattctagtgggggcttggtttttttccttgggtactgggtttgtttttccatgatgagcatatcctatgatgcactatagcactcaagcaagatgcctgaagcaaaggaggccaaagtaatgattcatggattcagcacactttcctttgttgaaaagcactgcttgttccccctcaaagctatgtgagaggctgtgtaggagagagtggagagcaggtagcctaccggacctacagttcaccatttcagccctgtaattgaccagctgtgggacctcagtgtgaagcttattcatgaagagacctctgcctgaacatacagcaaatttaagaaggttgtgcagatagtctgaaggaggaccagcagagagaagagattccatcttccagagacatgaagccattattatatcaggaaccgaaatggccaagcatatccagaaagaaatacagcgaggtgtggaatcatgggtttcccttggaaacagaagacctcacctcagtataattttagtgggagataacccagcaagccatacatatgtcaggaataagataagagctgcctctgctrtaggtatttgtagtgagctcattctaaaacctaaggatgtttctcaggaagaacttttggacgtaactgatcaattgaatatggacccaagagtcagcggtatattagttcagttaccactaccagaccacgttgatgagcgaacaatatgcaatggaattgccccagaaaaagatgtagatggatttcatattatcaatattggaagattgtgccttgatcagcattctctcatacctgccactgccagtgctgtttgggaaataataaaaagaacaggaattcaaacatttggaaaaaatgtggttgtggctggaagatccaagaacgtagggatgcctattgccatgcttttacacactgatggagagcatgaacggccaggaggtgatgcaactgtgacaatagctcacagatacacccccaaagagcaactgaagattcatacgcagctggcagatattatcatagttgctgcaggtaagtccttattgattacgtctgatatggttaaagaaggtgctgctgtaattgatgtgggtatcaactatgtccacgatccagtgacaggaaagacaaaattagttggagatgtggacttcgaagctgttaaaaagaaagctggctttatcactccagttccaggaggtgtgggacccatgacagtggcaatgcttctgaagaacacccttctggcagctaaaaaaatcatttactagatcacrtgaaagg

SEQ ID NO: 303 - DNA, 2402 bp, Homo sapiens
aggtggagccccagtccggaagccggggatccgcggccatgacggtgccggtccgcggcttctcgctgctccgcggccgccttggccgagcgccggcgttgggcagaagcacagcaccctccgtaagggcaccgggagagcccgggagtgcgttccggggctttcggagcagcggtgtgaggaccagcagagagaagagattccatcttccagagacatgaagccattattatatcaggaaccgaaatggccaagcatatccagaaagaaatacagcgaggtgtggaatcatgggtttcccttggaaacagaagacctcacctcagtataattttagtgggagataacccagcaagccatacatatgtcaggaataagataagagctgcctctgctrtaggtatttgtagtgagctcattctaaaacctaaggatgtttctcaggaagaacttttggacgtaactgatcaattgaatatggacccaagagtcagcggtatattagttcagttaccactaccagaccacgttgatgagcgaacaatatgcaatggaattgccccagaaaaagatgtagatggatttcatattatcaatattggaagattgtgccttgatcagcattctctcatacctgccactgccagtgctgtttgggaaataataaaaagaacaggaattcaaacatttggaaaaaatgtggttgtggctggaagatccaagaacgtagggatgcctattgccatgcttttacacactgatggagagcatgaacggccaggaggtgatgcaactgtgacaatagctcacagatacacccccaaagagcaactgaagattcatacgcagctggcagatattatcatagttgctgcaggtattccaaagttgattacgtctgatatggttaaagaaggtgctgctgtaattgatgtgggtatcaactatgtccacgatccagtgacaggaaagacaaaattagttggagatgtggacttcgaagctgttaaaaagaaagctggctttatcactccagttccaggaggtgtgggacccatgacagtggcaatgcttctgaagaacacccttctggcagctaaaaaaatcatttactagatcacrtgaaaggataaagcaaactgaagtcatgctatttgtttatttgacaaagggtaaaacctttatattttactacaaagctatttatttctacatggtatttattttttcatgggtgaaatcattgtgaatcaattgattcacatagttttatgcatttcctgctaatttattttgagttttaagaaaacaaccaaaacaattccaatgaaaattttagtaacaattgtttattttgagggtatttgttcataacattaaaacaataaagggctcataataaataaatatatttttgacacaattaaatattacatagagtatgtttacaacaaatatcctgtcagccaaatggttacccatataaaatgtaatttaggttttgctacttgcatgctaacatttttaatgtattttatgatctatgtcatatattaaaaaagagcttgcttactacaagaaaaatattgaaatattgaaaatattgaaaatattattattgaaaataaaatcttgatctcaactatcccccaaatgcatcctataagtccatcctaatgagaaatgatgttctatttaaggaaaggaaaatattccgggaaggcaaaaaatgcagtgctgtttggaagtgtaatgattttatcacatggtgaatgactactaagagtaatgattatatcacattgtgaatgactacttgccacagtaaaaatacatgaagaatgtgttaggtttaaacgtcgtttctttcttctaaaaaatatttggttagtaccttcactgagcaatagtggaaaaataaaaaaataagtaaacagaaaaaactaaagttgtattttcccacaaatatagtatgaatgaggtcatattaaagaacagcaactgttaatgtttgttcacaaattcagaaatctaataggaaaacatgatactttcaatgtgccaaaactaaaccttagtatacaactaaaaatctcctgccttcttgcctacctgtcttccctcttctgttacagaatttgttcctcaaagtagatgcaatgtttctaacacaatttaaattaggaaatatatatgaatgtcgttgaagtctattttgagactgctaaagctattaattgatactgtgtttttatgcccaaatcccagtatgtttatgtaccaataatgactcttacccagcgcatgtctttatcagtgtgtactcgtgacgatttgtgtgaaaatagacttgatgtttataattaataccattacaactgtataataaaagcaatttgaag

SEQ ID NO: 304 - DNA, 2681 bp, Homo sapiens
gactcgttcaccagagcacctactatgttccaggtggtatcataagaacttgggagacatcactaaacaaaatagaaaaatccctgcccttatggagctgacattctagtgggggcttggtttttttccttgggtactgggtttgtttttccatgatgagcatatcctatgatgcactatagcactcaagcaagatgcctgaagcaaaggaggccaaagtaatgattcatggattcagcacactttcctttgttgaaaagcactgcttgttccccctcaaagctatgtgagaggctgtgtaggagagagtggagagcaggtagcctaccggacctacagttcaccatttcagccctgtaattgaccagctgtgggacctcagtgtgaagcttattcatgaagagacctctgcctgaacatacagcaaatttaagaaggttgtgcagatagtctgaaggaggaccagcagagagaagagattccatcttccagagacatgaagccattattatatcaggaaccgaaatggccaagcatatccagaaagaaatacagcgaggtgtggaatcatgggtttcccttggaaacagaagacctcacctcagtataattttagtgggagataacccagcaagccatacatatgtcaggaataagataagagctgcctctgctrtaggtatttgtagtgagctcattctaaaacctaaggatgtttctcaggaagaacttttggacgtaactgatcaattgaatatggacccaagagtcagcggtatattagttcagttaccactaccagaccacgttgatgagcgaacaatatgcaatggaattgccccagaaaaagatgtagatggatttcatattatcaatattggaagattgtgccttgatcagcattctctcatacctgccactgccagtgctgtttgggaaataataaaaagaacaggaattcaaacatttggaaaaaatgtggttgtggctggaagatccaagaacgtagggatgcctattgccatgcttttacacactgatggagagcatgaacggccaggaggtgatgcaactgtgacaatagctcacagatacacccccaaagagcaactgaagattcatacgcagctggcagatattatcatagttgctgcaggtattccaaagttgattacgtctgatatggttaaagaaggtgctgctgtaattgatgtgggtatcaactatgtccacgatccagtgacaggaaagacaaaattagttggagatgtggacttcgaagctgttaaaaagaaagctggctttatcactccagttccaggaggtgtgggacccatgacagtggcaatgcttctgaagaacacccttctggcagctaaaaaaatcatttactagatcacrtgaaaggataaagcaaactgaagtcatgctatttgtttatttgacaaagggtaaaacctttatattttactacaaagctatttatttctacatggtatttattttttcatgggtgaaatcattgtgaatcaattgattcacatagttttatgcatttcctgctaatttattttgagttttaagaaaacaaccaaaacaattccaatgaaaattttagtaacaattgtttattttgagggtatttgttcataacattaaaacaataaagggctcataataaataaatatatttttgacacaattaaatattacatagagtatgtttacaacaaatatcctgtcagccaaatggttacccatataaaatgtaatttaggttttgctacttgcatgctaacatttttaatgtattttatgatctatgtcatatattaaaaaagagcttgcttactacaagaaaaatattgaaatattgaaaatattgaaaatattattattgaaaataaaatcttgatctcaactatcccccaaatgcatcctataagtccatcctaatgagaaatgatgttctatttaaggaaaggaaaatattccgggaaggcaaaaaatgcagtgctgtttggaagtgtaatgattttatcacatggtgaatgactactaagagtaatgattatatcacattgtgaatgactacttgccacagtaaaaatacatgaagaatgtgttaggtttaaacgtcgtttctttcttctaaaaaatatttggttagtaccttcactgagcaatagtggaaaaataaaaaaataagtaaacagaaaaaactaaagttgtattttcccacaaatatagtatgaatgaggtcatattaaagaacagcaactgttaatgtttgttcacaaattcagaaatctaataggaaaacatgatactttcaatgtgccaaaactaaaccttagtatacaactaaaaatctcctgccttcttgcctacctgtcttccctcttctgttacagaatttgttcctcaaagtagatgcaatgtttctaacacaatttaaattaggaaatatatatgaatgtcgttgaagtctattttgagactgctaaagctattaattgatactgtgtttttatgcccaaatcccagtatgtttatgtaccaataatgactcttacccagcgcatgtctttatcagtgtgtactcgtgacgatttgtgtgaaaatagacttgatgtttataattaataccattacaactgtataataaaagcaatttgaag

SEQ ID NO: 305 - DNA, 3121 bp, Homo sapiens
gagcaagccgagtggagggaggcaaaggccaggctgaggatcagggtggcccgggtggcagcggggaggcgctgcatgctggaggctgtgctgagtgcccggtgcaggtgagccggtcctgcggagttgtgccgagtgcctgctgcagtctcatttccagttcctccatgacgtggcaagtgaagacaggaatgaaaggaatgtaaagcagcttttctctgaagagaagaagagagagagacasagccaagaccgaggctgggccaagatggygtctgtgtttcgaagcgaggagatgtgtttgtcacaactgtttctccaggtggaagctgcatattgctgtgtggctgagctcggagagctcggattggttcagttcaaagatttaaatatgaatgtgaacagctttcaaaggaaatttgtgaatgaagtcagaaggtgtgaatcactggagagaatcctccgttttctggaagacgagatgcaaaatgagattgtagttcagttgctcgagaaaagcccactgaccccgctcccacgggaaatgattaccctggagactgttctagaaaaactggaaggagagttacaggaagccaaccagaaccagcaggccttgaaacaaagcttcctagaactgacagaactgaaatacctcctgaagaaaacccaagacttctttgagacrgaaaccaatttagctgatgatttctttactgaggacacttctggcctcctggagttgaaagcagtgcctgcatatatgaccggaaagttggggttcatagccggtgtgatcaacagggagaggatggcttcctttgagcggttactgtggcgaatctgcygaggaaacgtgtacttgaagttcagtgagatggacgcccctctggaggatcctgtgacgaaagaagaaattcagaagaacatattcatcatattttaccaaggagagcagctcaggcagaaaatcaagaagatctgtgatgggtttcgagccactgtctacccttgcccagagcstgcggtggagcgcagagagatgttggagagcgtcaatgtgaggctggaagatttaatcaccgtcataacacaaacagagtctcaccgccagcgcctgctgcaggaagccgctgccaactggcactcctggctcatcaaggtgcagaagatgaaagctgtctaccacatcctgaacatgtgcaacatcgacgtcacccagcagtgtgtcatcgccgagatctggttcccggtggcagatgccacacgtatcaagagggcactggagcaaggcatggaamtaagtggctcctccatggcccccatcatgaccacagtgcaatctaaaacagcccctcccacatttaacaggaccaataaattcacagctggcttccagaatattgttgatgcctatggtgtyggcagctaccgggagataaacccagccccctacaccatcatcactttccccttcctgttcgctgtgatgtttggagactgtggtcatggaaccgtgatgctcctggctgcactttggatgattctgaatgagagacgcttgctctcccagaagacagacaatgagatttggaacaccttcttccacgggcgctatctgatcctacttatgggcatcttctccatctacacgggtttgatctacaatgactgcttctccaagtccttgaacatctttggctcttcttggagtgtccaacccatgttcagaaacggcacatggaatactcatgtaatggaggaaagtctatatctgcagctggacccagccataccaggagtgtattttggaaatccatacccgtttgggattgatccgatttggaacttggcttcaaacaaactcacatttctgaactcgtataaaatgaagatgtcggtgatcctrggaattgtccagatggttttyggtgtcatcctcagccttttcaatcacatatacttcagaagaactctcaacatcattctgcaatttatccctgagaygatttttatcctgtgtctgtttggatacctggttttcatgatcattttcaaatggtgctgctttgacgtccaygtatctcagcacgcccccagcatcctcatccacttcatcaacatgtttctgtttaactacagtgactcttccaacgcacccctctacaaacatcagcaagaagtccaaagtttctttgtggttatggctttgatttctgtgccgtggatgcttctgattaagccgtttattcttagagccagtcatcggaaatcccagctgcaggcatccaggatccaagaagatgccactgagaacattgaaggtgatagctccagcccttctagccgttctggccagaggacttctgcagatacccacggggctctggacgaccatggagaagagttcaactttggagacgtctttgtccaccaagccatccacaccatcgagtactgcctgggctgcatttcaaacacagcctcctacctgcggctctgggccctcagcctggctcatgcacaactgtctgaagtgctctggactatggtgatgaacagcggccttcagayrcgaggctggggaggaatcgtcggggtttttattatttttgccgtatttgctgtcctgacagtagccatccttctgatcatggagggcctctctgctttcctgcacgccctgcgactgcactgggttgagttccagaacaagttctatgtcggggatggttacaagttttctccattctcctttaaacacatcctggatggcacagccgaggagtaggctgagggctgcacctcccacggtggtcaccatgccaatgaaggaagttcagtcttgtctttgatatcagccyctgcaaggcgctcaatgggaaggttgttcttggctcacctgaagcatgaaactgtgtattatttggacgtcagcctgtggatttgatacgacttaaccacgtcagaggaaggactttggcaagtgatattgtcttcatgtggggtattaattctcaaataataaartaattgacaaatgaggggagaatgctaaacagatgtcttcttgcaatattttaaatattgtatttgagaaaataaacatctgagtcattca

SEQ ID NO: 306 - DNA, 3303 bp, Homo sapiens
tggaagttgtcctcttccaaagtgagtggaaaaaaaccctagttggctgaatgctagggttaggttcgagcttatgaaattgccattgttataggtgaaaattgttcaatatcagcaattttctgtggttcaaatggaatagccccggtgaaaattcctaagaatttaaacatcgccctcctcccttataagcagagccagaagcgagggagggactggccctacttggggctattccacaagaaaagctgctgggaagacccaacgattcagtgcagttaaacttgtcttctgattctgagctcccatcataagcaaggcactgtcgggtctcatttccagttcctccatgacgtggcaagtgaagacaggaatgaaaggaatgtaaagcagcttttctctgaagagaagaagagagagagacasagccaagaccgaggctgggccaagatggygtctgtgtttcgaagcgaggagatgtgtttgtcacaactgtttctccaggtggaagctgcatattgctgtgtggctgagctcggagagctcggattggttcagttcaaagatttaaatatgaatgtgaacagctttcaaaggaaatttgtgaatgaagtcagaaggtgtgaatcactggagagaatcctccgttttctggaagacgagatgcaaaatgagattgtagttcagttgctcgagaaaagcccactgaccccgctcccacgggaaatgattaccctggagactgttctagaaaaactggaaggagagttacaggaagccaaccagaaccagcaggccttgaaacaaagcttcctagaactgacagaactgaaatacctcctgaagaaaacccaagacttctttgagacrgaaaccaatttagctgatgatttctttactgaggacacttctggcctcctggagttgaaagcagtgcctgcatatatgaccggaaagttggggttcatagccggtgtgatcaacagggagaggatggcttcctttgagcggttactgtggcgaatctgcygaggaaacgtgtacttgaagttcagtgagatggacgcccctctggaggatcctgtgacgaaagaagaaattcagaagaacatattcatcatattttaccaaggagagcagctcaggcagaaaatcaagaagatctgtgatgggtttcgagccactgtctacccttgcccagagcstgcggtggagcgcagagagatgttggagagcgtcaatgtgaggctggaagatttaatcaccgtcataacacaaacagagtctcaccgccagcgcctgctgcaggaagccgctgccaactggcactcctggctcatcaaggtgcagaagatgaaagctgtctaccacatcctgaacatgtgcaacatcgacgtcacccagcagtgtgtcatcgccgagatctggttcccggtggcagatgccacacgtatcaagagggcactggagcaaggcatggaamtaagtggctcctccatggcccccatcatgaccacagtgcaatctaaaacagcccctcccacatttaacaggaccaataaattcacagctggcttccagaatattgttgatgcctatggtgtyggcagctaccgggagataaacccagccccctacaccatcatcactttccccttcctgttcgctgtgatgtttggagactgtggtcatggaaccgtgatgctcctggctgcactttggatgattctgaatgagagacgcttgctctcccagaagacagacaatgagatttggaacaccttcttccacgggcgctatctgatcctacttatgggcatcttctccatctacacgggtttgatctacaatgactgcttctccaagtccttgaacatctttggctcttcttggagtgtccaacccatgttcagaaacggcacatggaatactcatgtaatggaggaaagtctatatctgcagctggacccagccataccaggagtgtattttggaaatccatacccgtttgggattgatccgatttggaacttggcttcaaacaaactcacatttctgaactcgtataaaatgaagatgtcggtgatcctrggaattgtccagatggttttyggtgtcatcctcagccttttcaatcacatatacttcagaagaactctcaacatcattctgcaatttatccctgagaygatttttatcctgtgtctgtttggatacctggttttcatgatcattttcaaatggtgctgctttgacgtccaygtatctcagcacgcccccagcatcctcatccacttcatcaacatgtttctgtttaactacagtgactcttccaacgcacccctctacaaacatcagcaagaagtccaaagtttctttgtggttatggctttgatttctgtgccgtggatgcttctgattaagccgtttattcttagagccagtcatcggaaatcccagctgcaggcatccaggatccaagaagatgccactgagaacattgaaggtgatagctccagcccttctagccgttctggccagaggacttctgcagatacccacggggctctggacgaccatggagaagagttcaactttggagacgtctttgtccaccaagccatccacaccatcgagtactgcctgggctgcatttcaaacacagcctcctacctgcggctctgggccctcagcctggctcatgcacaactgtctgaagtgctctggactatggtgatgaacagcggccttcagayrcgaggctggggaggaatcgtcggggtttttattatttttgccgtatttgctgtcctgacagtagccatccttctgatcatggagggcctctctgctttcctgcacgccctgcgactgcactgggttgagttccagaacaagttctatgtcggggatggttacaagttttctccattctcctttaaacacatcctggatggcacagccgaggagtaggctgagggctgcacctcccacggtggtcaccatgccaatgaaggaagttcagtcttgtctttgatatcagccyctgcaaggcgctcaatgggaaggttgttcttggctcacctgaagcatgaaactgtgtattatttggacgtcagcctgtggatttgatacgacttaaccacgtcagaggaaggactttggcaagtgatattgtcttcatgtggggtattaattctcaaataataaartaattgacaaatgaggggagaatgctaaacagatgtcttcttgcaatattttaaatattgtatttgagaaaataaacatctgagtcattca

SEQ ID NO: 307 - DNA, 2823 bp, Homo sapiens
tggaagttgtcctcttccaaagtgagtggaaaaaaaccctagttggctgaatgctagggttaggttcgagcttatgaaattgccattgttataggtgaaaattgttcaatatcagcaattttctgtggttcaaatggaatagccccggtgaaaattcctaagaatttaaacatcgccctcctcccttataagcagagccagaagcgagggagggactggccctacttggggctattccacaagaaaagctgctgggaagacccaacgattcagtgcagttaaacttgtcttctgattctgagctcccatcataagcaaggcactgtcgggtctcatttccagttcctccatgacgtggcaagtgaagacaggaatgaaaggaatgtaaagcagcttttctctgaagagaagaagagagagagacasagccaagaccgaggctgggccaagatggygtctgtgtttcgaagcgaggagatgtgtttgtcacaactgtttctccaggtggaagctgcatattgctgtgtggctgagctcggagagctcggattggttcagttcaaagatttaaatatgaatgtgaacagctttcaaaggaaatttgtgaatgaagtcagaaggtgtgaatcactggagagaatcctccgttttctggaagacgagatgcaaaatgagattgtagttcagttgctcgagaaaagcccactgaccccgctcccacgggaaatgattaccctggagactgttctagaaaaactggaaggagagttacaggaagccaaccagaaccagcaggccttgaaacaaagcttcctagaactgacagaactgaaatacctcctgaagaaaacccaagacttctttgagacrgaaaccaatttagctgatgatttctttactgaggacacttctggcctcctggagttgaaagcagtgcctgcatatatgaccggaaagttggggttcatagccggtgtgatcaacagggagaggatggcttcctttgagcggttactgtggcgaatctgcygaggaaacgtgtacttgaagttcagtgagatggacgcccctctggaggatcctgtgacgaaagaagaaattcagaagaacatattcatcatattttaccaaggagagcagctcaggcagaaaatcaagaagatctgtgatgggtttcgagccactgtctacccttgcccagagcstgcggtggagcgcagagagatgttggagagcgtcaatgtgaggctggaagatttaatcaccgtcataacacaaacagagtctcaccgccagcgcctgctgcaggaagccgctgccaactggcactcctggctcatcaaggtgcagaagatgaaagctgtctaccacatcctgaacatgtgcaacatcgacgtcacccagcagtgtgtcatcgccgagatctggttcccggtggcagatgccacacgtatcaagagggcactggagcaaggcatggaamtaagtggctcctccatggcccccatcatgaccacagtgcaatctaaaacagcccctcccacatttaacaggaccaataaattcacagctggcttccagaatattgttgatgcctatggtgtyggcagctaccgggagataaacccagccccctacaccatcatcactttccccttcctgttcgctgtgatgtttggagactgtggtcatggaaccgtgatgctcctggctgcactttggatgattctgaatgagagacgcttgctctcccagaagacagacaatgagatttggaacaccttcttccacgggcgctatctcatcctcatccacttcatcaacatgtttctgtttaactacagtgactcttccaacgcacccctctacaaacatcagcaagaagtccaaagtttctttgtggttatggctttgatttctgtgccgtggatgcttctgattaagccgtttattcttagagccagtcatcggaaatcccagctgcaggcatccaggatccaagaagatgccactgagaacattgaaggtgatagctccagcccttctagccgttctggccagaggacttctgcagatacccacggggctctggacgaccatggagaagagttcaactttggagacgtctttgtccaccaagccatccacaccatcgagtactgcctgggctgcatttcaaacacagcctcctacctgcggctctgggccctcagcctggctcatgcacaactgtctgaagtgctctggactatggtgatgaacagcggccttcagayrcgaggctggggaggaatcgtcggggtttttattatttttgccgtatttgctgtcctgacagtagccatccttctgatcatggagggcctctctgctttcctgcacgccctgcgactgcactgggttgagttccagaacaagttctatgtcggggatggttacaagttttctccattctcctttaaacacatcctggatggcacagccgaggagtaggctgagggctgcacctcccacggtggtcaccatgccaatgaaggaagttcagtcttgtctttgatatcagccyctgcaaggcgctcaatgggaaggttgttcttggctcacctgaagcatgaaactgtgtattatttggacgtcagcctgtggatttgatacgacttaaccacgtcagaggaaggactttggcaagtgatattgtcttcatgtggggtattaattctcaaataataaartaattgacaaatgaggggagaatgctaaacagatgtcttcttgcaatattttaaatattgtatttgagaaaataaacatctgagtcattca

SEQ ID NO: 308 - DNA, 3020 bp, Homo sapiens
gagcaagccgagtggagggaggcaaaggccaggctgaggatcagggtggcccgggtggcagcggggaggcgctgcatgctggaggctgtgctgagtgcccggtgcaggtgagccggtcctgcggagttgtgccgagtgcctgctgcagagaccgaggctgggccaagatggygtctgtgtttcgaagcgaggagatgtgtttgtcacaactgtttctccaggtggaagctgcatattgctgtgtggctgagctcggagagctcggattggttcagttcaaagatttaaatatgaatgtgaacagctttcaaaggaaatttgtgaatgaagtcagaaggtgtgaatcactggagagaatcctccgttttctggaagacgagatgcaaaatgagattgtagttcagttgctcgagaaaagcccactgaccccgctcccacgggaaatgattaccctggagactgttctagaaaaactggaaggagagttacaggaagccaaccagaaccagcaggccttgaaacaaagcttcctagaactgacagaactgaaatacctcctgaagaaaacccaagacttctttgagacrgaaaccaatttagctgatgatttctttactgaggacacttctggcctcctggagttgaaagcagtgcctgcatatatgaccggaaagttggggttcatagccggtgtgatcaacagggagaggatggcttcctttgagcggttactgtggcgaatctgcygaggaaacgtgtacttgaagttcagtgagatggacgcccctctggaggatcctgtgacgaaagaagaaattcagaagaacatattcatcatattttaccaaggagagcagctcaggcagaaaatcaagaagatctgtgatgggtttcgagccactgtctacccttgcccagagcstgcggtggagcgcagagagatgttggagagcgtcaatgtgaggctggaagatttaatcaccgtcataacacaaacagagtctcaccgccagcgcctgctgcaggaagccgctgccaactggcactcctggctcatcaaggtgcagaagatgaaagctgtctaccacatcctgaacatgtgcaacatcgacgtcacccagcagtgtgtcatcgccgagatctggttcccggtggcagatgccacacgtatcaagagggcactggagcaaggcatggaamtaagtggctcctccatggcccccatcatgaccacagtgcaatctaaaacagcccctcccacatttaacaggaccaataaattcacagctggcttccagaatattgttgatgcctatggtgtyggcagctaccgggagataaacccagccccctacaccatcatcactttccccttcctgttcgctgtgatgtttggagactgtggtcatggaaccgtgatgctcctggctgcactttggatgattctgaatgagagacgcttgctctcccagaagacagacaatgagatttggaacaccttcttccacgggcgctatctgatcctacttatgggcatcttctccatctacacgggtttgatctacaatgactgcttctccaagtccttgaacatctttggctcttcttggagtgtccaacccatgttcagaaacggcacatggaatactcatgtaatggaggaaagtctatatctgcagctggacccagccataccaggagtgtattttggaaatccatacccgtttgggattgatccgatttggaacttggcttcaaacaaactcacatttctgaactcgtataaaatgaagatgtcggtgatcctrggaattgtccagatggttttyggtgtcatcctcagccttttcaatcacatatacttcagaagaactctcaacatcattctgcaatttatccctgagaygatttttatcctgtgtctgtttggatacctggttttcatgatcattttcaaatggtgctgctttgacgtccaygtatctcagcacgcccccagcatcctcatccacttcatcaacatgtttctgtttaactacagtgactcttccaacgcacccctctacaaacatcagcaagaagtccaaagtttctttgtggttatggctttgatttctgtgccgtggatgcttctgattaagccgtttattcttagagccagtcatcggaaatcccagctgcaggcatccaggatccaagaagatgccactgagaacattgaaggtgatagctccagcccttctagccgttctggccagaggacttctgcagatacccacggggctctggacgaccatggagaagagttcaactttggagacgtctttgtccaccaagccatccacaccatcgagtactgcctgggctgcatttcaaacacagcctcctacctgcggctctgggccctcagcctggctcatgcacaactgtctgaagtgctctggactatggtgatgaacagcggccttcagayrcgaggctggggaggaatcgtcggggtttttattatttttgccgtatttgctgtcctgacagtagccatccttctgatcatggagggcctctctgctttcctgcacgccctgcgactgcactgggttgagttccagaacaagttctatgtcggggatggttacaagttttctccattctcctttaaacacatcctggatggcacagccgaggagtaggctgagggctgcacctcccacggtggtcaccatgccaatgaaggaagttcagtcttgtctttgatatcagccyctgcaaggcgctcaatgggaaggttgttcttggctcacctgaagcatgaaactgtgtattatttggacgtcagcctgtggatttgatacgacttaaccacgtcagaggaaggactttggcaagtgatattgtcttcatgtggggtattaattctcaaataataaartaattgacaaatgaggggagaatgctaaacagatgtcttcttgcaatattttaaatattgtatttgagaaaataaacatctgagtcattca

SEQ ID NO: 309 - DNA, 3018 bp, Homo sapiens
gagcaagccgagtggagggaggcaaaggccaggctgaggatcagggtggcccgggtggcagcggggaggcgctgcatgctggaggctgtgctgagtgcccggtgcaggtgagccggtcctgcggagttgtgccgagtgcctgctgcagaccgaggctgggccaagatggygtctgtgtttcgaagcgaggagatgtgtttgtcacaactgtttctccaggtggaagctgcatattgctgtgtggctgagctcggagagctcggattggttcagttcaaagatttaaatatgaatgtgaacagctttcaaaggaaatttgtgaatgaagtcagaaggtgtgaatcactggagagaatcctccgttttctggaagacgagatgcaaaatgagattgtagttcagttgctcgagaaaagcccactgaccccgctcccacgggaaatgattaccctggagactgttctagaaaaactggaaggagagttacaggaagccaaccagaaccagcaggccttgaaacaaagcttcctagaactgacagaactgaaatacctcctgaagaaaacccaagacttctttgagacrgaaaccaatttagctgatgatttctttactgaggacacttctggcctcctggagttgaaagcagtgcctgcatatatgaccggaaagttggggttcatagccggtgtgatcaacagggagaggatggcttcctttgagcggttactgtggcgaatctgcygaggaaacgtgtacttgaagttcagtgagatggacgcccctctggaggatcctgtgacgaaagaagaaattcagaagaacatattcatcatattttaccaaggagagcagctcaggcagaaaatcaagaagatctgtgatgggtttcgagccactgtctacccttgcccagagcstgcggtggagcgcagagagatgttggagagcgtcaatgtgaggctggaagatttaatcaccgtcataacacaaacagagtctcaccgccagcgcctgctgcaggaagccgctgccaactggcactcctggctcatcaaggtgcagaagatgaaagctgtctaccacatcctgaacatgtgcaacatcgacgtcacccagcagtgtgtcatcgccgagatctggttcccggtggcagatgccacacgtatcaagagggcactggagcaaggcatggaamtaagtggctcctccatggcccccatcatgaccacagtgcaatctaaaacagcccctcccacatttaacaggaccaataaattcacagctggcttccagaatattgttgatgcctatggtgtyggcagctaccgggagataaacccagccccctacaccatcatcactttccccttcctgttcgctgtgatgtttggagactgtggtcatggaaccgtgatgctcctggctgcactttggatgattctgaatgagagacgcttgctctcccagaagacagacaatgagatttggaacaccttcttccacgggcgctatctgatcctacttatgggcatcttctccatctacacgggtttgatctacaatgactgcttctccaagtccttgaacatctttggctcttcttggagtgtccaacccatgttcagaaacggcacatggaatactcatgtaatggaggaaagtctatatctgcagctggacccagccataccaggagtgtattttggaaatccatacccgtttgggattgatccgatttggaacttggcttcaaacaaactcacatttctgaactcgtataaaatgaagatgtcggtgatcctrggaattgtccagatggttttyggtgtcatcctcagccttttcaatcacatatacttcagaagaactctcaacatcattctgcaatttatccctgagaygatttttatcctgtgtctgtttggatacctggttttcatgatcattttcaaatggtgctgctttgacgtccaygtatctcagcacgcccccagcatcctcatccacttcatcaacatgtttctgtttaactacagtgactcttccaacgcacccctctacaaacatcagcaagaagtccaaagtttctttgtggttatggctttgatttctgtgccgtggatgcttctgattaagccgtttattcttagagccagtcatcggaaatcccagctgcaggcatccaggatccaagaagatgccactgagaacattgaaggtgatagctccagcccttctagccgttctggccagaggacttctgcagatacccacggggctctggacgaccatggagaagagttcaactttggagacgtctttgtccaccaagccatccacaccatcgagtactgcctgggctgcatttcaaacacagcctcctacctgcggctctgggccctcagcctggctcatgcacaactgtctgaagtgctctggactatggtgatgaacagcggccttcagayrcgaggctggggaggaatcgtcggggtttttattatttttgccgtatttgctgtcctgacagtagccatccttctgatcatggagggcctctctgctttcctgcacgccctgcgactgcactgggttgagttccagaacaagttctatgtcggggatggttacaagttttctccattctcctttaaacacatcctggatggcacagccgaggagtaggctgagggctgcacctcccacggtggtcaccatgccaatgaaggaagttcagtcttgtctttgatatcagccyctgcaaggcgctcaatgggaaggttgttcttggctcacctgaagcatgaaactgtgtattatttggacgtcagcctgtggatttgatacgacttaaccacgtcagaggaaggactttggcaagtgatattgtcttcatgtggggtattaattctcaaataataaartaattgacaaatgaggggagaatgctaaacagatgtcttcttgcaatattttaaatattgtatttgagaaaataaacatctgagtcattca

SEQ ID NO: 310 - DNA, 3091 bp, Homo sapiens
aacagagctgcctcctggctctttgggagcctgggaggagaaggagccgggaggggcgctgcggggaagccacctgcggattcactggctgctgctccgcccaggactgctagcaagcacggagggctgccagacctggggctccctgctccgtgcgtcaggttggggaaaccaccgtctgccccagaccctgacccaggacccgcctggaggaagctgggaccgaggctgggccaagatggygtctgtgtttcgaagcgaggagatgtgtttgtcacaactgtttctccaggtggaagctgcatattgctgtgtggctgagctcggagagctcggattggttcagttcaaagatttaaatatgaatgtgaacagctttcaaaggaaatttgtgaatgaagtcagaaggtgtgaatcactggagagaatcctccgttttctggaagacgagatgcaaaatgagattgtagttcagttgctcgagaaaagcccactgaccccgctcccacgggaaatgattaccctggagactgttctagaaaaactggaaggagagttacaggaagccaaccagaaccagcaggccttgaaacaaagcttcctagaactgacagaactgaaatacctcctgaagaaaacccaagacttctttgagacrgaaaccaatttagctgatgatttctttactgaggacacttctggcctcctggagttgaaagcagtgcctgcatatatgaccggaaagttggggttcatagccggtgtgatcaacagggagaggatggcttcctttgagcggttactgtggcgaatctgcygaggaaacgtgtacttgaagttcagtgagatggacgcccctctggaggatcctgtgacgaaagaagaaattcagaagaacatattcatcatattttaccaaggagagcagctcaggcagaaaatcaagaagatctgtgatgggtttcgagccactgtctacccttgcccagagcstgcggtggagcgcagagagatgttggagagcgtcaatgtgaggctggaagatttaatcaccgtcataacacaaacagagtctcaccgccagcgcctgctgcaggaagccgctgccaactggcactcctggctcatcaaggtgcagaagatgaaagctgtctaccacatcctgaacatgtgcaacatcgacgtcacccagcagtgtgtcatcgccgagatctggttcccggtggcagatgccacacgtatcaagagggcactggagcaaggcatggaamtaagtggctcctccatggcccccatcatgaccacagtgcaatctaaaacagcccctcccacatttaacaggaccaataaattcacagctggcttccagaatattgttgatgcctatggtgtyggcagctaccgggagataaacccagccccctacaccatcatcactttccccttcctgttcgctgtgatgtttggagactgtggtcatggaaccgtgatgctcctggctgcactttggatgattctgaatgagagacgcttgctctcccagaagacagacaatgagatttggaacaccttcttccacgggcgctatctgatcctacttatgggcatcttctccatctacacgggtttgatctacaatgactgcttctccaagtccttgaacatctttggctcttcttggagtgtccaacccatgttcagaaacggcacatggaatactcatgtaatggaggaaagtctatatctgcagctggacccagccataccaggagtgtattttggaaatccatacccgtttgggattgatccgatttggaacttggcttcaaacaaactcacatttctgaactcgtataaaatgaagatgtcggtgatcctrggaattgtccagatggttttyggtgtcatcctcagccttttcaatcacatatacttcagaagaactctcaacatcattctgcaatttatccctgagaygatttttatcctgtgtctgtttggatacctggttttcatgatcattttcaaatggtgctgctttgacgtccaygtatctcagcacgcccccagcatcctcatccacttcatcaacatgtttctgtttaactacagtgactcttccaacgcacccctctacaaacatcagcaagaagtccaaagtttctttgtggttatggctttgatttctgtgccgtggatgcttctgattaagccgtttattcttagagccagtcatcggaaatcccagctgcaggcatccaggatccaagaagatgccactgagaacattgaaggtgatagctccagcccttctagccgttctggccagaggacttctgcagatacccacggggctctggacgaccatggagaagagttcaactttggagacgtctttgtccaccaagccatccacaccatcgagtactgcctgggctgcatttcaaacacagcctcctacctgcggctctgggccctcagcctggctcatgcacaactgtctgaagtgctctggactatggtgatgaacagcggccttcagayrcgaggctggggaggaatcgtcggggtttttattatttttgccgtatttgctgtcctgacagtagccatccttctgatcatggagggcctctctgctttcctgcacgccctgcgactgcactgggttgagttccagaacaagttctatgtcggggatggttacaagttttctccattctcctttaaacacatcctggatggcacagccgaggagtaggctgagggctgcacctcccacggtggtcaccatgccaatgaaggaagttcagtcttgtctttgatatcagccyctgcaaggcgctcaatgggaaggttgttcttggctcacctgaagcatgaaactgtgtattatttggacgtcagcctgtggatttgatacgacttaaccacgtcagaggaaggactttggcaagtgatattgtcttcatgtggggtattaattctcaaataataaartaattgacaaatgaggggagaatgctaaacagatgtcttcttgcaatattttaaatattgtatttgagaaaataaacatctgagtcattca

SEQ ID NO: 311 - DNA, 1242 bp, Homo sapiens
atggcagactacctgatcagaggcggcaccagctacatgcctgaggacgggctcacggcgcagcagctcttcactggtgcagcagctcgcgaccgcctcacctacaacaatttcctgattctcccaggattcatagacttcatagctgataaggtggacctgacctcagccctgacttggaagatcacgctgaagatgccactgatctcctcccccatggacgctgtgacagaagctgacatggccatcgcaatggctctgatgggaggtattggtttcattcaccaccactgcaccccagagttccaggccaatgaggtgcggaaggtcaagaagtttgaacggggctttatcatggaccccgtggtactaagcccctcacacactgtgggtgatgtgctggaggccaagatgcagcatggcttctcgggcatccccatcactgagacaggcaccatgggcagcaagctggattcccacaagcagctgctgtgcggggcagctgtgggcacccgtgaggatgacaaataccgcctggacctgctcacccaggtgggcgttgacgtcatagtcttggacttgtcccaagggaattcattgtatcagatggccatggtgtattacatcaaacagaagtacccccacctccaggtgattggggggaacatggtgacagcagcccaggcgaagaacctgattgacgctggtgtggaagggctgcacgtgggcatgggctgcagctccatctgcatcacccaggaagtgatggcctacagctggccccagggcactgctgtgtacaaggtggccgagtatgcccggcactttgccratggcggcatccagaccatggggaacatggtcaaggccctggcccttggagcctccacagtgatgatgggctcccttctggccgccaccacggaggtccccagcaagtacttcttctcagatggggtgtggctcaagaagtaccggggtatgggctcactggatgccctggagaagagcagcggcagccagaaacaatacttcatggagggggataagttgaagatcgcgcagggtgtctcyagctccatccaggacaaagggtccattcagaagttcgtgtcctacctcatagcgggcatccagcatggctgccaggatactggggtctgcaacctgtctgtccttttgtccatgatgtactcaggggagcgaaagtttgagaagtggaccatgttggcccagatcaag

SEQ ID NO: 312 - DNA, 1743 bp, Homo sapiens
gggacaagcgtccaggaagggtctggattctttgtcctccgccgggagcaggccccaccgcaggcgccagtgtgtggggcgccccggagacggtggcggggaccgagcccctgccccgcggagaagcagrgggcgcgggacgccgttccccagcgctgccgccgccgcgctcgccagggcctggagtggcgcggagggcggcgggctcagaccaaagtccaccagggggcaaagtccgcgggccccaakcccccaccacggggtcgcgggggtttgctccgcctcgtgagcttgggattctggttaaaaaggcggctgggcggagcygcgggcctccgacggcrggaggacagcgctgcgaggaggcgcccgggacagtcatggagcgccgcctgggagtgagggcctgggtgaaggagaaccggggctccttccagcccccggtctgcaacaagctcatgcaccaggagcagctcaaagtcatgttcrtcggaggccccaacwccaggaaggactatcacatcgaagagggtgaagaggtattttaccagctggagggagacatggttctccgagtcctggagcaagggaaacacygggatgtggtcattcggcagggagagatattcctcctgcctgccagggtgccccactcaccacagaggtttgccaacaccgtggggctggtggttgagcgaaggcggctggagaccgagctagatgggctcaggtactatgtgggcgacaccatggacgttctgtttgagaagtggttctactgcaaggacctcggcacgcagttggcccccatcatccaggagttcttcagctctgagcagtacagaacaggaaagcccatccctgaccagctgctcaaggagccaccattccctctgagcacacgatccatcatggagcccatgtccctggatgcctggctggacagccaccayagggagctgcaggcaggcacaccactcagcctgtttggggacacctatgagacccaggtgatcgcctatgggcaaggcagcagcgaaggcctgagacagaatgtggacgtgtggctgtggcagctggcaagtgatgaggcccaasagtctccatttgattctcctgctcctcttctccaggagsgctcctcggtggtgacaatggggggacggcgcctgagcctggcccctgatgacagcctcctggtgctagctgggacctcgtatgcctgggagcgaacacaaggctctgtggccctgtctgtgacccaggaccctgcctgcaagaagcccctggggtgaccctcttgccatggcctgaagcagccacaggtgtgccaagcaccctcgagtgccatccctgccaaacaactstcccagcccccactacctctmtgtgtactgccgctgtgtcccccacakacctgcacattgttgtcacccaccctcytgcccttctcagcccagatgccatgcccctgggygggcagcagctccccatcttctctgrcagactcagcccactgccttgccagtcttgccaggtggtctacccccggccccgctcctgcccattcctctgtccctgcagactcagtgcagcacttccacaccaagaaggccctcaataaaggcttcctgaggaacgcacacctgggggtctgccgcaggcagtcatcactggccttcccatgtgccccccaggaccatgtggtgtgtctggggcatcagggcaccaggtgaccatgga

SEQ ID NO: 313 - DNA, 1690 bp, Homo sapiens
gggacaagcgtccaggaagggtctggattctttgtcctccgccgggagcaggccccaccgcaggcgccagtgtgtggggcgccccggagacggtggcggggaccgagcccctgccccgcggagaagcagrgggcgcgggacgccgttccccagcgctgccgccgccgcgctcgccagggcctggagtggcgcggagggcggcgggctcagaccaaagtccaccagggggcaaagtccgcgggccccaakcccccaccacggggtcgcgggggtttgctccgcctcgtgagcttgggattctggttaaaaaggcggctgggcggagcygcgggcctccgacggcrggaggacagcgctgcgaggaggcgcccgggacagtcatggagcgccgcctgggagtgagggcctgggtgaaggagaaccggggctccttccagcccccggtctgcaacaagctcatgcaccaggagcagctcaaagtcatgttcrtcggaggccccaacwccaggaaggactatcacatcgaagagggtgaagaggtattttaccagctggagggagacatggttctccgagtcctggagcaagggaaacacygggatgtggtcattcggcagggagagatattcctcctgcctgccagggtgccccactcaccacagaggtttgccaacaccgtggggctggtggttgagcgaaggcggctggagaccgagctagatgggctcaggtactatgtgggcgacaccatggacgttctgtttgagaagtggttctactgcaaggacctcggcacgcagttggcccccatcatccaggagttcttcagctctgagcagtacagaacaggaaagcccatccctgaccagctgctcaaggagccaccattccctctgagcacacgatccatcatggagcccatgtccctggatgcctggctggacagccaccayagggagctgcaggcaggcacaccactcagcctgtttggggacacctatgagacccaggtgatcgcctatgggcaaggcagcagcgaaggcctgagacagaatgtggacgtgtggctgtggcagctggcaasgctcctcggtggtgacaatggggggacggcgcctgagcctggcccctgatgacagcctcctggtgctagctgggacctcgtatgcctgggagcgaacacaaggctctgtggccctgtctgtgacccaggaccctgcctgcaagaagcccctggggtgaccctcttgccatggcctgaagcagccacaggtgtgccaagcaccctcgagtgccatccctgccaaacaactstcccagcccccactacctctmtgtgtactgccgctgtgtcccccacakacctgcacattgttgtcacccaccctcytgcccttctcagcccagatgccatgcccctgggygggcagcagctccccatcttctctgrcagactcagcccactgccttgccagtcttgccaggtggtctacccccggccccgctcctgcccattcctctgtccctgcagactcagtgcagcacttccacaccaagaaggccctcaataaaggcttcctgaggaacgcacacctgggggtctgccgcaggcagtcatcactggccttcccatgtgccccccaggaccatgtggtgtgtctggggcatcagggcaccaggtgaccatgga

SEQ ID NO: 314 - DNA, 1224 bp, Homo sapiens
atgagatctggttgttccctgggtatcaccaatgatgttacccagtccatggagattagttccaccttctgggtgttgggagtagttccagcactttccagagccttctctctcctgtgcaaaatagcaactcttaaggaaaaactcattgtaccakttgcggaagaagaggcaacagtccaaaacaataagatcactgtagtgagtgttggacaagttggtatggcgtgtgctatcagcattctgsgaaaatctctggctgatgaatttgcttttgtggatgttttggaagataagcttaaaggagaaatgatggatctgcagcatgggagcttatttctcaagamgcttaaaattgtggcagataaagattattctgtgacygccagttataagattgtagtggtaactkcaggagtccttcagcaagagggggagaggcgggacattcttacrtatgttacctggaaaataagtggattactcaaacaccatgtgattggaagtggatgtaatccggattctgctagatttcactgccttatggatgaaaaatttggcattcatcccagcagctgycatggaaggattttgggggaacatagtgactcaagtgtggctgtgtggattggcatgaatgtgacaggtttttctctccaggaattgaatccagaaataggaactgacaatgatagtgaaaattggaaagaagtgcataagatggtggttgaaaatgcctatgaagtcaacaagctaaatggatatacccactgggatattggattaagtgtggctgatctcattgaatccatgttgaaaaatctatccaggattcatctcgtgtcaacaatggtaaaggggatgtatggcatcgagaatgaagtcttcctgagccttccrtatatcctcaatgyccggggattaaccagcgttatcaaccagaagctaaaggatgatgaggttgctcagttcaagaaaagtacagataccccgtgggacatccagaaggacctaaaagacctgtgactactgagctctaggctgtagaaatttaaaaactacaatgtgattaactctgagcctttagttttcatccatttactggatcccagtttgctttgatcttcttcaacgtgaatttgggctcacagaatcaaagactatgcttggtttaatgcttgcagtatgagttcttgaacaaataaaattaactattgtagtgtg

SEQ ID NO: 315 - DNA, 847 bp, Homo sapiens
ctgggtcatcttgtctgcccgccgctggcctggccccgtctgtctctctcagcagctgtctttctcgcgcccactggccggtctctcctcttccccgcagttgcctccttctctgcctgcctgggtggccgccatgggccggaagcggctcatcactgattcctacccggttgtgaagaggagggaggggcccgctgggcacagcaagggggagctggcacccgagctaggggaggagccccagccccsmgacgaggaggaagcggagctggagctgctgaggcagtttgacstggcctggcagtacrggccctgcaccgggatcacacggctgcagcgctggtgtcgggccaagcagatgggcttggagcctcccccagaggtgtggcaggtgctgaagacccaccccggagacccccgcttccagtgcagtctctggcatctctatcccctatgaggcaccacgtaagacctcctgcccttagctctcttgctyaccacccaagaacctcaggacagaagcgagagcccattgctcctgctcagctcagcccggctgcggaggaacccttggcaggcagaacctggaggtgtcagaggctcaactcctccatctaaccagcaggctcccagagtccccggaagagcctgcgcagctgaagcagagtgcttctagatggagagtggtcactggggaaaaggacctggccatcaccttccaatacctgctgcctgtctccctgacccatgatytggcaagttaggcacagtcagacatggacagttgatccatgactcccagggcaaggggttcactaatgcttatcaataaagaatattgagcctg

SEQ ID NO: 316 - DNA, 912 bp, Homo sapiens
ctgggtcatcttgtctgcccgccgctggcctggccccgtctgtctctctcagcagctgtctttctcgcgcccactggccggtctctcctcttccccgcagttgcctccttctctgcctgcctgggtggccgccatgggccggaagcggctcatcactgattcctacccggttgtgaagaggagggaggggcccgctgggcacagcaagggggagctggcacccgagctaggggaggagccccagccccsmgacgaggaggaagcggagctggagctgctgaggcagtttgacstggcctggcagtacrggccctgcaccgggatcacacggctgcagcgctggtgtcgggccaagcagatgggcttggagcctcccccagaggtgtggcaggtgctgaagacccaccccggagacccccgcttccagtgcagtctctggcatctctatcccctatgaggcaccacgtaagacctcctgcccttagctctcttgctyaccacccaagaacctcaggacagaagcgagagcccattgctcctgctcagctcagcccggctgcggaggaacccttggcaggcagaacctggaggtgtcagaggctcaactcctccatctaaccagcaggctcccagagtccccggaagagcctgcgcagctgaagcagagtgcttctagatggagagtggtcactggggaaaaggacctggccatcaccttccaatacctgctgcctgtctccctgacccatgatytggcaagttaggcacagtcagacatggacagttgatccatgaggaaaagatgctctcccmcctaaggccaggaatytgagagcaggactggctgagctcccagggcaaggggttcactaatgcttatcaataaagaatattgagcctggaatcctgacc

SEQ ID NO: 317 - DNA, 2147 bp, Homo sapiens
  misc_feature (1)...(2147): n = A,T,C or G
tggagttccaggatccccagctcccgagggcccccgtgtgcctgctgtcacctgaacggggctccccggccccgccgaccgcagccctggagcctgcagacgccakcagcaccggcaggttcccagcaggatgccccggctctgcaggaagctgaagtgagaggcccggagagggcccagcccgcccggggcaggatgaccaaggcccggctgttccggctgtggctggtgctggggtcggtgttcatgatcctgctgatcatcgtgtactgggacagcgcaggcgccgcgcacttctacttgcacacgtccttctctaggccgcacacggggccgccgctgcccacgcmcgggccggacagggacagggagctchcggccgactccgatgtcgacgagtttctggacaagtttctcagtgctggcgtgaagcagagygaccttcccagaaaggagacggagcagccgcctgcgcnggggagcatggaggagagcgtgagaggctacsactggtccccgmgcgacgcccggcgcagcccagaccagggccggcagcaggcggagcggaggagcgtgctgcggggcttctgcgccaactccagcctggccttccccaccaaggagcgcgcattcgacgacatccccaactcggagctgagccacctgatcgtggacgaccggcacggggccatctactgctacgtgcccaaggtggcctgcaccaactggaagcgcgtgatgatcgtgctgagcggaagcctgctgcaccgcggtgcgccctaccgcgacccgctgcgcatcccgcgcgagcacgtgcacaacgccagcgcgcacctgaccttcaacaagttctggcgcckctacgggaagctctcccgccacctcatgaaggtcaagctcaagaagtacaccaagttcctcttcgtgcgcgaccccttcgtgcgcctgatctccgccttccgcagcaagttcgagctggagaacgaggagttctaccgcaagttcgccgtgcccatgctgcggctgtacgccaaccacaccagccwgcccgcctcggcgcgcgaggccttccgcgctggcctcaaggtgtccttcgccaacttcatccagtacctgctggacccgcacacggagaagctggcgcccttcaacgagcactggcggcaggtgtaccgcctctgccacccgtgccagatcgactacgacttcgtggggaagctggagactctggacgaggacgccgcgcagctgctgcagctactccaggtggaccggcagctccgcttccccccgagctaccggaacaggaccgccagcagctgggaggaggactggttcgccaagatccccctggcctggaggcagcagctgtataaactctacgaggccgactttgttctcttcggctaccccaagcccgaaaacctcctccgagactgaaagctttcgcgttgctttttctcgcgtgcctggaacctgmcgcacgcgcactccagtttttttatgacctacgattttgcaatctgggcttcttgttcactccactgcctctatccattgagtactgtatcgatattgttttttaagattaatatatttcaggtatttaatacgaaatgtggaagggaatgctggagtaaaatatcccctctcccctccgcccgcccrcccgcccgcccgctcgcccgcccgcccgctcgcccgctcctgtggtttttctgagcgtgcgggckccgggaggggatgctgaggctgatggagctgcctccagggctagggccactcaccggaggagggcggggcctgcacttgaagtcaggccgcacctgtctgtttttggaagggtagccgacaaatccttccagagggaaagttctttgtttaagtgttgtacttgaaaaggtcaatcttcagggcttcctgtttgaagtcaagtcagaggtaaaccggtcagttacagaagcaggatttytaggatttctaactccagctgttcccatactgtctagtttaaattatggctgttaaggccgggcgggtgactcaggcaggtaatcccagaactttgggaggcccagacagaaggatcgcttgaggtcaggaatttgagacctggccaacatggtgaaaccctgtctctactaaaa

SEQ ID NO: 318 - DNA, 2118 bp, Homo sapiens
  misc_feature (1)...(2118): n = A,T,C or G
ggggctcctgcgccgggggcggggccggcgagggctgcctctggggggtccgctagtcgcggggcggcggcggcggctgcgggcgcgaggttcccagcaggatgccccggctctgcaggaagctgaagtgagaggcccggagagggcccagcccgcccggggcaggatgaccaaggcccggctgttccggctgtggctggtgctggggtcggtgttcatgatcctgctgatcatcgtgtactgggacagcgcaggcgccgcgcacttctacttgcacacgtccttctctaggccgcacacggggccgccgctgcccacgcmcgggccggacagggacagggagctchcggccgactccgatgtcgacgagtttctggacaagtttctcagtgctggcgtgaagcagagygaccttcccagaaaggagacggagcagccgcctgcgcnggggagcatggaggagagcgtgagaggctacsactggtccccgmgcgacgcccggcgcagcccagaccagggccggcagcaggcggagcggaggagcgtgctgcggggcttctgcgccaactccagcctggccttccccaccaaggagcgcgcattcgacgacatccccaactcggagctgagccacctgatcgtggacgaccggcacggggccatctactgctacgtgcccaaggtggcctgcaccaactggaagcgcgtgatgatcgtgctgagcggaagcctgctgcaccgcggtgcgccctaccgcgacccgctgcgcatcccgcgcgagcacgtgcacaacgccagcgcgcacctgaccttcaacaagttctggcgcckctacgggaagctctcccgccacctcatgaaggtcaagctcaagaagtacaccaagttcctcttcgtgcgcgaccccttcgtgcgcctgatctccgccttccgcagcaagttcgagctggagaacgaggagttctaccgcaagttcgccgtgcccatgctgcggctgtacgccaaccacaccagccwgcccgcctcggcgcgcgaggccttccgcgctggcctcaaggtgtccttcgccaacttcatccagtacctgctggacccgcacacggagaagctggcgcccttcaacgagcactggcggcaggtgtaccgcctctgccacccgtgccagatcgactacgacttcgtggggaagctggagactctggacgaggacgccgcgcagctgctgcagctactccaggtggaccggcagctccgcttccccccgagctaccggaacaggaccgccagcagctgggaggaggactggttcgccaagatccccctggcctggaggcagcagctgtataaactctacgaggccgactttgttctcttcggctaccccaagcccgaaaacctcctccgagactgaaagctttcgcgttgctttttctcgcgtgcctggaacctgmcgcacgcgcactccagtttttttatgacctacgattttgcaatctgggcttcttgttcactccactgcctctatccattgagtactgtatcgatattgttttttaagattaatatatttcaggtatttaatacgaaatgtggaagggaatgctggagtaaaatatcccctctcccctccgcccgcccrcccgcccgcccgctcgcccgcccgcccgctcgcccgctcctgtggtttttctgagcgtgcgggckccgggaggggatgctgaggctgatggagctgcctccagggctagggccactcaccggaggagggcggggcctgcacttgaagtcaggccgcacctgtctgtttttggaagggtagccgacaaatccttccagagggaaagttctttgtttaagtgttgtacttgaaaaggtcaatcttcagggcttcctgtttgaagtcaagtcagaggtaaaccggtcagttacagaagcaggatttytaggatttctaactccagctgttcccatactgtctagtttaaattatggctgttaaggccgggcgggtgactcaggcaggtaatcccagaactttgggaggcccagacagaaggatcgcttgaggtcaggaatttgagacctggccaacatggtgaaaccctgtctctactaaaa

SEQ ID NO: 319 - DNA, 534 bp, Homo sapiens
atgctcgagaaagggtcggatagacaacaggcactgcataaagggggacccagccctggggccctgatcagcgcgttctgcggctcctcggggtctggacgagaaatctgtggttctgattcagcgacagcagaggctgcagcggccccgccggcccccaggagtccccctgcccggcatcagcctctgccgcccggcaggggtaggaccaattcccgggcttggagttccaggatccccagctcccgagggcccccgtgtgcctgctgtcacctgaacggggctccccggccccgccgaccgcagccctggagcctgcagacgccakcagcaccggcaggtcgctcagggtatcccttaaatgacctctcactccagaagccgcagccctgcccctctgggagaggaaaccgtgcatttagtccgggaacagtgggacttagacctcctctgcgggctcccggccaccgagacaccgccggcaaagccttggctcgggcagaggctccgtctggcaggcagcacaacaagcca

SEQ ID NO: 320 - DNA, 3422 bp, Homo sapiens
gcagttcagacccccccacacccatcaaagagccgctcctcccscccgcaggcgccttcgccgcctccctcccttcctttcctttccgctcctcttccgacctgtccacccgggaggaagggagctggaaagggggcggaaacctctcccctccaaaaagcacaacaaaactgttcagtgcggaggagccgggttcrcccctgccggacagcggggggctttgttccccgcagttgtttcctgcccatttgacctgtcagctgctggggaaacgctgctgttgacctttggttgaactgctaaggcgattttgctgatttttctttctttttccgcgagggctgtcttttgctcctccaaatgagcccagtccccctcccttctccccaaagcgctccaagagaaagtgccaggaaggggcttgtcccggaaggcctggcggctgagcggggccaggtcctggttaggcyaccagggtgggcgtccgcgccattgtttgagcttgtcggcgctggtgggrgagatgagggcaattcctctgggacgcaagtcccctcgaatggccggggctggccgggatgttccccgcacggcgctgccctcgagtccccccgatggagagcgcgggcgcgccttccttcgctggcgtccaaacccgggaccagctagaacacagcagggctgggactgggttccagccccacgtggagtctggatttgttttgttgtgttttgctttccttcctggaagaaatcccgaggggaccgccctagagcggcagctccaggacctcggcccttgggcttccgggggtgcagccacttaggccccgctcccggggagagagggattattttttaagatttatccccagggcgcgcggcatttccctgtccctcgtgaatcccgttgagagtcctccctccccaacctcctccatttccccagccagaccgattcgagagccctggagattctgggcgaggctagtgactgggtagtacaggcctctagccccaccattgctctctctgtcttcagttccccaggagggcaatggcatcaaacagcacagctctgggggatgtcaatattgcataccttttctacctaaagggaaaatgactcgcttttctgcttgcaaataaatttctgcttgcaaatatggtagtttctgcttacaaatgtaatacaatgcccatgacagccaaggactggaagcataagttgctaggtcttacaggtgattttttacaatgaagcaaactcactatgttagacaccatttacattggatgtctccaactaacaaaagtaactaaagacagatgtaggtgtaaattgagagtgaaatttgaccctttagaccgtcacaacttccttgggcttatcctgggtgcttataggagaggtgggctccacccacaaaaatrgactgctcagaaaaatgagggagagagaaagggtggccactttcccgagccaagaaattccttgaaaaaaaatcagaacatctgaaaccagagagccgatttccttaccgggaggcagttcctggctaacgaagaggaagcacgatgggaagaaaagttcactccaacggaagccagtttgctgaacatagcagatcgcccaggaggactgggagagactgcaaaccagttcgagcccccagcatggcgttaggtgtcagccagctggcaggaaggtccaggtgtctgtgttcagagtctcaaggcggctatgagaggttttcctccgagtacccagaattctgttctaaaaccaaggccctggcagccatcccacccccggttccccccagygccacagagcccttggacctgggctgcagctcctgtgggaccccactacacgaccaggggggtcctgtggagatccttcccttcctctacctcggcagtgcctaccatgctgcccggagagacatgctggacgccctgggcatcacggctctgttgaatgtctcctcggactgcccaaaccactttgaaggacactatcagtacaagtgcatcccagtggaagataaccacaaggccgacatcagctcctggttcatggaagccatagagtacatcgatgccgtgaaggactgccgtgggcgcgtgctggtgcactgccaggcgggcatctcgcggtcggccaccatctgcctggcctacctgatgatgaagaaacgggtgaggctggaggaggccttcgagttcgttaagcagcgccgcagcatcatctcgcccaacttcagcttcatggggcagctgctgcagttcgagtcccaggtgctggccacgtcctgtgctgcggaggctgctagcccctcgggacccctgcgggagcggggcaagacccccgccacccccacctcgcagttcgtcttcagctttccggtctccgtgggcgtgcactcggcccccagcagcctgccctacctgcacagccccatcaccacctctcccagctgttagagccgccctgggggccccagaaccagagctggctcccagcaagggtaggacgggccgcatgcgggcagaaagttgggactgagcagctgggagcaggcgaccgagctccttccccatcatttctccttggccaacgacgaggccagccagaatggcaataaggactccgaatacataataaaagcaaacagaacactccaacttagagcaataacggctgccgcagcagccagggaagaccttggtttggtttatgtgtcagtttcacttttccgatagaaatttcttacctcatttttttaagcagtaaggcttgaagtgatgaaacccacagatcctagcaaatgtgcccaaccagctttactaaagggggaggaagggagggcaaagggatgagaagacaagtttcccagaagtgcctggttctgtgtacttgtccctttgttgtcgttgttgtagttaaaggaatttcattttttaaaagaaatcttcgaaggtgtggttttcatttctcagtcaccaacagatgaataattatgcttaataataaagtatttattaagactttcttcagagtatgaaagtacaaaaagtctagttacagtggatttagaatatatttatgttgatgtcaaacagctgagcaccgtagcatgcagatgtcaaggcagttaggaagtaaatggtgtcttgtagatatgtgcaaggtagcatgatgagcaacttgagtttgttgccactgagaagcaggcgggttgggtgggaggaggaagaaagggaagaattaggtttgaattgctttttaaaaaaaaaagaaaagaaaaagacagcatctcactatgttgccwwggcwcatcttgagaagcaggcgggttgggtgggaggaggaagaaagggaagaattaggtttgaattgcttttttaaaaaaaaa

SEQ ID NO: 321 - DNA, 2551 bp, Homo sapiens
aataaacctctaagccgaggagaaaactctggctggggcagtgcgctgagcgccggaggagcgtaggcagggcagcgctggcgccagyggcgacaggagccgcgcgaccggcaaaaatacacgggaggccgtcgccgaaaagagtccgcggtcctctctcgtaaacacactctcctccaccggcgcctccccctccgctctgcgcgccgcccggctgggcgcccgaggccgctccgactgctatgtgaccgcgaggctgcgggaggaaggggacagggaagaagaggctctcccgcgggagcccttgaggaccaagtttgcggccacttctgcaggcgtcccttcttagctctcgccygcccctttctgcagcctaggcggcccrggttctcttctcttcctcgcgcgcccagccgcctcggttcccggcgaccatggtgacgatggaggagctgcgggagatggactgcagtgtgctcaaaaggctgatgaaccgggacgagaatggcggcggcgcgggcggcagcggcagccacggcaccctggggctgccgagcggcggcaagtgcctgctgctggactgcagaccgttcctggcgcacagcgcgggctacatcctaggttcggtcaacgtgcgctgtaacaccatcgtgcggcggcgggctaagggctccgtgagcctggagcagatcctgcccgccgaggaggaggtacgcgcccgcttgcgctccggcctctactcggcggtcatcgtctacgacgagcgcagcccgcgcgccgagagcctccgcgaggacagcaccgtgtcgctggtggtgcaggcgctgcgccgcaacgccgagcgcaccgacatctgcctgctcaaaggcggctatgagaggttttcctccgagtacccagaattctgttctaaaaccaaggccctggcagccatcccacccccggttccccccagygccacagagcccttggacctgggctgcagctcctgtgggaccccactacacgaccaggggggtcctgtggagatccttcccttcctctacctcggcagtgcctaccatgctgcccggagagacatgctggacgccctgggcatcacggctctgttgaatgtctcctcggactgcccaaaccactttgaaggacactatcagtacaagtgcatcccagtggaagataaccacaaggccgacatcagctcctggttcatggaagccatagagtacatcgatgccgtgaaggactgccgtgggcgcgtgctggtgcactgccaggcgggcatctcgcggtcggccaccatctgcctggcctacctgatgatgaagaaacgggtgaggctggaggaggccttcgagttcgttaagcagcgccgcagcatcatctcgcccaacttcagcttcatggggcagctgctgcagttcgagtcccaggtgctggccacgtcctgtgctgcggaggctgctagcccctcgggacccctgcgggagcggggcaagacccccgccacccccacctcgcagttcgtcttcagctttccggtctccgtgggcgtgcactcggcccccagcagcctgccctacctgcacagccccatcaccacctctcccagctgttagagccgccctgggggccccagaaccagagctggctcccagcaagggtaggacgggccgcatgcgggcagaaagttgggactgagcagctgggagcaggcgaccgagctccttccccatcatttctccttggccaacgacgaggccagccagaatggcaataaggactccgaatacataataaaagcaaacagaacactccaacttagagcaataacggctgccgcagcagccagggaagaccttggtttggtttatgtgtcagtttcacttttccgatagaaatttcttacctcatttttttaagcagtaaggcttgaagtgatgaaacccacagatcctagcaaatgtgcccaaccagctttactaaagggggaggaagggagggcaaagggatgagaagacaagtttcccagaagtgcctggttctgtgtacttgtccctttgttgtcgttgttgtagttaaaggaatttcattttttaaaagaaatcttcgaaggtgtggttttcatttctcagtcaccaacagatgaataattatgcttaataataaagtatttattaagactttcttcagagtatgaaagtacaaaaagtctagttacagtggatttagaatatatttatgttgatgtcaaacagctgagcaccgtagcatgcagatgtcaaggcagttaggaagtaaatggtgtcttgtagatatgtgcaaggtagcatgatgagcaacttgagtttgttgccactgagaagcaggcgggttgggtgggaggaggaagaaagggaagaattaggtttgaattgctttttaaaaaaaaaagaaaagaaaaagacagcatctcactatgttgccwwggcwcatcttgagaagcaggcgggttgggtgggaggaggaagaaagggaagaattaggtttgaattgcttttttaaaaaaaaa

SEQ ID NO: 322 - DNA, 2348 bp, Homo sapiens
ttaataaacctctaagccgaggagaaaactctggctggggcagtgcgctgagcgccggaggagcgtaggcagggcagcgctggcgccagyggcgacaggagccgcgcgaccggcaaaaatacacgggaggccgtcgccgaaaagagtccgcggtcctctctcgtaaacacactctcctccaccggcgcctccccctccgctctgcgcgccccgcctcggttcccggcgaccatggtgacgatggaggagctgcgggagatggactgcagtgtgctcaaaaggctgatgaaccgggacgagaatggcggcggcgcgggcggcagcggcagccacggcaccctggggctgccgagcggcggcaagtgcctgctgctggactgcagaccgttcctggcgcacagcgcgggctacatcctaggttcggtcaacgtgcgctgtaacaccatcgtgcggcggcgggctaagggctccgtgagcctggagcagatcctgcccgccgaggaggaggtacgcgcccgcttgcgctccggcctctactcggcggtcatcgtctacgacgagcgcagcccgcgcgccgagagcctccgcgaggacagcaccgtgtcgctggtggtgcaggcgctgcgccgcaacgccgagcgcaccgacatctgcctgctcaaaggcggctatgagaggttttcctccgagtacccagaattctgttctaaaaccaaggccctggcagccatcccacccccggttccccccagygccacagagcccttggacctgggctgcagctcctgtgggaccccactacacgaccaggggggtcctgtggagatccttcccttcctctacctcggcagtgcctaccatgctgcccggagagacatgctggacgccctgggcatcacggctctgttgaatgtctcctcggactgcccaaaccactttgaaggacactatcagtacaagtgcatcccagtggaagataaccacaaggccgacatcagctcctggttcatggaagccatagagtacatcgatgccgtgaaggactgccgtgggcgcgtgctggtgcactgccaggcgggcatctcgcggtcggccaccatctgcctggcctacctgatgatgaagaaacgggtgaggctggaggaggccttcgagttcgttaagcagcgccgcagcatcatctcgcccaacttcagcttcatggggcagctgctgcagttcgagtcccaggtgctggccacgtcctgtgctgcggaggctgctagcccctcgggacccctgcgggagcggggcaagacccccgccacccccacctcgcagttcgtcttcagctttccggtctccgtgggcgtgcactcggcccccagcagcctgccctacctgcacagccccatcaccacctctcccagctgttagagccgccctgggggccccagaaccagagctggctcccagcaagggtaggacgggccgcatgcgggcagaaagttgggactgagcagctgggagcaggcgaccgagctccttccccatcatttctccttggccaacgacgaggccagccagaatggcaataaggactccgaatacataataaaagcaaacagaacactccaacttagagcaataacggctgccgcagcagccagggaagaccttggtttggtttatgtgtcagtttcacttttccgatagaaatttcttacctcatttttttaagcagtaaggcttgaagtgatgaaacccacagatcctagcaaatgtgcccaaccagctttactaaagggggaggaagggagggcaaagggatgagaagacaagtttcccagaagtgcctggttctgtgtacttgtccctttgttgtcgttgttgtagttaaaggaatttcattttttaaaagaaatcttcgaaggtgtggttttcatttctcagtcaccaacagatgaataattatgcttaataataaagtatttattaagactttcttcagagtatgaaagtacaaaaagtctagttacagtggatttagaatatatttatgttgatgtcaaacagctgagcaccgtagcatgcagatgtcaaggcagttaggaagtaaatggtgtcttgtagatatgtgcaaggtagcatgatgagcaacttgagtttgttgccactgagaagcaggcgggttgggtgggaggaggaagaaagggaagaattaggtttgaattgctttttaaaaaaaaaagaaaagaaaaagacagcatctcactatgttgccwwggcwcatcttgagaagcaggcgggttgggtgggaggaggaagaaagggaagaattaggtttgaattgcttttttaaaaaaaaa

SEQ ID NO: 323 - DNA, 2362 bp, Homo sapiens
aggcagggcagcgctggcgccagyggcgacaggagccgcgcgaccggcaaaaatacacgggaggccgtcgccgaaaagagtccgcggtcctctctcgtaaacacactctcctccaccggcgcctccccctccgctctgcgcgccgcccggctgggcgcccgaggccgctccgactgctatgtgaccgcgaggctgcggttctcttctcttcctcgcgcgcccagccgcctcggttcccggcgaccrtggtgacgatggaggagctgcgggagatggactgcagtgtgctcaaaaggctgatgaaccgggacgagaatggcggcggcgcgggcggcagcggcagccacggcaccctggggctgccgagcggcggcaagtgcctgctgctggactgcagaccgttcctggcgcacagcgcgggctacatcctaggttcggtcaacgtgcgctgtaacaccatcgtgcggcggcgggctaagggctccgtgagcctggagcagatcctgcccgccgaggaggaggtacgcgcccgcttgcgctccggcctctactcggcggtcatcgtctacgacgagcgcagcccgcgcgccgagagcctccgcgaggacagcaccgtgtcgctggtggtgcaggcgctgcgccgcaacgccgagcgcaccgacatctgcctgctcaaaggcggctatgagaggttttcctccgagtacccagaattctgttctaaaaccaaggccctggcagccatcccacccccggttccccccagygccacagagcccttggacctgggctgcagctcctgtgggaccccactacacgaccaggggggtcctgtggagatccttcccttcctctacctcggcagtgcctaccatgctgcccggagagacatgctggacgccctgggcatcacggctctgttgaatgtctcctcggactgcccaaaccactttgaaggacactatcagtacaagtgcatcccagtggaagataaccacaaggccgacatcagctcctggttcatggaagccatagagtacatcgatgccgtgaaggactgccgtgggcgcgtgctggtgcactgccaggcgggcatctcgcggtcggccaccatctgcctggcctacctgatgatgaagaaacgggtgaggctggaggaggccttcgagttcgttaagcagcgccgcagcatcatctcgcccaacttcagcttcatggggcagctgctgcagttcgagtcccaggtgctggccacgtcctgtgctgcggaggctgctagcccctcgggacccctgcgggagcggggcaagacccccgccacccccacctcgcagttcgtcttcagctttccggtctccgtgggcgtgcactcggcccccagcagcctgccctacctgcacagccccatcaccacctctcccagctgttagagccgccctgggggccccagaaccagagctggctcccagcaagggtaggacgggccgcatgcgggcagaaagttgggactgagcagctgggagcaggcgaccgagctccttccccatcatttctccttggccaacgacgaggccagccagaatggcaataaggactccgaatacataataaaagcaaacagaacactccaacttagagcaataacggctgccgcagcagccagggaagaccttggtttggtttatgtgtcagtttcacttttccgatagaaatttcttacctcatttttttaagcagtaaggcttgaagtgatgaaacccacagatcctagcaaatgtgcccaaccagctttactaaagggggaggaagggagggcaaagggatgagaagacaagtttcccagaagtgcctggttctgtgtacttgtccctttgttgtcgttgttgtagttaaaggaatttcattttttaaaagaaatcttcgaaggtgtggttttcatttctcagtcaccaacagatgaataattatgcttaataataaagtatttattaagactttcttcagagtatgaaagtacaaaaagtctagttacagtggatttagaatatatttatgttgatgtcaaacagctgagcaccgtagcatgcagatgtcaaggcagttaggaagtaaatggtgtcttgtagatatgtgcaaggtagcatgatgagcaacttgagtttgttgccactgagaagcaggcgggttgggtgggaggaggaagaaagggaagaattaggtttgaattgctttttaaaaaaaaaagaaaagaaaaagacagcatctcactatgttgccwwggcwcatcttgagaagcaggcgggttgggtgggaggaggaagaaagggaagaattaggtttgaattgcttttttaaaaaaaaa

SEQ ID NO: 324 - DNA, 538 bp, Homo sapiens
gcagagatggcaggtgagatcgccaaggctcaggtcgctcggcctggtggcaacactgtcttcrggaagatcatctgcaaggaaatcccagccaaaatcatttttgaggatgaccagtgccttgctttccatgacacttcccctcaagcaccaacacgttttctgttgatatcgaaaaaacatatatcccagatttctgcagcagaagataatgacgaaagtcttcttggacacttaatgattgttggcaagaaatgtgctgctgatttgggcctgaataagggttatcaaatggtggtgaataaaggttcagatggtggacagtctgtctgtcaagttcatctccatgttcttggaggttggcagatgcaytggcctcctggttaagcacattttggtgataattttcccttctctgggcaatgattaagttaggcaagttccagtatgttaagtagcacacttattttttgcctgtgtatggagagattcaagaaataattttaaaaccgcatacataataaaagacattgttgca

SEQ ID NO: 325 - DNA, 2375 bp, Homo sapiens
gcaggcgcagtctgcgcagggactggcgggactgcgcggcggcracagcagacrtgtcgggggtccggggcctgtcgcggctgctgagcgctcggcgcctggcgctggccaaggcgtggccaacagtgttgcaaacaggaacccgaggttttcacttcactgttgatgggaacaagagggcatctgctaaagtttcagattccatttctgctcagtatccagtagtggatcatgaatttgatgcagtggtggtaggcgctggaggggcaggcttgcgagctgcatttggcctttctgaggcagggtttaatacagcatgtgttaccaagctgtttcctaccaggtcacacactgttgcagcacagggaggaatcaatgctgctctggggaacatggaggaggacaactggaggtggcatttctacgacaccgtgaagggctccgactggctgggggaccaggatgccatccactacatgacggagcaggcccccgccgccgtggtcgagctagaaaattatggcatgccgtttagcagaactgaagatgggaagatttatcagcgtgcatttggtggacagagcctcaagtttggaaagggygggcaggcccatcggtgctgctgtgtggctgatcggactggccactcgctattgcacaccttatatggamggtctctgcgatatgataccagctattttgtggagtattttgccttggatctcctgatggagaayggggagtgccgtggtgtcatcgcactgtgcatasaggacgggtccatccatcgcataagagcaaagaacactgttgttgccacaggaggctacgggcgcacctacttcagctgcacgtctgcccacaccagcacyggcgacggcacggccatgatcaccagggcaggccttccttgccaggacctagagtttgttcagttccacccyacaggcatatatggtgctggttgtctcattacggaaggatgtcgtggagagggaggcattctcattaacagtcaaggcgaaaggtttatggagcgatacgccccyrtcgcgaaggacctggcgtctagagatgtggtgtctcggtccatgactctggagatccgagaaggaagaggctgtggccctgagaaagatcacgtctacctgcagctgcaccacctacctccagagcagctggccacgcgcctgcctggcatttcagagacagccatgatcttcgctggygtggacgtcacgaaggagccgatccctgtcctccccacygtgcattataacatgggcggcattcccaccaactacaaggggcaggtcctgaggcacgtgaatggccaggatcagattgtgcccggcctgtacgcctgtggggaggccgcctgtgcctcggtacatggtgccaacygcctcggggcaaactcgctcttggacctggttgtctttggtcgggcatgtgccctgagcatcgaagagtcatgcaggcctggagataaagtccctccaattaaaccaaacgctggggaagaatctgtcatgaatsttgacaaattgagatttgctgatggaagcataagaacatcggaactgcgactcagcatgcagaagtcaatgcaaaatcatgctgccgtgttccgtgtgggaagcgtgttgcaagaaggttgtgggaaaatcagcaagctctatggagacctaaagcacctgaagacgttcgaccggggaatggtctggaacacggacctggtggagaccctggagctgcagaacctgrtgctrtgtgcgctgcagaccrtcwayggagcagaggcrcggaaggagtcacggggcgcgcatgccagggaagactacaaggtgcggattgatgagtacgattactccaagcccatccaggggcaacagaagaagccctttgaggagcactggaggaagcacaccctgtcctatgtggacgttggcactgggaaggtcactctggaatatagacccgtratcgacaaaactttgaaygaggctgactgtgccacyrtcccgccagccattcrctcctactgatgagacaagatgyggtgatgacagaatcagctttttgcacagccagagaacaacacatcacacacaggaaacagttgtgctcatgtgatgggggcctcagcactaggaaggagcggactattggtgcacgcagcagcttgaataaatctgaaagtcactatgctgtgtaagagaagccaaattttaaaagtgcatactgtgtacagagggtgtcgagaatgcctcctacgtgacggaaagcagatccgtggttccctgcagactggcaggagcagattccaaaggcacaggaagaagcttgtgggtagagtgtgttcattatcttct

SEQ ID NO: 326 - DNA, 2546 bp, Homo sapiens
gcaggcgcagtctgcgcagggactggcgggactgcgcggcggcracagcagacrtgtcgggggtccggggcctgtcgcggctgctgagcgctcggcgcctggcgctggccaaggcgtggccaacagtgttgcaaacaggaacccgaggttttcacttcactgttgatgggaacaagagggcatctgctaaagtttcagattccatttctgctcagtatccagtagtggatcatgaatttgatgcagtggtggtaggcgctggaggggcaggcttgcgagctgcatttggcctttctgaggcagggtttaatacagcatgtgttaccaagctgtttcctaccaggtcacacactgttgcagcacagggaggaatcaatgctgctctggggaacatggaggaggacaactggaggtggcatttctacgacaccgtgaagggctccgactggctgggggaccaggatgccatccactacatgacggagcaggcccccgccgccgtggtcgagctagaaaattatggcatgccgtttagcagaactgaagatgggaagatttatcagcgtgcatttggtggacagagcctcaagtttggaaagggygggcaggcccatcggtgctgctgtgtggctgatcggactggccactcgctattgcacaccttatatggamggtctctgcgatatgataccagctattttgtggagtattttgccttggatctcctgatggagaayggggagtgccgtggtgtcatcgcactgtgcatasaggacgggtccatccatcgcataagagcaaagaacactgttgttgccacaggaggctacgggcgcacctacttcagctgcacgtctgcccacaccagcacyggcgacggcacggccatgatcaccagggcaggccttccttgccaggacctagagtttgttcagttccacccyacaggcatatatggtgctggttgtctcattacggaaggatgtcgtggagagggaggcattctcattaacagtcaaggcgaaaggtttatggagcgatacgccccyrtcgcgaaggacctggcgtctagagatgtggtgtctcggtccatgactctggagatccgagaaggaagaggctgtggccctgagaaagatcacgtctacctgcagctgcaccacctacctccagagcagctggccacgcgcctgcctggcatttcagagacagccatgatcttcgctggygtggacgtcacgaaggagccgatccctgtcctccccacygtgcattataacatgggcggcattcccaccaactacaaggggcaggtcctgaggcacgtgaatggccaggatcagattgtgcccggcctgtacgcctgtggggaggccgcctgtgcctcggtacatggtgccaacygcctcggggcaaactcgctcttggacctggttgtctttggtcgggcatgtgccctgagcatcgaagagtcatgcaggcctggagataaagtccctccaattaaaccaaacgctggggaagaatctgtcatgaatsttgacaaattgagatttgctgatggaagcataagaacatcggaactgcgactcagcatgcagaagtcaatgcaaaatcatgctgccgtgttccgtgtgggaagcgtgttgcaagaaggttgtgggaaaatcagcaagctctatggagacctaaagcacctgaagacgttcgaccggggaatggtctggaacacggacctggtggagaccctggagctgcagaacctgrtgctrtgtgcgctgcagaccrtcwayggagcagaggcrcggaaggagtcacggggcgcgcatgccagggaagactacaaggtgcggattgatgagtacgattactccaagcccatccaggggcaacagaagaagccctttgaggagcactggaggaagcacaccctgtcctatgtggacgttggcactgggaaggtcactctggaatatagacccgtratcgacaaaactttgaaygaggctgactgtgccacyrtcccgccagccattcrctcctactgatgagacaagatgyggtgatgacagaatcagcttttgtaattatgtataatagctcatgcatgtgtccatgtcataactgtcttcatacgcttctgcactcyggggaagaaggagtacattgaagggrgattggcacyyagtggctgggagcttgccaggaacccagtggccrgggagcgtggcacttacctttgtcccttgcttcattcttgtgagatgataaaactgggcacagctcttaaataaaatataaatgaacaaactttcttttatttccaaatccatttgaaatattttactgttgtgactttagtcatatttgttgacctaaaaatcaaatgtaatctttgtattgtgttacatcaaaatccagatattttgtatagtttcttttttctttttctttttttttttttttttgagacaggatcggtgcagtagtacaatcacagctcactgcagcctcaaactcctgggcagctcaggtgatcttcctga

SEQ ID NO: 327 - DNA, 1229 bp, Homo sapiens
acagttagcctcgagaacctttgctttcagccggactccggactcctccggggacagcgcagcgcccgccagagccctcggcgctccctcccgctggcggcytccgcagccttcraggatggcgctggcggctttgatgatcgccctcggcagcctcggcctccacacctggcaggcccaggctgttcccaccatcctgcccctgggcctggctccagacacctttgacgatacctatgtgggttgtgcagaggagatggaggagaaggcagcccccctgctaaaggaggaaatggcccaccatgccctgctgcgggaatcctgggaggcagcccaggagacctgggaggacaagcgtcgagggcttaccttgccccctggcttcaaagcccagaatggaatagccattatggtctacaccaactcatcgaacaccttgtactgggagttgaatcaggccrtgcggacgggcggaggctcccgggagctctacatgaggcactttcccttcaaggccctgcatttctacctgatccgggccctgcagctgctgcgaggcagtgggggctgcagcaggggacctgggraggtggtgttccgaggtgtgggcagccttcgctttgaacccaagaggctgggrgactctgtccgcttgggccagtttgcctccagctccctggataaggcagtggcccacagatttggtaatgccaccctcttctctctarcaacttgctttggggcccctatacaggccttctctgtctttcccaaggagcgcgaggtgctgattcccccccatgaagtctttttggttaccagattctctcaggatggagcccagagcttggtgactctctggagcyataatcagacctgtagccattttaactgcgcctatctgggtggggagaagaggcggggctgtgtgtctgcgccaggagccctgggaacgggtgaccttcatatgamgaagaggcacctccagcagccttgagaagcaagaacatggttccggacccagccctagcagccttctccccaaccaggatgttggcctggggaggccacagcagggctgagggaactctgctatgtgatggggacttcctgggacaagcaaggaaagtactgaggcagccacttgattgaacggtgttgcaatgtggagacatggagttttattgaggtagctaygtgattaaatggtattgcagtgtggagacatg

SEQ ID NO: 328 - DNA, 1536 bp, Homo sapiens
agcctcgagaacctttgctttcagccggactccggactcctccggggacagcgcagcgcccgccagagccctcggcgctccctcccgctggcggcytccgcagccttcragtgggtcctccgcccccggccctcccctctcaggcggagccaaactgcggccccgcctttacagtctcggaaaggtccccagactggaggctctgaggaaggggtgtggggagtcgggggcggagacttggggcrgggggcgggcaataaactcccaggccccgcccacgccccgccggggccctaatcctggacccgggatcccgcgcgcctggagacagggtccagatctgcctcgagcccctcgaaaccaggactccagcacctctggtcccgccctcacccggacccctggccctcacgtctcctccagggatggcgctggcggctttgatgatcgccctcggcagcctcggcctccacacctggcaggcccaggctgttcccaccatcctgcccctgggcctggctccagacacctttgacgatacctatgtgggttgtgcagaggagatggaggagaaggcagcccccctgctaaaggaggaaatggcccaccatgccctgctgcgggaatcctgggaggcagcccaggagacctgggaggacaagcgtcgagggcttaccttgccccctggcttcaaagcccagaatggaatagccattatggtctacaccaactcatcgaacaccttgtactgggagttgaatcaggccrtgcggacgggcggaggctcccgggagctctacatgaggcactttcccttcaaggccctgcatttctacctgatccgggccctgcagctgctgcgaggcagtgggggctgcagcaggggacctgggraggtggtgttccgaggtgtgggcagccttcgctttgaacccaagaggctgggrgactctgtccgcttgggccagtttgcctccagctccctggataaggcagtggcccacagatttggtaatgccaccctcttctctctarcaacttgctttggggcccctatacaggccttctctgtctttcccaaggagcgcgaggtgctgattcccccccatgaagtctttttggttaccagattctctcaggatggagcccagagcttggtgactctctggagcyataatcagacctgtagccattttaactgcgcctatctgggtggggagaagaggcggggctgtgtgtctgcgccaggagccctgggaacgggtgaccttcatatgamgaagaggcacctccagcagccttgagaagcaagaacatggttccggacccagccctagcagccttctccccaaccaggatgttggcctggggaggccacagcagggctgagggaactctgctatgtgatggggacttcctgggacaagcaaggaaagtactgaggcagccacttgattgaacggtgttgcaatgtggagacatggagttttattgaggtagctaygtgattaaatggtattgcagtgtggagacatg

SEQ ID NO: 329 - DNA, 742 bp, Homo sapiens
gctgctgctgccgggagccccgtactatcagccgtggttaaccccaccgtgttcttcgacattgctgtcaacagcgagcccttgggccatgtctccttcaagctatttgcagacaagkttccaaagacagcagaaaactttcgtgctctgagcactggagagaaaggatttggttataagggttcctgctttcacagaattattccagggtttatgtgtcagggtggtgacttcacacaccataatggcactagcagcaagtccatctacggggagaaatttgatgatgmgaacttcatcctaaagcatacaggtcctggcatcttgtccatggcaaatgctggacccaacacaaacagttcccagtttttcatctgcactgccaagactgagtggttggatggcaagcatgyggtctttggcaaggygaaagaaggcatgaatattgtggaggccatagagcactttgggtccaggaatggcaagamcagcaagaagatcaccactgctgactgtggacaactcttaataagtttgacttgtgttttatcttagccaccagaccattccttctgtaggtcaggagagcacccctccaccccatttgctcgcagtatccttgaatctttgtgctcttgctgcagttccctttgggctccatgttttctctgttttcttccatgactagctggattgcagagttaagtttatgattatgaaataaacactaaataacaaaaat

SEQ ID NO: 330 - DNA, 2771 bp, Homo sapiens
cagcctggagtgcagctcatactccatgcccagaattcctgcctcgccactgtcctgctgccctccagacatgctggggccctgcatgctgctgctgctgctgctgctgggcctgaggctacagctctccctgggcatcatccyagttgaggaggagaacccggacttctggaaccgysaggcagccgaggccctgggtgccgccaagaagctgcagcctgcacagacagccgccaagaacctcatcatcttcctgggygaygggatgggggtgtctacggtgacagctgccaggatcctaaaagggcagaagaaggacaaactggggcctgagwtacccctggccatggaccgcttcccatatgtggctctgtccaagacatacaatgtagacaaacatgtgccagacagtggagccacagccacggcctacctgtgcggggtcaagggcaacttccagaccattggcttgagtgcagccgcccgctttaaccagtgcaacacgacacgcggcaacgaggtcatctccgtgatgaatcgggccaagaaagcagggaagtcagtgggagtggtaaccaccacacgrgtgcagcaygcctcgccagccggcacctacgcccacacggtgaaccgcaactggtactcggaygccgacgtgcctgcctcsgcccgccaggaggggtgccaggacatcgctacgcagctcatctccaacatggacattgaygtgatcctaggtggaggccgaaagtacatgtttcscatgggraccccagaccctgagtacccagatgactacagccaaggtgggaccaggctggacgggaagaatctggtgcaggaatggctggcgaagcrccagggtgcccggtaygtgtggaaccgcactgagctcmtgcaggcttccctggacccgtctgtgacccatctcatgggtctctttgagcctggagacatgaaatacgagatccaccgagactccacactggacccctccctgatggagatgacagaggctgccctgcgcctgctgagcaggaacccccgcggcttcttcctcttcgtggagggtggtcgcatcgaccatggtcatcatgaaagcagggcttaccgggcactgactgagacgatcatgttcgacgacgccattgagagggcgggccagctcaccagcgaggaggacacgctgagcctcgtcactgccgaccactcccacgtcttctccttcggaggctaccccctgcgagggagctccatcttcgggctggcccctggcaaggcccgggacaggaaggcctacacggtcctcctatacggaaacggtccaggctatgtgctcaaggacggcgcccggccggatgttaccgagagcgagagcgggagccccgagtatcggcagcagtcagcagtgcccctggacgragagacccacgcaggcgaggacgtggcggtgttcgcgcgcggcccgcaggcgcacctggttcacggcgtgcaggagcagaccttcatagcgcacgtcatggccttcgccgcctgcctggagccctacaccgcctgcgacctggcgccccscgccggcaccaccgacgccgcgcacccggggcsgtccgtggtccccgcgttgcttcctctgctggcmgggaccytgctgctgctggrgacggccactgctccctgagtgtcccgtccctggggctcctgcttccccatcccggagttctcctgctccccacctcctgtcgtcctgcctggcctccagcccgagtcgtcayccccggagtccctayacagaggtcctgccatggaaccttcccctccccgtgcrcyctggggactgagcccwtgacaccamrcctgycccttrkctgctctygractyyytrccccaacyccagggactgsrggttgtgccctgtggctgcctgcacyccaggaaargaggrggctcagrccatccagccmccrccyayagcysagtgkgkaycaggcaggctcyctyccyggggamawgargcacccakaccymgcgmcccsctgatctttgcttcagtcmtkgmakcacctgwgggactygaggactygggatcwtcaggacgcctggagaagsgtggyttcctgccaccctscyrgccaaggaggctsctgkggtggggatcmccagggggmttttgacacagccttckgctgycccccactrrgytaattcyacacccctgtrccccyccagggggcccwctgmstcatggcaaaggcttgccccaartcwcarcywctcagaygttcsayrccccyacakgccaattycagcacccamctgagwtccgaggagcwcctgggaagcyctgggtgcaggayacwggtcgagagccawaggtccctcccyagmcatctggayactgggcatrgatttctcaagaaggaagactcccctkccyycccwgggcctctrctctyctgggaracaaagcaataataaaaggaagtgtttgtaatcccagcactttgggaggccgaggtgggcggatcacgaggtcaggagatggagaccatcctggctaacacggtgaaaccccttatctatgcgcctgtagtcccagctacccaggaggctgaagcaggataatcgcttgaacccgggcggcggagattgcagtgagccgaggtcatgccactgcactgcagcctgggcgacagagcgagattctgcctcaaaaataaacaaataaattttaaaaataaataaataataaaaggaagtgttagacaatgta

SEQ ID NO: 331 - DNA, 1564 bp, Homo sapiens
agccgcagtttggcaccatcttttccatctcctsctccttccgccttcccgccatccgccctccacacgattcagcccggtggtgtyagccccctggactcgattcctgaggcaaacagtgccccttaaggtcggcgacagcctcttctgggttcactgcagtccaaccggttccctaccctctgccattatgaacatccgcaacrctcagccagacgacctgatgaatatgcaacactgcaacytcctttgccttcctgagaactaccagatgaaatactatttatatcatggcctttcctggccccagctttcttacatcgctgaggatgaggacgggaagattgtgggctatgttctggccaaaatggaggaggaaccagatgatgtcccgcatggccatatcacctcactggccgtgaagcgttcacaccggcgcctcggcctggcccagaagctgatggaccaggcctccagggccatgatagagaaytttaacgccaaatacgtgtctctgcacgtcaggaagagtaaccggccagccttgcacctttattctaacaccctcaactttcagattagtgaggtggaacctaaatactatgcagatggggaagatgcttatgctatgaagcgggatctctcgcagatggcagatgagctgagacgacaaatggacctgaagaagggcgggtatgtggtcctgggctccagggagaaccaggagacccagggcagcacactttctgattctgaagaggcctgtcagcaaaagaacccggctaccgaagaaagtggcagtgacagcaaagaacctaaggagtctgtggagagcaccaacgtccaggacagctcagaaagctcggattccacctcctagagcatgcttaagcatttcaggtcctcatgtctcaaccacatctactctgtgaaccctggcttagtctgtctgctctgcagcatctgctgtggggatcatctcacagtgaccagaatggcttctcactcttaactctataaacaaccacctttcacatatcctgctgggatcatgaaggaatacctggacacaagagccactgcacaacagccaaggaactttgagacctgccattacagaacctttcttggcctactcacactaygctgccattttattctgtttgtagtagtcctctgttgggtgtggttatcctgcaagtttttctccttttagaatgatgaacaggaagcagggcaaactcttgaagatttccagctttcagtttttgtttttgttttttaaccattatttacctgagttttcatccttgaggaggtgaagtagtcaggaccatgaagtcagacctcatgccctcttcctcctctttcctggaagaagtattcagtttccttttcctttctctggtaactcctcctttatactattcccccctcccttttttttgaggaggagggcatcaccttcccagtgggaaaaggtgttaagttaggagcttctactgtacaatcagaacttggagattttaagaaaaggacaaacggtaattaaattggaatctct

SEQ ID NO: 332 - DNA, 1958 bp, Homo sapiens
gcgcctgcgccttgtgctcctgactggctgcgctccctgcccccaacaccgccgtggcctgggaaacggtcccagagctgctgagccgacctactggtgtcatggcagccccraagacagcagctgtggggccgttggtgggagcggtggtccagggcaccaactccactcgctttctggttttcaattcaaaaacagcggaactacttagtcatcacaaagtggaattaacacaagagttcccaaaagaaggatgggtggaacaagaccctaaagaaattcttcagtctgtctacgagtgtatagcgagaacgtgtgagaaacttgacgaactgaatattgatatatccaacataaaagctgttggtgtcagcaatcagagggaaaccactgtaatctgggacaagttaacaggagagcctctctacaatgctgtggtgtggcttgatctaagaacccagactactgttgaggatcttagtaaaaaaattccaggaaatagtaacttcgtcaagtctaagacaggccttccactcagcacttacttcagtgcagtaaaacttcgttggatgcttgacaatgtgagaaacgtccaaaaggctgttgaagaaggtagagctctttttggtaccattgattcatggcttatctggagtttgacaggaggagttaatggaggcgtgcattgtacagatgtaacaaatgcaagtaggacaatgctttttaatatccattctttggaatgggataaagagctctgtgacttttttgaaattccaatggaccttcttccaaatgtcttcagttcttctgagatctatggcctaattaaaactggagccctggaaggtgtgccaatatctgggtgtttgggggaccaatgtgctgcattagtaggacaaatgtgcttccaggagggacaagccaaaaacacctatggaacaggttgcttcttactgtgtaatacgggtcgtaaatgtgtgttttctgaacatggccttttgaccacagtagcttacaaactaggcagagagaagccagcatattatgcactggaaggttctgttgctatagcaggtgctgttattcgttggctaagagacaatcttggaattatagagacctcaggagacattgaaagacttgctaaagaagtaggaacttcttatggctgttactttgtcccagccttttcagggttatatgcaccttattgggagcccagtgcaagagggatactctgtggcctcactcagtttaccaataaatgtcatattgcttttgctgcattagaagctgtttgtttccaaacccgagagattttggaagccatgaaccgtgactgtggaattccacttcgtcatttgcaggtagatggaggaatgaccaacaacaaagttcttatgcagctacaagcagatattcttcatattccagtaataaaaccctttatgcctgaaacaactgcactaggagctgccatggcagcaggggctgcagagggagtaagcgtttggagccttgaaccccaggctttgtcagttctcaggatggaacgatttgaaccacagatccaggccacagaaagtgaaattcgttatgccacatggaagaaagccgtaatgaagtcaatgggttgggttaccagtcagtctcctgaaggtggtgayccttctatcttctctagtctgcctttgggattttttatagtgagtagcatggtaatgctaattggagcaagatatatctcgggtgtgccataataataccagctatggagtcccaagatktaaacattttacataatgaaagcatatagcagttctgccycttaatataatgacactattatagactctgattttgtttataaaccacttgctacatgacccatgaaaaccctagacttgtgacctgaaataaagaaaatacgttagaagagcactgtagaaatattg

SEQ ID NO: 333 - DNA, 1543 bp, Homo sapiens
gggtgtcgctggcagcatggcggactacctcatcagcggcggcacccgctaccagcccgaggatgggctcaccgcacagcagctctttgccagcgctgacgacctcacctacaacgatttcctgattctcccaggattcatagacttcctagctggtgaggtggamctgacctcagccctgacccggaagatcacgctgaagacgccactgatctcctttcccacggacactgtgatagaggccgacatggccatcgcgatggctctgatgggaggtattggtttcattcaccacaactgcaccccagagttccaggccaacaaggtgcagaaggtcaagaagtttgaacagggcttcatcacagaccctgtggtactgagccccttgcacactgtgggtgatgtgctggaggccaagatgcggcatggcttctctggcatccccattactgagaccggcaccatcggcagcaagctggtgggcatcctcacctcccgagacatcgacttccttgctgagaaggaccacacaccctcctcagtgaggatggagctagtggtggctccagcaggcgtgacgttcaaagaggcaaatgagatcctgcagcgtagcaagaaagggaagctgcctgttgtcaatgatcatgatgagctggtggccatcatcgcccgcacggacctgaagaagaaccgagactaccctctggcctccaaggattcccacaagcagctgctgtgcggggcagttgtgggcacctgtgaagatgacaaattccgcctgggcctgctcacccaggcgggcgtcgatgtcatagtcttggactcgtcccaagggaactcggtgtatcagattgccatggtgcgttacatcaaacagaagtacccccacctccaggtgattgggaggaatgtggtgacagcagcccaggccaagaacctgattgacgctggtgtggatgggctgcacgtgggcatgggctgcggctccatctgcatcaccctggaaatgatggcctgtggtcggacccacggcactgctgtgtacaaggtggccgagtatgcctggcgttttggtgtgcccatcatagctgatggtrgcatccagaccgtggggcacgtggtcaaggccctggcccttggagcctccacagtgatgatgggctccctgctggccaccaccacggaggcctccggtgaatacttsttctcagacggggtgccgctcaagaagtatcagggcatgggctctgtggatgccatggagaagagcagtagcagccagaaacgatacttcagcgaggcggataaggtgaagttctcgcagggtatcttgggctccatccaggacaaagggtccattcagaagttcgtgccctacctcatagcgggcatccagcacagttgccaggatatcggggcccgaagcctggctgtccttcggtccatgatgtactcaggagagctcaagtttgagaaggggaccgtgtcggcccagatcgagggtggcgttcatggcctgcactcttacgagaggtggctgtac

SEQ ID NO: 334 - DNA, 1560 bp, Homo sapiens
gggtgtcgctggcagcatggcggactacctcatcagcggcggcacccgctaccagcccgaggatgggctcaccgcacagcagctctttgccagcgctgacgacctcacctacaacgatttcctgattctcccaggattcatagacttcctagctggtgaggtggamctgacctcagccctgacccggaagatcacgctgaagacgccactgatctcctttcccacggacactgtgatagaggccgacatggccatcgcgatggctctgatgggaggtattggtttcattcaccacaactgcaccccagagttccaggccaacaaggtgcagaaggtcaagaagtttgaacagggcttcatcacagaccctgtggtactgagccccttgcacactgtgggtgatgtgctggaggccaagatgcggcatggcttctctggcatccccattactgagaccggcaccatcggcagcaagctggtgggcatcctcacctcccgagacatcgacttccttgctgagaaggaccacacaccctcctcagtgaggtgatgacgccaaggatggagctagtggtggctccagcaggcgtgacgttcaaagaggcaaatgagatcctgcagcgtagcaagaaagggaagctgcctgttgtcaatgatcatgatgagctggtggccatcatcgcccgcacggacctgaagaagaaccgagactaccctctggcctccaaggattcccacaagcagctgctgtgcggggcagttgtgggcacctgtgaagatgacaaattccgcctgggcctgctcacccaggcgggcgtcgatgtcatagtcttggactcgtcccaagggaactcggtgtatcagattgccatggtgcgttacatcaaacagaagtacccccacctccaggtgattgggaggaatgtggtgacagcagcccaggccaagaacctgattgacgctggtgtggatgggctgcacgtgggcatgggctgcggctccatctgcatcaccctggaaatgatggcctgtggtcggacccacggcactgctgtgtacaaggtggccgagtatgcctggcgttttggtgtgcccatcatagctgatggtrgcatccagaccgtggggcacgtggtcaaggccctggcccttggagcctccacagtgatgatgggctccctgctggccaccaccacggaggcctccggtgaatacttsttctcagacggggtgccgctcaagaagtatcagggcatgggctctgtggatgccatggagaagagcagtagcagccagaaacgatacttcagcgaggcggataaggtgaagttctcgcagggtatcttgggctccatccaggacaaagggtccattcagaagttcgtgccctacctcatagcgggcatccagcacagttgccaggatatcggggcccgaagcctggctgtccttcggtccatgatgtactcaggagagctcaagtttgagaaggggaccgtgtcggcccagatcgagggtggcgttcatggcctgcactcttacgagaggtggctgtactga

SEQ ID NO: 335 - DNA, 2354 bp, Homo sapiens
gcgggtggggccgtcggcggcgctggtgagctttgcggagctgggcggtgccgaggaggaggaggtggcggcctgggtctgacgcggccctgttcgagggggcctctcttgtttatttatttattttccgtgggtgcctccgagtgtgcgcgcgctctcgctacccggcggggagggggtggggggagggcccgggaaaagggggagttggagccggggtcgaaacgccgcgtgacttgtaggtgagagaacgccgagccgtcgccgcagcctccgccgccgagaagcccttgttcccgctgctgggaaggagagtctgtgccgacaagatggcggacggggagctgaacgtggacagcctcatcacccggctgctggaggtacgaggatgtcgtccaggaaagattgtgcagatgactgaagcagaagttcgaggcttatgtatcaagtctcgggagatctttctcagccagcctattcttttggaattggaagcaccgctgaaaatttgtggagatattcatggacartatacagatttactgagattatttgaatatggaggtttcccaccagaagccaactatcttttcttaggagattatgtggacagaggaaagcagtctttggaaaccatttgtttgctattggcttataaaatcaaatatccagagaacttctttctcttaagaggaaaccatgagtgtgctagcatcaatcgcatttatggattctatgatgaatgcaaacgaagatttaatattaaattgtggaagaccttcactgattgttttaactgtctgcctatagcagccattgtggatgagaagatcttctgttgtcatggaggattgtcaccagacctgcaatctatggagcagattcggagaattatgagacctactgatgtccctgatacaggtttgctctgtgatttgctatggtctgatccagataaggatgtgcaaggctggggagaaaatgatcgtggtgtttcctttacttttggagctgatgtagtcagtaaatttctgaatcgtcatgatttagatttgatttgtcgagctcatcaggtggtggaagatggatatgaattttttgctaaacgacagttggtaaccttattttcagccccaaattactgtggcgagtttgataatgctggtggaatgatgagtgtggatgaaactttgatgtgttcatttcagatattgaaaccatctgaaaagaaagctaaataccagtatggtggactgaattctggacgtcctgtcactccacctcgaacagctaatccgccgaagaaaaggtgaagaaaggaattctgtaaagaaaccatcagatttgttaaggacatacttcataatatataagtgtgcactgtaaaaccatccagccatttgacaccctttatgatgtcacacctttaacttaaggagacgggtaaaggatcttaaatttttttctaatagaaagatgtgctacactgtattgtaataagtatactctgttatagtcaacaaagttaaatccaaattcaaaattatccattaaagttacatcttcatgtatcacaatttttaaagttgaaaagcatcccagttaaactagatgtgatagttaaaccagatgaaagcatgatgatccatctgtgtaatgtggttttattcactagaataatggcaaatacttctaatttttttccctaaacatttttaaaagtgaaatatgggaagagctttacagacattcaccaactattattttcccttgtttatctacttagatatctgtttaatcttactaagaaaactttcgcctcattacattaaaaaggaattttagagattgattgttttaaaaaaaaatacgcacattgtccaatccagtgattttaatcatacagtttgactgggcaaactttacagctgatagtgaatattttgctttatacaggaattgacactgatttggatttgtgcactctaatttttaacttattgatgctctattgtgcagtagcatttcatttaagataaggctcatatagtaytacccaactagttggtaatgtgattatgtggtaccttggctttaggttttcattcgcacggaacaccttttggcatgcttaacttcctggtaacaccttcacctgcattggttttctttttcttttttctttcttttttttttttttttttttttgagttgttgtttgtttttagatccacagtacatgagaatccttttttgacaagccttggaaagctgacactgtctcyttttcctccctctatacgaaggatgtatttaaatgaatgctggtcagtgggacattttgtcaactatgg

SEQ ID NO: 336 - DNA, 4369 bp, Homo sapiens
gcgggtggggccgtcggcggcgctggtgagctttgcggagctgggcggtgccgaggaggaggaggtggcggcctgggtctgacgcggccctgttcgagggggcctctcttgtttatttatttattttccgtgggtgcctccgagtgtgcgcgcgctctcgctacccggcggggagggggtggggggagggcccgggaaaagggggagttggagccggggtcgaaacgccgcgtgacttgtaggtgagagaacgccgagccgtcgccgcagcctccgccgccgagaagcccttgttcccgctgctgggaaggagagtctgtgccgacaagatggcggacggggagctgaacgtggacagcctcatcacccggctgctggaggtacgaggatgtcgtccaggaaagattgtgcagatgactgaagcagaagttcgaggcttatgtatcaagtctcgggagatctttctcagccagcctattcttttggaattggaagcaccgctgaaaatttgtggagatattcatggacartatacagatttactgagattatttgaatatggaggtttcccaccagaagccaactatcttttcttaggagattatgtggacagaggaaagcagtctttggaaaccatttgtttgctattggcttataaaatcaaatatccagagaacttctttctcttaagaggaaaccatgagtgtgctagcatcaatcgcatttatggattctatgatgaatgcaaacgaagatttaatattaaattgtggaagaccttcactgattgttttaactgtctgcctatagcagccattgtggatgagaagatcttctgttgtcatggaggattgtcaccagacctgcaatctatggagcagattcggagaattatgagacctactgatgtccctgatacaggtttgctctgtgatttgctatggtctgatccagataaggatgtgcaaggctggggagaaaatgatcgtggtgtttcctttacttttggagctgatgtagtcagtaaatttctgaatcgtcatgatttagatttgatttgtcgagctcatcaggtggtggaagatggatatgaattttttgctaaacgacagttggtaaccttattttcagccccaaattactgtggcgagtttgataatgctggtggaatgatgagtgtggatgaaactttgatgtgttcatttcagatattgaaaccatctgaaaagaaagctaaataccagtatggtggactgaattctggacgtcctgtcactccacctcgaacagctaatccgccgaagaaaaggtgaagaaaggaattctgtaaagaaaccatcagatttgttaaggacatacttcataatatataagtgtgcactgtaaaaccatccagccatttgacaccctttatgatgtcacacctttaacttaaggagacgggtaaaggatcttaaatttttttctaatagaaagatgtgctacactgtattgtaataagtatactctgttatagtcaacaaagttaaatccaaattcaaaattatccattaaagttacatcttcatgtatcacaatttttaaagttgaaaagcatcccagttaaactagatgtgatagttaaaccagatgaaagcatgatgatccatctgtgtaatgtggttttagtgttgcttggttgtttaattattttgagcttgttttgtttttgtttgttttcactagaataatggcaaatacttctaatttttttccctaaacatttttaaaagtgaaatatgggaagagctttacagacattcaccaactattattttcccttgtttatctacttagatatctgtttaatcttactaagaaaactttcgcctcattacattaaaaaggaattttagagattgattgttttaaaaaaaaatacgcacattgtccaatccagtgattttaatcatacagtttgactgggcaaactttacagctgatagtgaatattttgctttatacaggaattgacactgatttggatttgtgcactctaatttttaacttattgatgctctattgtgcagtagcatttcatttaagataaggctcatatagtaytacccaactagttggtaatgtgattatgtggtaccttggctttaggttttcattcgcacggaacaccttttggcatgcttaacttcctggtaacaccttcacctgcattggttttctttttcttttttctttcttttttttttttttttttttttgagttgttgtttgtttttagatccacagtacatgagaatccttttttgacaagccttggaaagctgacactgtctcyttttcctccctctatacgaaggatgtatttaaatgaatgctggtcagtgggacattttgtcaactatgggtattgggtgcttaactgtctaatattgccatgtgaatgttgtatacgattgtaaggcttatgtcactaaagatttttattctgattttttcataatcaaaggtcatatgatactgtatagacaagctttgtagtgaagtatagtagcaataatttctgtacctgatcaagtttattgcagcctttcttttcctatttcttttttttaagggttagtattaacaaatggcaatgagtagaaaagttaacatgaagattttagaaggagagaacttacaggacacagatttgtgattctttgactgtgacactattggatgtgattctaaaagcttttattgagcattgtcaaatttgtaagcttcatagggatggacatcatatctataatgcccttctatatgtgctaccatagatgtgacatttttgaccttaatatcgtctttgaaaatgttaaattgagaaacctgttaacttacattttatgrattggcacattgtattacttactgcaagagatatttcattttcagcacagtgcaaaagttctttaaaatgcatatgtctttttttctaattccgttttgttttaaagcacattttaaatgtagttttctcatttagtaaaagttgtctaattgatatgaagcctgactgattttttttttccttacagtgagacatttaagcacacattttattcacatagatactatgtccttgacatattgaaatgattcttttctgaaagtattcatgatctgcatatgatgtattaggttaggtcacaaaggttttatctgaggtgatttaaataacttcctgattggagtgtgtaagctgagcgatttctaataaaattttagttgtacacttttagtagtcatagtgaagcaggtctagaaaataagcctttggcagggaaaaagggcaatgttgattaatctcagtattaaaccacattaatctgtatcccattgtctggcttttgtaaattcatccaggtcaagactaagtatgttggttaataggaatccttttttttttttttaaagactaaatgtgaaaaaataatcmctacttaagctaattaatattggtcattaaatttaaaggatggaaatttatcatgtttaaaaattattcaagcactcttaaaaccacttaaacagcctccagtcataaaaatgtgttctttacaaatatttgcttggcaacacgacttgaaataaataaaactttgtttcttaggagaaaatgattctgtaattccagtgtcactaatttatattgttctttcctctgatttttttcaggttagtgatttttttgtatacaatttaatccaaatgttatgacattcagaaatcatgaaacacagtagatatctgttataatgtggtgtatcacatggattataaagcaaagttatggtcgatttctattcttgaaagaatcaactacagtgaatcctwtgcatttgaagccttaacatgcattgctttaattttgcccagggacaaattttaataatcagcaagactggtttgtgcaaagcgttgagtcatcaggtatttagagcctagccagctacccagtatccatgctgccatatcccttcattgtaaaaagtacctaaacattcgtgaaatgattttttttagctgaaaaatgctggcaagaagaattttaaagcttaaaataggtggtaaatttgaagtatgagtgtgttcacgagaaacataggcttttcaaaaaaatttttattcaaggcaaagcaaggaacatcttgagatatgtctcaagaatataaagatgtattattttaagccaaggagctgaaatatatctcagtttataaattcaggtatattctttttgtctccatggcaaccataacttttgaaccaaaaaaaattgtttttacatctttatgctgaaaatgtgtttagattaggaatatgg

SEQ ID NO: 337 - DNA, 2570 bp, Homo sapiens
ttagctatggctgtcttcattattttgtccctgtttagtgttctggtgacaggcatgggtgaaggtggggctgggagtgagaaaggaggtgagagggaatgtaagctgaaccagcttccccattgcccctccgtatctcccagtgcccagccttggacacaccctggccagagccagctgtttgcagacctgagccgagaggagctgacggctgtgatgcgctttctgacccagcagctggggccagggctggtggatgcagcccaggcccagccctcggacaactgtgtcttctcagtggagttgcagctgcctcccaaggctgcagccctggctcacttggacagggggagccccccacctgcccgggaggcactggccatcgtcttctttggcaggcaaccccagcccaacgtgagtgagctggtggtggggccactgcctcacccctcctacatgcgggacgtgactgtggagcgtcatggaggccccctgccctatcaccgacgccccatgttgttccaagagtacctggacatagaccagatgatcttcgacagagagctgccccaggcttctgggcttctccatcactgttgcttctacaagcgccggggacggaacctggtgacaatgaccacggctccccgtggtctgcaatcaggggaccgggccacctagtttggcctctactacaacatctcgggcgctgggttcttcctgcaccacgtgggcttggagctgctagtgaaccacaaggcccttgaccctgcccgctggactatccagaaggtgttctatcaaggccgctactatgacagcctggcccagctggaggcccagtttgaggccggcctggtgaatgtggtgctgatcccagacaatggcacaggtgggtcctggtccctgaagtcccctgtgcccccgggtccagctccccctctrcagttccatccccaaggcccccgcttcagtgtccagggaagtcgagtggcctcctcactgtggactttctcctttggcctcggagcattcagtggcccaaggatctttgacgttcccttccaaggggagagggtggcctatgaagtcagtgtccaggcggccttggccatctatggaggcaattctccttctgctctacgaagccggtacatagatagtggctttggcttgggccacttctccacgcccctgacycatggggtggactgcccctacctggccacctacgtggactggcacttcctttttgagtcccaggccgccaagacaatacgygatgccttttgtatatttgaacagaaccagggcctccccctgcggcgacaccactcagatctctactcccactactttgggggccttgcggaaacggtgctggtcatcagatctgtgtctactatgctcaactatgactatgtgtgggatatggtcttccaccctaatggggccatagaaatcagactccacaccaccggctacatcagctcagcattcccctttggtgctgcccagaggtatggaaacaaagtttcagagcacaccctgggcacggtccacacccacagcgcccacttcaaggtggacctggatgtagcagmactrgagaactgggtctgggccgaggatatggcctttgtccccatggctgtgccctggagccctgagcaccagatgcagaggctgcrggtgacccggaagctgctggagacagaggagcaagccaccttccccatgggaggcgccacccctcgctacctgtacctggscagcaaccacagcaacaagtggggtcacccccggggctaccgcatccaggtgcgcagcttttytggggagccactgccccagaacagctccgtggagagaggcttcagctgggggaggtaccagctggtggtaacccagcggaaggaggaggaacctagtagcaccagcatctacaatttgaatgacccttggacacccactgtggacttcactgrcttcatcaacaatgagaccattgcagggcaggayttggtggcctgggtgacagctggttttctgcatatcccacatgcagaggacattcctaacacagtgactgtggggaacrgcgtgggcttcttcctccgaccctayaacttctttgacgaagacccctccttctactctgccgactccatctacttccgaggggaccaggatgctggggcctgcgaggtcaaccccctagcttgcctgccccaggctgctgcctgtgcccccgacctccctgccttctcccacgggggcttctctcacaactaggcggtcctgggatggggcatgtggccaagggctccagggccagggtgtgagggatggggagcagctgggcactgggccggcagcctggttccctcttycctgtgccaggactctcttccctccactgccctccttcrcatccccctctgagccaggagcctcctgaccctgtgatgcctgacacaggggacagtcagctttgttgatgccagctgtgctgagttcccatccagagaggtgaggcatggcccagcctggagcctggagccgtggct

SEQ ID NO: 338 - DNA, 519 bp, Homo sapiens
gtggcgttctccacgccggctgcctgcctgacccatcagcagaaggtgttgaggctttaaaagtgggtgctgtgccacctcgagttgtgttgcatccacagggacaaataccgatactttgcttgtttgatgagagcccrgtctgaagaacatacgaacgaaaaggatatgatgaaggccatccggctgctgaaggaggctgaggaagaattctggtaccatcagcatccacagccatgcatcttccctgactctcctaggggtacctcctatgtgacacacgagtgctacaaggtcccagaatggtgcttagatgactggcatccttctgagaaggcaatgtatcctgattactttgccaagagaaaacagtggaagaaactgcggagggaaagctggaaaagagaggttaagcagctgcaggaggaaacgccacctgccggaaaggaaggtgatttgcccccactgtggtggcatattgtgaccagaccctgggagcagcccgtggagagagagaga

SEQ ID NO: 339 - DNA, 1331 bp, Homo sapiens
agaggtgggatcgtttgtcgcgatgtggagtggccgtaagctgggctcctccgggggttggtttttaagagtgctggggcctggaggctgtaatacaaaagctgcgcgtcccttaatttcctcggcggtttatgtgaagaaccagctcagtgggactctacagattaaaccaggggttttcaatgaatacagaaccatatggttcaaatcctacaggacgatcttttcctgtttgaacagaataaagagtttcaggtacccttgggcgagactgtacagtacttcccaaaccactgtcgacagcggtgaggtaaaaaccttcttggccctggctcacaaatggtgggatgaacaaggagtatatgcacctcttcattccatgaatgacctgagggtgccatttattagggacaatcttctgaaaacaattcctaatcaccagccaggaaaacctttgttggggatgaagattcttgacgttggctgtggtggtgggctgttaactgaacctctagggcggcttggggcttcagttattggaatcgaccctgtggatgagaacattaaaacagcacaatgccataaatcatttgatccagtcctggataagagaatagagtacagagtgtgttccctggaagagattgtggaagagactgcagaaacatttgatgctgttgtagcttctgaagttgtagaacatgtgattgatctagaaacatttttacagtgctgctgtcaagtgttaaaacccggtggttctttattcattactacaatcaacaaaacacaactttcctatgccttgggaattgttttttcagagcaaattgcargtattgtaccaaaaggtactcatacatgggagaagtttgtttcacctgaaacactagagagcattctggaatcaaatggtctgtcagttcaaacagtggtaggaatgctctataaccccttctcaggttactggcattggagtgaaaataccagccttaactatgcagctyatgctgtgaaatccagggtccaggaacacccagcctctgctgagtttgttttaaagggagaaacagaagagctccaagctaatgcctgcaccaatccagctgtgcatgaaaagctgaagaaatgaattgtttctgagaactatagtaatatggcttggatatctgatgttttcaaatacaaaaatgtacaatttatcctttgagagagaatcatgaagaaaagaaggtcaataaaaagggctaaaaccttggamaaaagtttttgttatttcgtctaatagctactttcaagggattctgtgaataaaaagttttgtcaagata

SEQ ID NO: 340 - DNA, 2406 bp, Homo sapiens
cagtcgcctgtgtacctttgtactttctacagtgaaagttgctacaggatctccctttctcaataaattcatctgcggtggagaaaatcagcatgwgtactacaggccaagtcatcagatgcaaagcagccatactctggaagcctggtgcaccattttctattgaagaggtagaagtggccccaccaaaggcaaaggaagttcgcataaaggttgtggccaccggactgtgtggtacagagatgaaagtgttggggagtaaacacttggacctcttgtatcccaccatcttgggccatgaaggggctggaatcgttgagagtattggagaaggagtaagcacagtgaaaccaggtgacaaagttatcacactctttctgccacagtgtggagaatgtacctcttgcctgaattctgagggcaatttttgtrtacaattcaaacagtcaaaaacccaactgatgtctgatggtaccagcaggtttacctgcaagggaaaatcaatatatcactttggtaataccagcaccttctgtgaatacmcagtgataaaggaaatctcagttgccaagattgatgcagtcgctcctctagagaaagtatgcckaattagctgtggcttttccactgggtttggtgctgcaatcaatactgccaaggtgactccaggttctacctgtgctgrgttggcctgggaggagtcggcttgtctgttgtcatgggttgtaaagcagcaggagcagccaggatcattggagtggatgtcaacaaggagaaatttaagaaggcacaggaattgggtgctactgagtgcctcgaccctcaggacttaaagaaacccattcaagaagttttatttgatatgacagatgctggtatagacttctgctttgaggccattggaaatctggacgttctggcagctgccctcgcctcctgcaatgagagctatggggtctgtgtggttgttggggtgttgcctgccrgtgttcaactcaaaatcagtggccagttgttcttctcaggacgttctttgaagggttctgtttttggaggctggaagagcagacagcacatccctaaactggttgctgattatatggcagagaagttgaatctagatccactaattactcatactctgaatcttgataaaatcaatgaagcagttgaattaatgaaaactggaaaatgtatccgctgtatcctgttactttaagtacaatgtaatacatgcaagacccaaaggatatttcaccaactcaatggcatttgatgtaattttcatgatttagaagaattattcacccaatcccatttctatattctgacttctgattcactccgcagtggacctatatctggcttctgacctaaccatttcagctagattaaggttggcttgaatcactcaactccacatccttcagacataaaaggtcaatgcaagatgctcccattttcatagttcctctacctgtggacctttatattcttgtacactatatgtctctctcacaggcctagacatgaaactctgccattttactctaaagaaacaaaactccgcattaatgagtttattgaagattcaggttaacctgaatcaagttaacccagtctcaaatgctcacttatcctatctccttggcacaaatctctcctctcctggattgccaaagaaaattcaaattattcttcaattagtcaggatgatttgactatcagcagttcatagtacccatcttcataactaagccacctagggatccrgcagaaaaaaaagggatgaggggagtcatcatacaggaggtggatcatttascaggatccacacttcctacaaagcggttgtaatattaaataacaaaactgttttttattccaatcttcacataaaacaggaataattgtatactttcttactaatgtgttccatggagtttttcctccaagaagtggcttaggggaaaatgagccccagtaatgctytgtggcatccaatccttctaccccgaccctttgactttctgccccagcccctcttagttctcctagaattaggactaaggttaagtgccctcttgggatatgacttccttcccttcctcttgatacaaaaagagcctattaccaaccctcatacacacaagagttcccttcctagttgcagactcttctgctccagctggactcccctagctctggactcccactagatcacacaggggtccctgcatgtcagtaaactttggatgaccttgggagaccaaaaaatggaatatcattttttgatctaaacaaaatatctctctctcccatcatggttttcacatgatatcaaaggactctcataacagtctgattcttatgagttgggcatcctgtgtttccctttaggggcct

SEQ ID NO: 341 - DNA, 1397 bp, Homo sapiens
cagtcgcctgtgtacctttgtactttctacagtgaaagttgctacaggatctccctttctcaataaattcatctgcggtggagaaaatcagcatgwgtactacaggccaagtcatcagatgcaaagcagccatactctggaagcctggtgcaccattttctattgaagaggtagaagtggccccaccaaaggcaaaggaagttcgcataaaggttgtggccaccggactgtgtggtacagagatgaaagtgttggggagtaaacacttggacctcttgtatcccaccatcttgggccatgaaggggctggaatcgttgagagtattggagaaggagtaagcacagtgaaaccaggtgacaaagttatcacactctttctgccacagtgtggagaatgtacctcttgcctgaattctgagggcaatttttgtrtacaattcaaacagtcaaaaacccaactgatgtctgatggtaccagcaggtttacctgcaagggaaaatcaatatatcactttggtaataccagcaccttctgtgaatacmcagtgataaaggaaatctcagttgccaagattgatgcagtcgctcctctagagaaagtatgcckaattagctgtggcttttccactgggtttggtgctgcaatcaatactgccaaggtgactccaggttctacctgtgctgrgttggcctgggaggagtcggcttgtctgttgtcatgggttgtaaagcagcaggagcagccaggatcattggagtggatgtcaacaaggagaaatttaagaaggcacaggaattgggtgctactgagtgcctcgaccctcaggacttaaagaaacccattcaagaagttttatttgatatgacagatgctggtatagacttctgctttgaggccattggaaatctggacgttctggcagctgccctcgcctcctgcaatgagagctatggggtctgtgtggttgttggggtgttgcctgccrgtgttcaactcaaaatcagtggccagttgttcttctcaggacgttctttgaagggttctgtttttggaggctggaagagcagacagcacatccctaaactggttgctgattatatggcagagaagttgaatctagatccactaattactcatactctgaatcttgataaaatcaatgaagcagttgaattaatgaaaactggaaaatggtaaactgcccacataaattttatgtctgtgtgtttgagaccaagagaaagggtgtattggcttgggagtagaagaagggtcgtccctgctgcagaagctgtatactgataattgaagaggctttcaggaatttgtaaagcatctccttcccctctgcattttgttttatttctagctaataaaatacataatcctgaaagta

SEQ ID NO: 342 - DNA, 1013 bp, Homo sapiens
gcgagtcaggattcctgatccagagacaatggccctgatgggatggagcctgagggcatcatcgagagtaactggaatgagattgttgacagctttgatgacatgagcttctcggagtccctcctctgtggcacctatgcccatggttttgggaagccctctgacatccagcagtgcatcaacatgtgtgctaaggtacagaaactgcagatggaagctccccatatcatcatgggtacccctggccgtgtgtctgacatgcttaactggagatatctgtctcctaaatacatcaagatgtttgtactggacgaagctgacgaaatgttaagccatagattcaaggaccagatctgtgacatattccaaatgctcaatagcaacacccaggtagttttgctgtcagctacaattccttctgatgtacttgaggtgaccaagaagttcatgagggaccccattcggattcttgtcaagaaggaagagttaaccctgaaggattttactgtctctgccatgcatggagatatggaccaaaaggaacgagayrtggtcatgagggagtatcgttctggctctagcagagttttgattaccactgacctgctgsccagaggcattgatgtgcagcagctttctttagtcatcaactacgaccytcccacgaacagggaaaactatatccacagaatcggtcgaggtggacagtttggccataaaggtgtggctattaacatggtggcagaagacaagaggactctttgagacattgagatcttctacaacacctccattgaggaaatgcccctcaatgttgctgacctcacctaaggggttgtcctgcttcccagccccagccagggttcagtctcgaggggctgaggagcagcaggggtggggagggaaggggagccaagggatggacatcttgtcattttttttctttgaataaatgtcactttttgaggcaaaagaaggaaacgtgaacattttagacacccttttctttgggg

SEQ ID NO: 343 - DNA, 1713 bp, Homo sapiens
grgcaggctagggagcacaccccttctgggggctcgagacctccctgggtggagcagaactgcagcggctgcaggtcccggagagtctgggagaggtcgaggttgacagaggaggtgggtagggggcgcgggcgccaggggcgatggaagcggcgatgatgccaggccgggtgggtgcgctccagtgtgaaaaaacttacaagtctctgagcacacaaagagataagattccaagggaaaattaaagaaccgaagaaaaggagagtgaaactmcaggaaactccgaggtcaggaatttgggggaatctaggggaaaagggacttctccgagaactggtagcgcggaggaggggacgcctgaggagccgcagtctccaggagagcgaaccgtggaacctctggagtattacaggagatttctgaaagagaactgccgtcctgatggaagagaacttggtgaattcagaaccacaactgtcaacatcggttcaattagtaccgcagatggttctgctttagtgaagttgggaaatactacagtaatctgtggagttaaagcagaatttgcagcaccatcaacagatgcccctgataaaggatacgttgttcctaatgtggatctaccacccctgtgttcatcgagattccggtctggacctcctggagaagaggcccaagtggctagccarttcattgcagatgtcattgaaaattcacagataattcagaaagaggacttatgcatttctccaggaaagcttgtctgggttctatactgtgatctcatttgcctcgactacgatggaaacattttggatgcctgcacatttgctttgctagcggctttaaaaaatgtacagttgcctgaagttactataaatgaagaaactgctttagcagaagttaatttaaagaagaaaagttatttgaatattagaactcatccagttgcaacttcctttgctgtgtttgatgacactttgcttatagttgaccctactggagaggaggaacatctggcaacaggaaccttaacaatagtaatggatgaggaaggcaaactctgttgtcttcacaaaccaggcattgggctaactggagctaaacttcaggactgtatgagccgagcagttacaagacacaaagaagttaaaaaactgatggatgaagtaattaagastatgaaacccaaataaacagccaccacattttcaaaacagatttgtaaaaattgtatttgttaacactgtgcacaaacgttttatactaaataaatatcaaactacattcttctgaaagatgtttctattatttcttaggtcrcttccatatatattatgtatagtgaaaccatttttaaaaagcaatgacttaggcaaaccaaccctagtttgttaaaccatttccctgtttttatttaaaaatgataaggttgtgcttctgtataaagtttgtacatctagcaatgtaaaatactgacacattaaaaaaaacaaaaagtagaaactcaattcttttgattcagtgctcttgtgtttttaaaaaaggaacaaaaagtaatgcaagactcaaaattttggagtggttggcrtgcctctcttcattttactttttgactggctgcctgtatgccgatgatgatgtagctgagctgtttgtgctgctgctgctgccatagccatttgatgctgcaagaatcgcaactgctgcaaa

SEQ ID NO: 344 - DNA, 1718 bp, Homo sapiens
aagtcacaggcagaaaaaagacgcagaaacattggaataacgctccacacgcactgcttgattctgcgctagaaaccctgttatctccgaactgttggtgttattctgagtyacagcaccagctcttttataaagaggragaccygctccttctttaacagcagattcgtcaaaatacgtccaaggcaaggaaacctagaaaggcgtctgggcaggggaaagtcgatgcgagggcgggccagggacctttcgtcgcgtccccaccttggcatttcccgtggcgtgagcggccccggcatccgtgtcgaaagtgcggcggcggaacaggcgcgcaggagaggagcggcgcaggcgcagacgcgcgggcgggaagatggcggctgggttcaaaaccgtggaacctctggagtattacaggagatttctgaaagagaactgccgtcctgatggaagagaacttggtgaattcagaaccacaactgtcaacatcggttcaattagtaccgcagatggttctgctttagtgaagttgggaaatactacagtaatctgtggagttaaagcagaatttgcagcaccatcaacagatgcccctgataaaggatacgttgttcctaatgtggatctaccacccctgtgttcatcgagattccggtctggacctcctggagaagaggcccaagtggctagccarttcattgcagatgtcattgaaaattcacagataattcagaaagaggacttatgcatttctccaggaaagcttgtctgggttctatactgtgatctcatttgcctcgactacgatggaaacattttggatgcctgcacatttgctttgctagcggctttaaaaaatgtacagttgcctgaagttactataaatgaagaaactgctttagcagaagttaatttaaagaagaaaagttatttgaatattagaactcatccagttgcaacttcctttgctgtgtttgatgacactttgcttatagttgaccctactggagaggaggaacatctggcaacaggaaccttaacaatagtaatggatgaggaaggcaaactctgttgtcttcacaaaccaggcattgggctaactggagctaaacttcaggactgtatgagccgagcagttacaagacacaaagaagttaaaaaactgatggatgaagtaattaagastatgaaacccaaataaacagccaccacattttcaaaacagatttgtaaaaattgtatttgttaacactgtgcacaaacgttttatactaaataaatatcaaactacattcttctgaaagatgtttctattatttcttaggtcrcttccatatatattatgtatagtgaaaccatttttaaaaagcaatgacttaggcaaaccaaccctagtttgttaaaccatttccctgtttttatttaaaaatgataaggttgtgcttctgtataaagtttgtacatctagcaatgtaaaatactgacacattaaaaaaaacaaaaagtagaaactcaattcttttgattcagtgctcttgtgtttttaaaaaaggaacaaaaagtaatgcaagactcaaaattttggagtggttggcrtgcctctcttcattttactttttgactggctgcctgtatgccgatgatgatgtagctgagctgtttgtgctgctgctgctgccatagccatttgatgctgcaagaatcgcaactgctgcaaa

SEQ ID NO: 345 - DNA, 967 bp, Homo sapiens
cggaggtgctcatcgctgctgtcatggttagtttgctaaactgcgtcgtcactgtgtccccccagaacatgggcatcggcaagaacgaggacctgccctggccaccgctcaggaatgaattcaggtatttccagagagtgaccacaacctcctcagtagaaggtaaacagaatttggtgattatgggtaggaagatctggttctccattcctgagaagaatcgacctttaaagaatagaattaatttagttctcaggagggaccacaagaacctccacaaggagatcaatttcttgcaagaagtctggatgatgccttaaaacttaataaccagaattagcaaataaagtagacgtgatttggatagttggtggtagttctattttataaggaatccatgaatcactcaagcagtcttaaactatttgtcacaaggatcatacaggactttgaaagtgacacrttttttccagaaattgatttggagaaatataaatttctgccagaatacccaggtgttttctttgatgtccaggaggagaaaggcattaagtacaaatttgaagtacatgagaagaatgattaatatgaaggtgttttctggtttaagttgttccccctccctctgaaaaaagtaggtatttttaaattagaaaaaaaatacttatgttgactttaaatctacggataattatttctaagcaatgtgttcttattccccagtaacctacactatatctgataccatttatgaaacattcttgctgtaactaagtgcctccccaagaccctgactgagtccccagcatgtgctacagtgagctgccattccacaaccttcacatgtggcactcttgccagtccttgacattttcgggcttttcaaatgtcggtagtgtttattaaagatgaagatgcacatacccttccactgagcagtttcactagtgggaaataccaaaaactt

SEQ ID NO: 346 - DNA, 1264 bp, Homo sapiens
agtgcggacvtccagtttcgcagtgggagtcttcattgcgccagtgactaaaaagagaattaaatatgggtgatgttgagaaaggcaagaagatttttattatgaagtgttcccagtgccacactgttgaaaagggaggaaagcacaagattgggccaaatctccatggtcttttcaggtggaagacaggtcaggcccctggatactcttacacagccgccaataagaacaaatgcatcatctggggagaggatacactgatggagtatttggagaatcccaagaagtacatccctggaacaaaaatgatctttgtcagcattaagaagaaggaagaaagggcagacttgatagcttatctcaaaaaagctactaatgagtaataattggccactgccttatttattacaagacagaaatgtctcatgacttttttatgtgtaccatcctttaatggatctcatacaccagaattcagatcatgaatgactgacagaatattttattgggcagtcctgatttaaaactaagcctggcttgtggttaaatgaatatgttcagtttttgaattttaatagtaactccaattcagtaaatgctatcactgtttaccccttttaaagatatgattagacttcattagtaatgttcaacttttcacaaagatgatgagtgccatcttaaaacttatactggagattggttttatatttagatttatataactggttatgtgaatatatttaaatactggggaaattccttcactgtcttagaaccaagcaagattcacatgtgttttgtgttcatttgcctcttaaaggcaagggttgaagataaatatggtagcaatgtctatagttttggtcttaactacgccaatctaattataattccctgtatttaaaatggttccctttacttattgaaaggcattttagtgtggtttatgtgtaatattaaagattattcaacacctctcacatcttaaagatctctaaggtcacatgcttttaaaatagtagcaagttaaacttcactcttgaattctttacaatctaagtcaaactaagttatactttaggattgtctttaaacagccattcagaaatataaaactgtagaactgggtatatgtgattgggaatggtgcttttgccaacttaaaaggattaaggtaacggagatatgcacaaattttaaaattatgtgtgatcacaagactaaagataattaaaaagaaaaccacaaaaaaaaaggttac

SEQ ID NO: 347 - DNA, 630 bp, Homo sapiens
atggacgacaaggaggagatgtaccagctctggaaaatccgcaagaccatcatgcagctgtgccatgaccgtggctacctagtgacctaggacgagcttaaccagacactgaaggagttcaaagtccagtytggggacaagccaagtgaggggcagcggcggcgcacggacctcaccgcgctggtggcccacaaygatgaccccaccgacaagatgtttgtgttctttccagaggagcccaaggtgggcatcaagaccctcaacgtgtactgccggcgcatgcagcaggagaacatcacgcgggtcctcatcatggtgcagcagggcatgacgccctccgccaagtagtgcctggtccacatggctsccaagtacatcctggagcagtttctgcagcagaaattgctcatcgacatcacagagtacgagctagtccctgagtacgttgtcatgaccaaggaggaggtgacagtgctgttggccctatataagctccgagagaaccagctgcccaggatccaggcgggggacgccgtggcgcgctactttgggataaagcatgggcaggtagtgaagatcatccggcccagcgagatggcaggcaggtacctcacctaccggctcatgcag

SEQ ID NO: 348 - DNA, 3789 bp, Homo sapiens
aactcaagccaccgggggtcagagcwgacgcagagtgtccaggcatgctggagtctgctgaacagctgctggtggaggacctgtacaaccgcgtcagggagaagatggatgacaccagcctctataatacgccctgtgtcctggacctacagcgggccctggttcaggatcgccaagaggcgccctggaatgaggtggatgaggtctggcccaatgtcttcatagctgagaagagtgtggctgtgaacaagggsaggctgaagaggctgggaatcacccacattctgaatgctgcgcatggcaccggcgtttacactggccccgaattctacactggcctggagatccagtacctgggtgtagaggtggatgactttcctgaggtggacatttcccagcatttccggaaggcgtctgagttcctggatgaggcgctgctgacttacagagggaaagtcctggtcagcagcgaaatgggcatcagccggtcagcagtgctggtggtcgcctacctgatgatcttccacaacatggccatcctggaggctttgatgaccgtgcgtaagaagcgggccatctaccccaatgasggcttcctgaagcagctgcgggagctcaatgagaagttgatggaggagagagaagaggactatggccgggaggggggatcagctgaggctgaggagggcgagggcactgggagcatgctcggggccagagtgcacgccctgacggtggaagaggaggacgacagcgccagccacctgagtggctcctccctggggaaggccacccaggcctccaagcccctcaccctcatagacgaggaggaggaggagaaactgtacgagcagtggaagaaggggcagggcctcctctcagacaaggtcccccaggatggaggtggctggcgctcagcctcctctggccagggtggggaggagctcgaggacgaggacgtggagaggatcatccaggagtggcagagccgaaacgagaggtaccaagcagaagggtaccggaggtggggaagggaggaggagaaggaggaggagagcgacgctggctcctcggtggggaggcggcggcgcaccctgagcgagagcagcgcctgggagagcgtgagcagccacgacatctgggtcctgaagcagcagctggagctgaaccgcccggaccacggcaggaggcrccgcgcagactcgatgtcctcggagagcacctgggacgcatggaacgagaggctgctggagattgagaaggaggcttcccggaggtaccacgccaagagcaagagagaggaggcgrcagacaggagctcagaagcagggagcagggtgcgggaggatgatgaggacagcgtgggctctgaggccagttccttctacaacttctgcagcaggaacaaggacaagctcactgccctggaaagatggaagatcaagagaatccaatttggatttcacaagaaagacttgggagcgggagacagcagcggtgagcccggtgcagaggaggcagtaggggagaagaacccctccgacgtcagcctgacagcctaccaggcctggaagctgaaacaccagaagaaggtgggcagtgagaacaaggaggaggtggtggagctcagcaagggggaggactcggccttggctaagaagagacaacggaggctggagctgctggagagaagccggcagacgctggaggagagccagtctatggcaagctgggaggcggacagctccacggccagcgggagcattcccctgtctgcgttctggtctgcagacccctcagtcagcgctgatggggacacgacgtcagtactgagcacccagagccaccgctcccacctgtctcaggctgcaagcaacatagcggggtgttcaacctccaaccccaccacacccctgcctaacctgccagtggggcctggagacaccatttccattgccagtatccagaactggattgccaatgtagtcagtgagacccttgctcagaagcaaaatgaaatgctgctgttgtcccgctcaccgtctgttgcaagcatgaaggcagtaccagcggctagctgcctgggggatgaccaagtctccatgcttagtggacacagcagctcctccttgggtggctgcctgttgcctcagagccaggcaagacccagctctgacatgcagtctgtgctgtcctgcaacaccacactgagctcacccgcggaaagttgcagaagcaaagtgagggggaccagcaagcccatcttcagcctytttgctgacaatgtggacctaaaggaacttggccggaaggagaaggagatgcagatggagcttagggagaagatgtctgmgtacmaaatggaaaagctggcctcagacaacaaaygcagctccctcttcaagaagaagaaggtcaaggaagatgaggatgatggtgtgggtgatggggatgaggacacwgacagtgccatagggagcttccgatattcttcccrcagtaattcccagaaacctgaaacagacacatgctcctccctggctgtctgtgatcactatgcaagtggcagcagagttggcaaagagatggatagcagtattaataagtggctcagtggcctcaggacggaggaaaaacctcctttccaaagtgactggtctggaagttccagagggaagtacaccagatcgtccctgctcagggagacagagtctaaatcctccagttacaagttttccaaatcccagtcagaggaacaggacacctcctcctaccacgaggcaaatggcaactctgtaagaagcacttcacggttctcatcttcctccaccagggagggcagagagatgcacaagttctccaggtccacgtacaacgagacctcaagttcccgagaggagagcccagagccctacttcttccgccggaccccagagtcctcagaaagggaagagtccccagaaccacagcgcccaaattgggccaggtccaggractgggaagatgtggaagagtcatccaagtcagacttctctgaatttggagccaagaggaagttcacccagagctttatgaggtctgaagaagagggagagaaagagaggacagaaaacagagaagaagggaggtttgcatctggacggcggtcccagtatcggagaagcamtgacagggaggaagaggaagaaatggacgatgaagccatcattgctgcttggagacgccggcaagaagaaaccaggaccaagctgcagaaaaggagggaggactgagctggggaaaatctgagaacactgaaagaaaccactcacgttagcatagggctcagggcacacgttgccaccactcatcgcaggatgaggatacagagargatcttccagaggggcagagccaaaatgagaggtaccaagcataagggcagcagaggtggagtagggaggaggcaaggagggggagaaccatcaatacgaatacgaggtccgaatgctggaccaactgataccattttctgttgctcagcgccctctaagctttggtgtttcacttaatgtatttgrcagtgttcatcacaggctagagaggtgagcttggaaaagcactgtagtttgtcagagactccagtttacatccagaaaggccatgaacataggacacgcttctgtctgtagaggcttcatatgagacccagaaagtctatcctatggcaagtctgacctctcctggcaatgctcagttctgattttttttttttaatgttttgagtctccattaaaaatggtatgttggc

SEQ ID NO: 349 - DNA, 782 bp, Homo sapiens
atgggtgatgttgagaaaagcaagaagatttttgttcagaagtgtgcccagtgccacaccgtggaaaagggaggcaagcataagacagggcctaatctcttcgggtggaagacaggtcaggccattggattctcttacacagacaccagtaagaacaaaggcatcacctggggagaggatacactgatggagtatttggagaatcccaagaagtacatccctggaacaaaaatgatctttgccrgcattaagaaggaggcagaaagagcagacttgatagcttatctcaaaaaagctactaatgagtaataattggccactgccttatttattacaacacagaaatgtctcgtgacttttttatgtgtaccatactttaatagatctcatacaccagaattcagatcatgaatgactgacagaatattttgttgggcagtcctgatttaaaactaagactgggttgtggttaaatgaatatgttcagtttttgaattgtaatagtaattccaattcagtaaatgctatcactgtttacccctactaaagatagaactagactttgttagtaatgttcaacttttcgcaaagatggtgagtgccatcttaaaacttactggagattggttttatatttagatttatataactggttatgtgaatatatttaaatactggggaaattccttcactgtctcagaaccaaggaaaattcacctgtgttttgtgttcatttgcctcttaaaggcattgttgaagataaataaggtagcaatgtctac

SEQ ID NO: 350 - DNA, 3337 bp, Homo sapiens
gccggaggggtgtgggccggagggccgcggtgtgccgcggggcagttgcgggttgtcataacggtcccygccggagtgaggcgaggccgcgtcgctcagttctggccgtctagggcccctgtaaggatgagagcgcagaggacgcagggccgctggaggcgcaggtaacgaagctagkgtgcggttgggaccgcggctgagctttttccgggacccgtggtgctgaatggagaggacggagacgaagccgagccgcggctcctagcggcggcgccgaygctcgagctgtagctgccaggcgaggatgtgtggagcgcaggcggcgcggggtaaatgagaggtctcgggccccaggacccccggggcccgggatgagttagcgagggcagccgcgggggccagttccgaccgtgacaggccaaggcgacggccgccgcccgcccgccccttccgtgcagaagcagctgctcctttccgcgcccgcccgcctgcgctcccggccctggagaccatgaggttccgcatctacaaacggaaggtgctaatcctgacgctcgtggtggccgcctgcggcttcgtcctctggagcagcaatgggcgacaaaggaagaacgaggccctcgccccaccgttgctggacgccgaacccgcgcggggtgccggcggccgcggtggggaccacccctctgtggctgtgggcatccgcagggtctccaacgtgtcggcggcttccctggtcccggcggtcccccagcccgaggcggacaacctkacgctgcggtaccggtccctggtgtaccagctgaactttgatcagaccctgaggaatgtagataaggctggcacctgggccccccgggagctggtgctggtggtccaggtgcataaccggcccgaatacctcagactgctgctggactcacttcgaaaagcccagggaattgacaacgtcctcgtcatctttagccatgacttctggtcgaccgagatcaatcagctgatcgccggggtgaatttctgtccggttctgcaggtgttctttcctttcagcattcagttgtaccctaacgagtttccaggtagtgaccctagagattgtcccagagacctgccgaagaatgccgctttgaaattggggtgcatcaatgctgagtatcccgactccttcggccattatagagaggccaaattctcccagaccaaacatcactggtggtggaagctgcattttgtgtgggaaagagtgaaaattcttcgagattatgctggccttatacttttcctagaagaggatcrctacttagccccagacttttaccatgtcttcaaaaagatgtggaaactgaagcagcaagagtgccctgaatgtgatgttctctycctggggacctatagtgccagtcgcagtttctatggcatggctgacaaggtagatgtgaaaacttggaaatccacagagcacratatgggtctagccttgacccggaatgcctatcagaagctgatcgagtgcacagacactttctgwacttatgatgattataactgggactggactcttcaatacttgactgtatcttgtcttccaaaattctggaaagtgctggttcctcaaattcctaggatctttcatgctggagactgtggtatgcatcacaagaaaacctgtagaccatccactcagagtgcccaaattgagtcactyttaaataataacaaacaatacatgtttccagaaactctaactatcagtgaaaagtttactgtggtagccatttccccacctagaaaaaatggagggtggggagatattagggaccatgwactctgtaaaagttatagaagactgcagtgaaaatcacagttacaaaagcgacagtcttctatttttgatatttgtccaaacaggacatacaattgaataaaagagtttaggaactggtttctgctttaatacaaaaacaaaatcttgtaaaaggtgtccaaatacatagtaatcttttccagttatgtctgattaagatttaaaactgaaggtttcattttgggagtagggttttaaagctcaatctgttatctgctaaaattgattattgttgatatgagagaagaggggaaattttatttaaattgcatttattaatctttttatctgaaactttgtacacttttccactttcaaaacctattttaagtacagcaaaatttatttaaaactgtsatagcagtaaaaagtattacgatgaaattgttagggtattaatggaacaaacccagtttcactctcttgacacacttattaggaagggattgcttcactggtttaataatttaaaagttatgtttgttaaacaccctgtcagaacagtcattttcagtattagattcctgtactattgtgttttgagtgtgttttggaaccttcatagaacacactttcttttggaatgtatttgattgataagaaagtttaaacattgttttcacctcaatgtagaaatacagtggttttgtttttttttttcttttagtgctgacaaaataaaatactcatttttgcataaaaaggttcctaatccttttgcagaataagttttgtttactctttataccaaaattcagtgaaggcattctacaagttttgagttagcattacattttaatatttactattgctacattgtataattgagtttgaaataaaacccagcttatgacaatgcattccctgtgcaagaaactgtttggctttcaaattacccaggcattgaaaatgaatgataaaaagttgctgtgtaagggaaatacagcctaaattgtttttgaaagccagaaatgatacaaagttcagtcatgccaaagtgaaatactttctagtgccagctttaacttaaatcatacgttttaaaaggacagatacagaaaattataggaaacaggcttaaattttgctccatatttaatgtagacrtttatagaagtttcccttaatttgtaattgcattcaaccgagaatttctcataaaagactaatttctgtgtaaagatattacgggctgggtgtggtggctcatgtctgtaatcccagcactctgggaggttgaggcaggcagattgcttgaactcargagtttgagaccagcctgggcaacatggcgaaaacccatctctactaaaaatacaaaaaattagccgggtgtagtggtgcatctgtagtcccagctacttgagaggctgaggtgggaggatcctttgagtctcgaggcagaggttgcagtgagcctagagcgtgccactgcacgccagcctgagcaacagagcaaggctccatctaaag

SEQ ID NO: 351 - DNA, 1741 bp, Homo sapiens
agagaggcgaacctggattgggaaagtcgacattaatcaactcattattccttacagatttgtatgctccagagtatccaggtccttctcatagaattaaaaagactatacaggtggacaatccaaagttttaatcaaagaaggtggtgttcagttgctgctcacaatagctgacaccccaggatttggagatgtagtggataatagtaattgctggcagcctcttatcgattacattgatagtaaatctgaggactacctaaatgcagaatcacgagtgaacagacgtcagatgcctaatagcagggtgcagtgttgtttatacttcattgctccttcaggacatgaacttaaaccattggatattgagtttatgaagcrttcrcatgaaaaagtgattatcatccaacttattgccaaagcagacacacttataccagaggaatgccaacagtttaaaaaacagataatgaaagaaatccaagaacataaaattaagatatatgattttccagaaatagatgatgaagaagaaaataaacttgctaaaaaggtaaaggactgtttacctcttgctgtggtaagctagtaatactatcattgaagttaatggcaaaagggtcaaaggaaggcagtatccttggggtgctgctgaagttgaaaatggtgaacattgtgattttacaattctaagaaatatgctgataaaaacacacactcaggacttgaaagatgttactaataatgtccactatragaactacagaagcagaaaactggcagctgtgacttataatggagttgataacaacaagaataaagggcagctgactaagagccctctggcacaaatggaagaagaaagaagggagtatgcagctaaaatgaagaagatagagatggagatggagcaggtgttagagatgaaggtcaaataaaaagttcaaaaactaaaggactctgaagctgagctccagtggcgccgtgagctaatgaaaaagaatttggaagcacagcacaaagaattagaggaaaaacgtcgtcagtttgaggatgagaaggcaaactgggaagctcaacaacatattttagaacagaactcttcgagaaccttggaaaagaacaagaagaaagggaagatcttttaaactctctattgaccaccagttacgtattagttgccaatatgccagcttggacatcagtgtttgttggatccgtttgaccaatatgcaccagtttcatccataatgatggatttaacagcgtgacaaaaattattttttcttgtttttcttgatggagattaagatgccttgaattgtctagggtgttgtgtacttagaaagtaacagctctaagtacctttcctacattttctttttcttttttttattaaacagatatcttcagtttaatacaggagaacattttactgttgtacaatcatgttctcgtggtttgattgtttacagcctattccaaaataaaaggactgtggaaggttaaaaaaaaaaawtagttaagggccaggagcagtggctcacacctgtaatcccagcactttggaaggccaaggcaggcagatcacttgaggtcaggagttcgagaccagcctggccaacatggcaaaatcctgtctccactaaaaatacaaaagttggccgggcatggtggcacgtgcctgtaatcccagttacttgggaggctgaggcaggagaatcacttgaacctgggaagc

SEQ ID NO: 352 - DNA, 780 bp, Homo sapiens
caggcttcggcccggccgccgccgcccatcagctatggaggagctttacaacttcccggcctgcagagccgggcgcagcaagggccagacgcggcgcgagctggcgctgcgagccaacgggccggcgcctggcgggcacgatcgcaagatttgtatgctccagagtatccaggacatgaacttaaaccattggatattgagtttatgaagcrttcrcatgaaaaagtgattatcatccaacttattgccaaagcagacacacttataccagaggaatgccaacagtttaaaaaacagataatgaaagaaatccaagaacataaaattaagatatatgattttccagaaatagatgatgaagaagaaaataaacttgctaaaaaggacttgaaagatgttactaataatgtccactatragaactacagaagcagaaaactggcagctgtgacttataatggagttgataacaacaagaataaagggcagctgactaagagccctctggcacaaatggaagaagaaagaagggagtatgcagctaaaatgaagaagatagagatggagatggagcaggtgttagagatgaaggactctgaagctgagctccagtggcgccgtgagctaatgaaaaagaatttggaagcacagcacaaagaattagaggaaaaacgtcgtcagtttgaggatgagaaggcaaactgggaagctcaacaacatattttagaacagaactcttcgagaaccttggaaaagaacaagaagaaagggaagatcttt

SEQ ID NO: 353 - DNA, 3663 bp, Homo sapiens
agcaaccacagggcctgggactggggggttcccagatccttgaagctcactccgcctcctcactctcactgcatttcccaccttcctgtgggccttgcggcatcttcatcactgaggcacctggttackcttcacctcttgtttcctgccctcactgcattccctcacctctacctttttatccttccaccctaggcttctctcctccctcttccctcactcctgactcttcctcttcccagcggacggctggaggaccgctcagtctctcctctctcacttcccttcctctctctcaccttcaccacccaacacctccctccctgcctctttctttctgctccctcattctctccccaccactctcttctcgtggcccccttgccygcgcgccctcttcccttccccttgcctcactctctcagctttcttcccacagttgagctcgggcagctctttctggggatagctatgggrctttgggggaagaaagggacagtggctccccatgaccagagtccaagacgaagacctaaaaargggcttatcaagaaaaaaatggtgaagagggaaaaacagaagcgcaatatggaggaactgaagaaggaagtggtcatggatgatcacaaattaaccttggaagagctgagcaccaagtactccrtggacctgacaaagggccatagccaccaaagggcaaaggaaatcctgactcgagrtggacccaatactgttaccccaccccccaccactccagaatgggtcaaattctgtaagcaactgttcggaggcttctccctcctactatggactggggccattctctgctttgtggcctacagcatccagatatatttcaatgaggagcctaccaaagacaacctctacctgagcatcgtactgtccgtcgtggtcatcrtcactggctgcttctcctattatcaggaggccaagagctccaagatcatggagtcttttaagaacatggtgcctcagcaagctctggtaattcgaggaggagagaagatgcaaattaatgtacaagaggtggtgttgggagacctggtggaaatcaagggtggagaccgagtccctgctgacctccggcttatctctgcacaaggatgtaaggtggacaactcatccttgactggggagtcagaaccccagagccgctcccctgacttcacccatgagaaccctctrgagacccgaaacatctgcttcttttccaccaactgtgtggaaggaaccgcccggggtattgtgattgctacgggagactccacagtgatgggcagaattgcctccctgacgtcaggcctggcggttggccagacacctatcgctgctgagatcraacacttcatccatctgatcactgtggtggccgtcttccttggtgtcactttttttgcgctctcacttctcttgggctatggttggctggaggctatcatttttctcattggcatcattgtggccaatgtgcctgaggggctgttggcyacagtcactgtgtgcctgaccctcacagccaagcgcatggcrcggaagaactgcctggtgaagaacctggaggcggtggagacgctgggctccacgtccaccatctgctcagacaagacgggcaccctcacccagaaccgcatgaccgtcgcccacatgtggtttgatatgaccgtgtatgaggccgacaccactgaagaacagactggaaaaacatttaccaagagctctgatacctggtttatgctggcccgaatcgctggcctctgcaaccgggctgactttaaggctaatcaggagatcctgcccattgctaagagggccacaacaggtgatgcttccgagtcagccctcctcaagttcatcgagcagtcttacagctctgtggcggagatgagagagaaaaaccccaaggtggcagagattccctttaattctaccaacaagtaccagatgtccatccaccttcgggaggacagctcccagacccacgtactgatgatgaagggtgctccggagaggatcttggagttttgttctacctttcttctgaatgggcaggagtactcaatgaacgatgaaatgaaggaagccttccaaaatgcctayttagaactgggaggtctgggggaacgtgtgctaggcttctgcttcttgaatctgcctagcagcttctccaagggattcccatttaatacagatgaaataaatttccccatggacaacctttgttttgtgggcctcatatccatgattgaccctccccgagctgcagtgcctgatgctgtgagcaagtgtcgmagtgcaggaattaaggtgatcatggtaacaggagatcatcccattacagctaaggccattgccaagggtgtgggcatcatctcagaaggcactgagacggcagaggaagtcgctgcccggcttaagatccctatcagcaaggtcgatgccagtgctgccaaagccattgtggtgcatggtgcagaactgaaggacatacagtccaagcagcttgatcagatcctccagaaccaccctgagatcgtgtttgctcggacctcccctcagcagaagctcatcattgtcgagggatgtcagaggctgggagccgttgtggccgtgacaggtgacggggtgaacgactcccctgcgctgaagaaggctgacattggcattgccatgggcatctctggctctgacgtctctaagcaggcagccgacatgatcctgctggatgacaactttgcctccatcgtcacgggggtggaggagggccgcctgatctttgacaacctgaagaaatccatcatgtacaccctgaccagcaacatccccgagatcacgcccttcctgatgttcatcatcctcggtatacccctgcctctgggaaccataaccatcctctgcattgatctcggcactgacatggtccctgccatctccttggcttatgagtcagctgaaagcgacatcatgaagaggcttccaaggaacccaaagacggataatctggtgaaccaccgtctcattggcatggcctatggacagattgggatgatccaggctctggctggattctttacctactttgtaatcctggctgagaatggttttaggcctgttgatctgctgggcatccgcctccactgggaagataaatacttgaatgacctggaggacagctacggacagcagtggacctatgagcaacgaaaagttgtggagttcacatgccaaacrgccttttttgtcaccatcgtggttgtgcagtgggcggatctcatcatctccaagactcgccgcaactcacttttccagcagggcatgagaaacaaagtcttaatatttgggatcctggaggagacactcttggctgcatttctgtcctacactccaggcatggacgtggccctgygaatgtacccactcaagataacctggtggctctgtgccattccctacagtattctcatcttcgtctatgatgaaatcagaaaactcctcatccgtcagcacccggatggctgggtggaaagggagacgtactactaaactcagcagatgaagagcttcatgtgacacaggggtgttgtgagagctgggatggggccagagattataagtttgacacaacatctgagacactaggatgaa

SEQ ID NO: 354 - DNA, 1512 bp, Homo sapiens
atggggctaaaagctctctgtttggggctgctttgtgttctttttgtctctcatttttacacacccatgccagacaacattgaagaaagctggaaaataatggccttggatgccatcgctaaaacttgtacatttacggctatgtgttttgaaaatatgcgtattatgagatatgaagagtttatatccatgatattcaggctggattatacccaaccactttcagatgaatacatcacagtgactgatacaacatttgttgacattccagtacgattgtacttgccaaaaagaaagtcagaaacccgaaggcgagctgtgatatattttsatggtggtggtttttgttttggaagttccaaacagagggcttttgacttcctgaatagatggacggcaaacacgcttgatgctgttgttgtaggcgtggactataggctggctcctcaacaccactttcctgctcagtttgaagatggccttgctgcagtcaaattttttcttttggaaaaaattcttacaaaatatggagtggatcccacccgaatctgcattkcgggagacagttctgggggcaatttagcaacagcggtcactcaacagaatattaccatatattttcaggtgcagaatgatgctgaaataaaacataaaatcaagatgcaagtcttactttaccctggcttacagataacagattcttatttgccatctcaccgagaaaatgagcatggtatagttttgaccagggatgtagccataaaactcgtgagcttatatttcaccaaggatgaagcayttccctgggcaatgagaagaaaccaacacatgcctctggagtcaagacatctgtttaagtttgttaactggagtattcttcttcctgagaagtatagaaaagactatgtatatactgaaccaattcttggaggacttagttattcattgccaggacttacagacagcagagcattacccttgttggccaatgattctcagttacagaatttgccactaacctatattcttacttgtcaacatgatctcwtaagagatgatggacttatgtatgttacaagacttcgaaatgttggagtccaagttgttcatgaacatattgaggatggaattcatggagctttatcattcatgacttcaccattttatttacgtctaggtcttaggataagagatatgtatgtaagttggctggataagaatttataaatatgtgatgtgtatgtatagcccttacatagtggattgtaatttgtgrtawtttgtggttttggagcaaagaacaatgtcatttgagttatctaaatctacatttgcaacatttgtagcagttaatgtgtgtccttgaagagttattaaattttctgacttgcagaccctgaatatgtaaaatgtatgtaatcctgcctattttctccttacttataatttattataattatgttggttctaataagaaccaatgcttattaaagttgagaaataagagtggtt

SEQ ID NO: 355 - DNA, 788 bp, Homo sapiens
tggtaaaggctgatacttcccaggacgcggaggcacgtaaaaaaatttgaagaagggaatttcgcggcattcttggcctggcttcctggcgtagccagcaagttcggaggtgttaaccgctgctgtcatgtttcttttgctaaactgcatcgtcgctgtgtcccaaaacatgggcatcggcaagaacggggacctgcccaggccgccgctcaggaatgaattcaggtatttccagagaatgaccacaacttcttcagtagagggtaaacagaatctggtgattatgggtaggaagacctggttctccattcctgagaagaatcgacctttaaaggatagaattaatttagttctcagcagagaactcaaggaasctccacaaggagctcattttcttgccagaagtttggatgatgccttaaaacttactgaacgaccagaattagcaaataaagtagacatgatttggatagttggtggcagttctgtttataaggaagccatgaatcacctaggccatcttaaactatttgtgacaaggatcatgcaggactttgaaagtgacacgtttttttcagaaattgacttggagaaatataaacttctgcctgaatacccaggtrttctctctgatgtccaggaggggaaacacatcaagtacaaatttgaagtatgtgagaaggatgattaatatgaaggtgttttctggtttaagttgttccccctccctctgagaaaagtatgcatttttacattagaaaagggacttttgttgacttcagatctat

SEQ ID NO: 356 - DNA, 835 bp, Homo sapiens
ggcgtagctttgggcggccggaccttagaaagtcacacatctgcsygcctgtgmggcccctgcttctgcggatgctgaggcacgtaaaaaaatttgaagaagggaatttcgcggcattcttggcctggcttcctggcgtagccagcaagttcggaggtgttaaccgctgctgtcatgtttcttttgctaaactgcatcgtcgctgtgtcccaaaacatgggcatcggcaagaacggggacctgcccaggccgccgctcaggaatgaattcaggtatttccagagaatgaccacaacttcttcagtagagggtaaacagaatctggtgattatgggtaggaagacctggttctccattcctgagaagaatcgacctttaaaggatagaattaatttagttctcagcagagaactcaaggaasctccacaaggagctcattttcttgccagaagtttggatgatgccttaaaacttactgaacgaccagaattagcaaataaagtagacatgatttggatagttggtggcagttctgtttataaggaagccatgaatcacctaggccatcttaaactatttgtgacaaggatcatgcaggactttgaaagtgacacgtttttttcagaaattgacttggagaaatataaacttctgcctgaatacccaggtrttctctctgatgtccaggaggggaaacacatcaagtacaaatttgaagtatgtgagaaggatgattaatatgaaggtgttttctggtttaagttgttccccctccctctgagaaaagtatgcatttttacattagaaaagggacttttgttgacttcagatctat

SEQ ID NO: 357 - DNA, 1535 bp, Homo sapiens
gcgggtgtttgtcgcttcgcggggccttgcggcagcatggcgraccatctgatcagtggcggcaccggctacgtgccccaggactggctcaccgtgcagcagctcttcctcggcgccaactgccgcacccacaacaacttcctgattctcccatggttcatagatttcatagctgatgaggtagacctaacttcagccctgacccggaagatcatgctgaagacaccactgatctcttcccctatggacactgagacagaggccgacatggccatcgcratggctctgatgggaggtattggtttcattcaccacaactgcaccccagagttccaggccaacgaggtgcataaggtcaagaagtttgaacagggcttcatcacggaccccgtggtgctgagcccctcacacactgtgggtgatgtgctggaggccaagatccggcatggcttctcttgcatcctcatcactgagatgggcaccatgggsagcaagttggtgggcatcatctcctcccgagacatcaactttcttgctgagaaggaccacaccaccctcctcagtgaggtgatgacgccaaggatcaagctgatggtggctccagcaggcatgacattgaaasaggcaaatgagatccttcagcctagcargggaagctgcctrtggtcaatgatcgccatgagctagtggccatcgtctcccacaccaacctgaagaagaatcgagactacattctggcctycaaggattcccacaagcagctgctgtgcagggcagctgtgggcacccatgaggatgamaaatactgcctggacctgctcacctgggtaggcatcaacgtcatagtcttggactcctcccaagggaactcggtgtatcaaatcaccatggtgcattacatcaaacagaagtacctccacctccaggtgattgggaggaatgtggtgacagcagcccaggctaagaacctgaytgacactggtgtggatggactgcatgtagttatgggctrcagctctatctgcatcacccaggaagtgatggcctgcggtcagccccagggcactgctgtgtacaaggtggccaagtacgctcagcactttggtgtgtccatcatagccgatgtggcatccagaccgtggggcacgtggtcaaggccctggcccttggagcctccacagtgatgatgggctccctgctggccaccaccacggaggcccagcrgcgagtacttcttctcagacagggtgcagctcaagaagtactggggcatgggctcgctagatgccatggagaagagcagcagcagccagaaacgatacttcagcgagggggaaaaggtgaatattgtgcagggtgtctcggcctccatccaggacaaagggtccattcagaagtttgtgccctacctcatagcgagtaaccagcatggctccatgatgtactcagragagctcaaatttgagaagtggaccatgtcagcccagatcgagggtggcgtccatggcctgcacgcttaccagaagcagctgtac

SEQ ID NO: 358 - DNA, 1074 bp, Homo sapiens
cttcggtaacccgggcaacgcggcctcctggaggtaggaaggggcgctgcccccgaaacacaaatgtctccgccaagaccccagacggttcccaaaggctctccgtgatgcaactgcacgtccctcgaatgcctgggcctccgatatccgtccgccagsagcttggctggatgcacgggcggccagtcctcttatttccccgccctcccgccgcgtggagcggctgctgggtyccgagcctccgggcgggggcgggatcggggcggggcggaggcatctccctcccagcaccgcccccttagctgccccgagccctgcctgcgcccgcccccgaagcggcgcgggacgcctggcgcygtccgcgatccgcagggctgcccgcttaggcttaggcccggcccgctggcaaagccgagccgcagcattttatttcgttcgtggtttccgcacaggctggagtttcgtgggttgggtcgtacttgggacctcggcgaagaggacccgtttatttttttttctttccaaaatggcagcctccagtcgcgcacaagtgttakctctgtaccgggcgatgctgagagagagcaagcgtttcagcgcctacaattacagaacatatgctgtcaggaggataagagatgccttcagagaaaataaaaatgtaaaggatcctgtagaaattcaaaccctagtgaataaagccaagagagaccttggagtaattcgtcgacagggtgtctttttggccacccacagtctccctcctgaaggaatgaaccatgaaaggaatatggaaatctgatggggatcgtgacatattaaccctcatggagttgtgatactcttcatatcacgtctctctcccacttgaagatttggactccaagccccacccacccaggtgcacatggatcccagcttcacggttccaccagtgaggaagcccacagccacttttccagctgccagacatgcatgccataaaggcagtgctcacactgaaatctcacccacaacacttacctgctcaccctgctttccactcattcttcagagggtggcttcttcagtcac

SEQ ID NO: 359 - DNA, 1804 bp, Homo sapiens
cttcggtaacccgggcaacgcggcctcctggaggtaggaaggggcgctgcccccgaaacacaaatgtctccgccaagaccccagacggttcccaaaggctctccgtgatgcaactgcacgtccctcgaatgcctgggcctccgatatccgtccgccagsagcttggctggatgcacgggcggccagtcctcttatttccccgccctcccgccgcgtggagcggctgctgggtyccgagcctccgggcgggggcgggatcggggcggggcggaggcatctccctcccagcaccgcccccttagctgccccgagccctgcctgcgcccgcccccgaagcggcgcgggacgcctggcgcygtccgcgatccgcagggctgcccgcttaggcttaggcccggcccgctggcaaagccgagccgcagcattttatttcgttcgtggtttccgcacaggctggagtttcgtgggttgggtcgtacttgggacctcggcgaagaggacccgtttatttttttttctttccaaaatggcagcctccagtcgcgcacaagtgttakctctgtaccgggcgatgctgagagagagcaagcgtttcagcgcctacaattacagaacatatgctgtcaggaggataagagatgccttcagagaaaataaaaatgtaaaggatcctgtagaaattcaaaccctagtgaataaagccaagagagaccttggagtaattcgtcgacaggtccacattggccaactgtattcaactgacaagctgatcattgagaatcgagacatgcccaggacctagcaagccggggaccagccaccagtggcggccagggaccaccttcagcatccactctctgtttgagmtgggggctcccaaaaccagcttacaatagccttttgcgctgcctgtcctgtgggagctgataaaccaagtcacatttgcattctgttgcaggcttagtgaaaaaggactgctgtctttccttggttcaagtgttagaatggagagctggagttcgttcagaatagtgctgtgtgttaccacgtctcccctgcaccccattcctaccttgtagctcatgaccattgtgtatagcatttctacactttgtttcttggtccttggcaataaaaagaatgatctccctgagcctttgaccccagataaacccctcccaattaatgcattttcatttcctactgatacaaggcctggagagggctgttgggggccctcagggagggttcaactctgagacgagaactgccttggtgaaggcaagttcaagcaccacttgagactgggggcagcatggagtagggcagggctacggggrtacacggtgcaccctgcaacttatacctgagcccagtacaacaaaggtgacgggtgtgtaggtacacacccagagatggagcactgcagatcagcaacctcagccccacctgggaatttgctggaaatgcaggctcaagcccctccccacaccyggtgaatgagagagccccagcctgacccaagcccagggcgactcccataccctgaagcctggggcatgctgggcagcaccggtgcccaaatctggctggtggacagaagcacctggagagttggagagctttttaaaaagacatctctcagcacttccctctctgcagattctgactcagtaagtgaggggtgaggcacagtcatttttctctattctgaagctctcccastgttttcaatgtttaaccaactggggacccctgctctttaagtatattacaggtaataaagatattgtttgtatgcttt

SEQ ID NO: 360 - DNA, 1970 bp, Homo sapiens
cttcggtaacccgggcaacgcggcctcctggaggtaggaaggggcgctgcccccgaaacacaaatgtctccgccaagaccccagacggttcccaaaggctctccgtgatgcaactgcacgtccctcgaatgcctgggcctccgatatccgtccgccagsagcttggctggatgcacgggcggccagtcctcttatttccccgccctcccgccgcgtggagcggctgctgggtyccgagcctccgggcgggggcgggatcggggcggggcggaggcatctccctcccagcaccgcccccttagctgccccgagccctgcctgcgcccgcccccgaagcggcgcgggacgcctggcgcygtccgcgatccgcagggctgcccgcttaggcttaggcccggcccgctggcaaagccgagccgcagcattttatttcgttcgtggtttccgcacaggctggagtttcgtgggttgggtcgtacttgggacctcggcgaagaggacccgtttatttttttttctttccaaaatggcagcctccagtcgcgcacaagtgttakctctgtaccgggcgatgctgagagagagcaagcgtttcagcgcctacaattacagaacatatgctgtcaggaggataagagatgccttcagagaaaataaaaatgtaaaggatcctgtagaaattcaaaccctagtgaataaagccaagagagaccttggagtaattcgtcgacaggtccacattggccaactgtattcaactgacaagctgatcattgagaatcgagacatgcccaggacctagcaagccggggaccagccaccagtggcggccagggaccaccttcagcatccactctctgtttgagmtgggggctcccaaaaccagcttacaatagccttttgcgctgcctgtcctgtgggagctgataaaccaagtcacatttgcattctgttgcaggcttagtgaaaaaggactgctgtctttccttggttcaagtgttagaatggagagctggagttcgttcagaatagtgctgtgtgttaccacgtctcccctgcaccccattcctaccttgtagctcatgaccattgtgtatagcatttctacactttgtttcttggtccttggcaataaaaagaatgatctccctgagcctttgaccccagataaacccctcccaattaatgcattttcatttcctactgatacaaggcctggagagggctgttgggggccctcagggagggttcaactctgagacgagaactgccttggtgaaggcaagttcaagcaccacttgagactgggggcagcatggagtagggcagggctacggggrtacacggtgcaccctgcaacttatacctgagcccagtacaacaaaggtgacgggtgtgtaggtacacacccagagatggagcactgcagatcagcaacctcagccccacctgggaatttgctggaaatgcaggctcaagcccctccccacaccyggtgaatgagagagccccagcctgacccaagcccagggcgactcccataccctgaagcctggggcatgctgggcagcaccggtgcccaaatctggctggtggacagaagcacctggagagttggagagctttttaaaaagacatctctcagcacttccctctctgcagattctgactcaattaaagaatatctcctccaggtgtggtggctcacacctgtaatcccagcactttgggaagccgaggtggatggaccacgatgtcaggagttcaagaccagcctggccaacatggtgaaaccccatctctcctaaagatacaaaaaaaattagccaggcgtggcagtgggcgcctgtaatcccagctactcaggagactgaggcagagaattgcttgaagccagaggcagaggttgcaatgagccgggatcacgccactgaactccagcctgggtgacagagtgagactcttgtctc

SEQ ID NO: 361 - DNA, 487 bp, Homo sapiens
tgtggtgcgcacaattaccatcctttacctgtagccctggagagaggaaaatgtatttacttatgggatgtagaaggcagaaaatattttgactttctgagggaatgtgggtccacatacggtggcaatccactaggctgccaagtgacaattgcagcccttgaggttttagaagaagaaaaccttgctgaaaatacagaaaaaaaatgggtattatcttgagaaatgaacccatgaagctaccttctgatgttgtaactgccaaaccaaagattgtgatgcttgraaggtgtgtctacgacttyaagattatggacttctggccaagccaacctgtggcgacatcatcaggtttcacctctgctggtggtcaaggrggatgagattcgagagtccagtgaactcattaacaaggccatcttatcattctgagggtagcagctgttttcaatggtycctgggagccggctggagacaggtggtcctg

SEQ ID NO: 362 - DNA, 1362 bp, Homo sapiens
atagtcgatctgtggtttttctacttgaaggacacaatgttttccaaactagcacctttgcagaggtttgctgtacttagtcgtggagctcattcttcagtggcttctgctacatctgttgcaactaaaaaaacagtccaaggccctccaacctctgactacatttttgaaagggaatctaagtgtggtgcgcacaattaccatcctttacctgtagccctggagagaggaaaatgtatttacttatgggatgtagaaggcagaaaatattttgactttctgagttcttacagtgctgtcaaccaagggcattgtcaccccaagattgtgaatgcactaaagagtcaagggaagaaattgaccttaacctctagagctttctataataacgtacttggtgaatatgaggagtatattactaaacttttcaactaccacaaagttcttcctatgaatacaggaatggaagctggagagactgcctgtaaactagctcataagtggggctatactgtgaagggcattcagaaatacaaagcaaaggttatttccgcagctggaaacttttggggtaggacgttttctgctatctccagttccacagacctgacgagttatgatggttttggaccgtttatgcctggcttcgacgtcattccctgcaatgatctgcctgcactggagagtgcttttcagaatccaaatgtggctgcattcatggtagaaccaattcagggtgaagcaggtgttgttccagatccaggttacttaatgggagtgcgagagctctgcaccaggcaccaggatctgtatattgctgatgaaatacagtcaggataggccagaactggtagatggctggctgttgatcatgaaaatgtcagacctgatatagtcctccttggaaaggccctttctgggggctgatactctgtgtctgcagtgctgtgggacgatgacataatgctgaccattaagccaggggaatgtgggtccacatacggtggcaatccactaggctgccaagtgacaattgcagcccttgaggttttagaagaagaaaaccttgctgaaaatacagaaaaaaaatgggtattatcttgagaaatgaacccatgaagctaccttctgatgttgtaactgccgtaagaggaaagaaaggaattattaaacgctattgttattaaagaaaccaaagattgtgatgcttgraaggtgtgtctacgacttyaagattatggacttctggccaagccaacctgtggcgacatcatcaggtttcacctctgctggtggtcaaggrggatgagattcgagagtccagtgaactcattaacaaggccatcttatcattctgagggt

SEQ ID NO: 363 - DNA, 924 bp, Homo sapiens
atgttttccaaactagcacctttgcagaggtttgctgtacttagtcgtggagctcattcttcaaaaacagtccaaggccctccaacctctgactacatttttgaaagggaatctaagtgtggtgcgcacaattaccatcctttacctgtagccctggagagaggaaaatgtatttacttatgggatgtagaaggcagaaaatattttgactttctgagttcttacagtgctgtcaaccaagggcattgtcaccccaagattgtgaatgcactaaagagtcaagggaagaaattgaccttaacctctagagctttctataataacgtacttggtgaatatgaggagtatattactaaacttttcaactaccacaaagttcttcctatgaatacaggaatggaagctggagagactgcctgtaaactagctcataagtggggctatactgtgaagggcattcagaaatacaaagcaaaggttatttccgcagctggaaacttttggggtaggacgttttctgctatctccagttccacagacctgacgagttatgatggttttggaccgtttatgcctggcttcgacgtcattccctgcaatgatctgcctgcactggagagtgcttttcagaatccaaatgtggctgcattcatggtagaaccaattcagggtgaagcaggtgttgttccagatccagtgctgtgggacgatgacataatgctgaccattaagccaggggaatgtgggtccacatacggtggcaatccactaggctgccaagtgacaattgcagcccttgaggttttagaagaagaaaaccttgctgaaaatacagaaaaaaaatgggtttcacctctgctggtggtcaaggrggatgagattcgagagtccagtgaactcattaacaaggccatcttatcattc

SEQ ID NO: 364 - DNA, 1083 bp, Homo sapiens
tgacagaaagaaacaacaactggaaaagaagcattgcataagaccaggatgtctctgaaatggatgtcagtctttctgctgatgcagctcagttgttactttagctctgggagttgtggaaaggtgctggtgtggcccacagaatacagccattggataaatatgaagacaatcctggaagagcttgttcagaggggtcatgaggtgattgtgttgacatcttcggcttctaytcttgtcaatgccagtaaatcatctgctattaaattagaagtttatcctacatctttaactaaaaatkatttggaagatttttttatgaaaatgttcgatagatggacatatagtatttcaaaaaatacattttggtcatatttttcacaactacaagaattgtgttgggaatattctgactataatataaagctctgtgaagatgcagttttgaacaagaaacttatgagaaaactacaagagtcaaaatttgatgtccttctggcagatgccgttaatccctgtggtgagctgctggctgarctacttaacataccctttctgtacagtctccgcttctctgttggctacacagttgagaagaatggtggaggatttctgttccctccttcctatgtacctgttgttatgtcagaattaagtgatcaaatgattttcatggagaggataaaaaatatgatatatatgctttattttgacttttggtttcaagcatatgatctgaagaagtgggaccagttttatagtgaagttctaggaggttctatggagatttgatggcaagaagccaaatactttaggttccaatactcgactgtataagtggttaccccagaatgaccttcttggtcatcccaaaaccaaagcttttataactcatggtggaaccaatggcatctatgaggcratctaccatgggatccctatggtgggcattcccttgtttgcggatcaacatgataacattgctcacatgaaagccaagggagcagccctcagtgtggacatcaggaccatgtcaagtagagatttgctcaatgcattgaagtcagtcattaatgaccctat

SEQ ID NO: 365 - DNA, 1714 bp, Homo sapiens
tgacagaaagaaacaacaactggaaaagaagcattgcataagaccaggatgtctctgaaatggatgtcagtctttctgctgatgcagctcagttgttactttagctctgggagttgtggaaaggtgctggtgtggcccacagaatacagccattggataaatatgaagacaatcctggaagagcttgttcagaggggtcatgaggtgattgtgttgacatcttcggcttctaytcttgtcaatgccagtaaatcatctgctattaaattagaagtttatcctacatctttaactaaaaatkatttggaagatttttttatgaaaatgttcgatagatggacatatagtatttcaaaaaatacattttggtcatatttttcacaactacaagaattgtgttgggaatattctgactataatataaagctctgtgaagatgcagttttgaacaagaaacttatgagaaaactacaagagtcaaaatttgatgtccttctggcagatgccgttaatccctgtggtgagctgctggctgarctacttaacataccctttctgtacagtctccgcttctctgttggctacacagttgagaagaatggtggaggatttctgttccctccttcctatgtacctgttgttatgtcagaattaagtgatcaaatgattttcatggagaggataaaaaatatgatatatatgctttattttgacttttggtttcaagcatatgatctgaagaagtgggaccagttttatagtgaagttctaggaggttctatggagatttgatggcaagaagccaaatactttaggttccaatactcgactgtataagtggttaccccagaatgaccttcttggtcatcccaaaaccaaagcttttataactcatggtggaaccaatggcatctatgaggcratctaccatgggatccctatggtgggcattcccttgtttgcggatcaacatgataacattgctcacatgaaagccaagggagcagccctcagtgtggacatcaggaccatgtcaagtagagatttgctcaatgcattgaagtcagtcattaatgaccctatctataaagagaatatcatgaaattatcaagaattcatcatgatcaaccggtgaagcccctggatcgagcagtcttctggattgagtttgtcatgcgccataaaggagccaagcaccttcgggtcgcagcccacaacctcacctggatccagtaccactctttggatgtgatagcattcctgctggcctgcgtggcaactatgatatttatgatcacaaaatgttgcctgttttgtttccgaaagcttgccaaaacaggaaagaagaagaaaagggattagttatatcaaaagcctgaagtggaatgaccaaaagatgggactcctcctttattccagcatggagggttttaaatggaggatttcctttttcctgcgacaaaacgtcttttcacaacttaccctgttaagtcaaaatttattttccaggaatttaatatgtactttagttggaattattctatgtcaatgatttttaagctatgaaaaataataggggcagggatagcattgggagatatacctaatgctagatgatgagttagtgggtgcagtgcaccagcatggcacatgtatacatatgtaactaacctgcacaatgtgcacatgtaccctaaaacttaaagtataata

SEQ ID NO: 366 - DNA, 1805 bp, Homo sapiens
tgacagaaagaaacaacaactggaaaagaagcattgcataagaccaggatgtctctgaaatggatgtcagtctttctgctgatgcagctcagttgttactttagctctgggagttgtggaaaggtgctggtgtggcccacagaatacagccattggataaatatgaagacaatcctggaagagcttgttcagaggggtcatgaggtgattgtgttgacatcttcggcttctaytcttgtcaatgccagtaaatcatctgctattaaattagaagtttatcctacatctttaactaaaaatkatttggaagatttttttatgaaaatgttcgatagatggacatatagtatttcaaaaaatacattttggtcatatttttcacaactacaagaattgtgttgggaatattctgactataatataaagctctgtgaagatgcagttttgaacaagaaacttatgagaaaactacaagagtcaaaatttgatgtccttctggcagatgccgttaatccctgtggtgagctgctggctgarctacttaacataccctttctgtacagtctccgcttctctgttggctacacagttgagaagaatggtggaggatttctgttccctccttcctatgtacctgttgttatgtcagaattaagtgatcaaatgattttcatggagaggataaaaaatatgatatatatgctttattttgacttttggtttcaagcatatgatctgaagaagtgggaccagttttatagtgaagttctaggaggttctatggagatttgatggcaagaagccaaatactttaggttccaatactcgactgtataagtggttaccccagaatgaccttcttggtcatcccaaaaccaaagcttttataactcatggtggaaccaatggcatctatgaggcratctaccatgggatccctatggtgggcattcccttgtttgcggatcaacatgataacattgctcacatgaaagccaagggagcagccctcagtgtggacatcaggaccatgtcaagtagagatttgctcaatgcattgaagtcagtcattaatgaccctatctataaagagaatatcatgaaattatcaagaattcatcatgatcaaccggtgaagcccctggatcgagcagtcttctggattgagtttgtcatgcgccataaaggagccaagcaccttcgggtcgcagcccacaacctcacctggatccagtaccactctttggatgtgatagcattcctgctggcctgcgtggcaactatgatatttatgatcacaaaatgttgcctgttttgtttccgaaagcttgccaaaacaggaaagaagaagaaaagggattagttatatcaaaagcctgaagtggaatgaccaaaagatgggactcctcctttattccagcatggagggttttaaatggaggatttcctttttcctgcgacaaaacgtcttttcacaacttaccctgttaagtcaaaatttattttccaggaatttaatatgtactttagttggaattattctatgtcaatgatttttaagctatgaaaaataataatataaaaccttatgggcttatattgaaatttattattctaatccaaaagttaccccacacaaaagttactgagcttccttatgtttcacacattgtatttgaacacaaaacattaacaactccactcatagtatcaacattgttttgcaaatactcagaatattttggcttcattttgagcagaatttttgtttttaattttgccaatgaaatcttcaataattaaat

SEQ ID NO: 367 - DNA, 1010 bp, Homo sapiens
atggtttttattgttatactaaggagtgttatctctggagacacatttgcctgtgttttaatattggctgtgtttctttctctgcaaactgaggataawaacacctatgttattcagttactattcactgaactgaagggcacaggctacaaagtgccccaagatgtcctgcaaaaattgctggaatctttacagaaccacttccaagaagatgagcagtttctgggagcctttatgccaaggcttggcattggaatggatacttgtcattcctttgagacacgtgacctctacgcaatgggggtcacagaatgtgacaatatgctgatgctccttggagtcagtaataaaatgaccaacagggaaatggataaagtgatgcctctgattatccaaggttttaaagacgcagctgaggaggcagaaacgtctgtaatgggcggccaaacagtactaaacccctggattgtcctgggaagagtcactaccactgtctgtcagcccagtgaatttatcatgccagacaatgcagtaccaggggatgtgctggtgttgacaaaacccctggggacacagggggcagtggctgtgcatcagtggctggatattcctaagaaatggaataatattaaactagtggtcacccaagaagatgtagagctggcctacgaggaggtgatgatgaacatggcgaggctcaacaggacaggcgggcttctgatctgtttaccatgtgagcaaacagctcggttctgtgcagagataaagtcccccaaatatggtgaagaccaccaagcatggattattgggattgtagagaagggcaaccacacagccagaatcatagacaaacccctgatcatcgagattgcaccacaagtggccactcaaaatgtgaatcccacacccggggccacctcttaatctaagcagaaatagctgtttggttttgtttttaaatagatctatttcctttatcatcgcttcarttaaagactataagcaacaaa

SEQ ID NO: 368 - DNA, 1284 bp, Homo sapiens
gggcgcaaagcgagccggtggatccataaagaacccagccaacycgcagagggaagggaggggctgagctgtgaggagagtggggcccaacaaccatatctacatgggagtcctttaacccggaaagttacgaattggacaaaagcttccggctaaccagattcactgaactgaagggcacaggctacaaagtgccccaagatgtcctgcaaaaattgctggaatctttacagaaccacttccaagaagatgagcagtttctgggagcctttatgccaaggcttggcattggaatggatacttgtcattcctttgagacacggtgggctttccttggttcaaactacagattacatttacccaattgtagacgactcttacgtgacaggcaggatagcatgtgccaatgtcctcagtgacctctacgcaatgggggtcacagaatgtgacaatatgctgatgctccttggagtcagtaataaaatgaccaacagggaaatggataaagtgatgcctctgattatccaaggttttaaagacgcagctgaggaggcagaaacgtctgtaatgggcggccaaacagtactaaacccctggattgtcctgggaagagtcactaccactgtctgtcagcccagtgaatttatcatgccagacaatgcagtaccaggggatgtgctggtgttgacaaaacccctggggacacagggggcagtggctgtgcatcagtggctggatattcctaagaaatggaataatattaaactagtggtcacccaagaagatgtagagctggcctacgaggaggtgatgatgaacatggcgaggctcaacaggacaggcgggcttctgatctgtttaccatgtgagcaaacagctcggttctgtgcagagataaagtcccccaaatatggtgaagaccaccaagcatggattattgggattgtagagaagggcaaccacacagccagaatcatagacaaacccctgatcatcgagattgcaccacaagtggccactcaaaatgtgaatcccacacccggggccacctcttaatctaagcagaaatagctgtttggttttgtttttaaatagatctatttcctttatcatcgcttcarttaaagactataagcaacaaaaatctcactgtatctacatatcaggtgaccttaggtcagtttgtaagtggatacaattaataaaataaaayccatgcctttttttcctgtcacattaactgaagatgcacctaatcttgaggcagcttctgagttgagaatt

SEQ ID NO: 369 - DNA, 700 bp, Homo sapiens
gctgccgccaccaggagccctgtagtatcagccatagtcaatcccacggtgttcttcaacattgccatcaatgacaagtttccaaagacagcagaaaaccttcgtgttctgggcatgggagagaaaggatttggttgtaagggctcccgctttcacagaattattccagggtttatgtgtcagggtggtgacttcacacgccataatggcactggtggcaagtccatctatggggagaaatttgatgatgagaacttcatcctaaagcatacaggtcctggcatcttgtccatggcaaatgctggacccaacacaaacggttcccagtttttcatctgcactgccaagagtgagtggttggatggcaagcatgtggtctttggcaagatgaaagaaggcataaatattgtggaggccacggggcrctttgggtccaggaatggaaagaccagcaagaaaatcaccattgctgactgtggacaacttgaataagtttgacttgtgttttatcttaaccaccagaccmttccttttgtagctcaggagagcaccctccaccccatttgcttgcagtatcctagaatctttgtgctcttgctgcagttccctttgggttccatgttttccttgttccctatgcctagctgaattgaagagttgagttaagtttatgattatgaaattaaaactaaataactat

SEQ ID NO: 370 - DNA, 1223 bp, Homo sapiens
ctcatttcaaaatgtcatcaacaagaaccacatggacctctgtgagagggatgattaaactagcctgagtttgaatgaaaggattatgtgtacccaacctgtaacwaacaccaaggaggtaaagtggcagagggtcttgtatgagcaacagccctttcctgataactttgtggaccggcggttcctggaagagctctggaaaaacatccatgctyggaaataccaatattgggctatggtatttgagtccagtgtggtgatccygcagctgtgcagtgtttttgtttttctggttatctggtggtatatggatgagggtcttctggccccccaatggctttttgggactggcctggcttcttcactgattgggtatgttttgtttgatctcactgatggargtgaagggcagaagagtgggtggacccggtgggctgacytgaagagtgccctagtcttcattactttcacttatggcttttcaccagtgctaagaccctgacagagtctgtcagcactgacaccatctatgccatgtcagtcttcatgctggtaggccacctcatcttttttaactatggtgccaatgatgcctttgtatccactgtatccagcacactatccttgaacatggccatctttgcttctggatgcttggcttccaccttccccagtccctgcatgtcttcatcatgggaacacttgccatccagatttttgtcctgtggctcatgctacagaagaaactaaaggcacggactcccaagggctatgtggtggtcacactgctttttgccttttcggtcttggaaggcctactgcctattagtgctgtgggagccgtactctttgcccttctgttgatttctatctcatgtctctgtccattttacctcattcgcctgcagctttttaaagaaaatattcagaggccttgggatgaagctgaaatcaaggaagacttgtctaggttcctcagctaaattagggacattctgatagactagcctcctaactagtataaaacttaaagacaggccgggtgtggtggctcacgactgtaatcacagcactctgggaggcccgaggcggatggatcacgaggtcaagagttcgagaccagcctggccaacatggtgaaaccccgtctctactaagaatccaaaaattagccgggcatggtggcgcgtgcctgtaatcccagctattcaggaggctgaggc

SEQ ID NO: 371 - DNA, 798 bp, Homo sapiens
atggcattttctgaagccacagtgaagcatgatgcctttggggaactgcccgtggttgccatggctgcaagctcccagttgggttctgccccaaaggaccaaagaaaagaaaggaggaaactgaggcttggagacaatggtttcacccaaatatcagtggtgtggaggcagaaaaacctattgtcgacaagaggagttgatggcagttttttggcaaggcctagtaaaagtacccctggagacttcacatgttccattagaagaaatagagctgtcacccacatcaagattcagaacactggacccrtttggggggaaaagtttgccacttmggctgagttggtccagtattacatggaacatcacaggcaattaaaagagaagaatggagatgttgttgagcttaaatatcctctgaactgtgcggatcctgcctctgaaagatggtttcacggacacctctttgggaaagaagcagagaaattaactgaaaaaggaaaacatggtagctttcttatacgagagagccagagccaccctggagattttgttctctctgtgcgcaccagtgatgacaaaaaagagagcaatgacagcaagtgtaaagtgacccatgtcatgattcgctgtcaggaactgaaatacgacgttggtggaggaaaacggtttgattctttgacggatctygtggaacattacaagaagaatcctatgctggaaacattgggtacagtactacgactcaagcagccccttaacatgactcgtataaatgctgctgaaatagaaagcagagyt

SEQ ID NO: 372 - DNA, 635 bp, Homo sapiens
atggtcaaccccaccgtgttcttccacatctctgtcgacggtgagtccttgggccgcatctcttttgagctgtttgcagacaagtttccaaagacagcagaaaacttttggtttatgtgtcatggtggtgacttcacacaccataatggcactggtggcaagtcaatctacggggagaaagttgatgatgacaacttcatcctgaagcatacaggycctrgcatattgtccatggcaaatgctggacccaayacaaatggttcccagtttttcatctgcactgccaagtctgagtggttggatagcaagcatgtggtcattggcaaggtgaaagaaggcatgaatattgtggaggccatggagcactttgggtccaggaatggcaagaccagcaagaaggtcaccattcctgactttggacaactcgaataagtttgacttgtgttttatcttaacyactggaccattccttctgcagctcaggagagcagccctccaccccatctgctcgcagtattctagaatctttgtgctytcgctgcagttccctttgggttccatgttttccttgttcccttccatgcctagttagatggcagagttaagtttgtgattatgaaatgaaaactaaataa

SEQ ID NO: 373 - DNA, 568 bp, Homo sapiens
atgccgggccccactgctgccatgacaggccctttcaaacgctccatggaagatctcagtgacctgctctcagacagcagtggctgctacagcctcccaagccagccctgcaatgaggtcaccctgaagatttacatgggcaacacatctgtggatcaggatatccccaagcttcagaaactaggcagtattcatgccctgaataccactgagggcaggtctttcatgcacataaacaatgccaacttctccaaggactctggcatcacctacctgggcatcaaggccaatgaagtgcaggagttcaacctcagcacctacttkgaaagggctacagacttcactgaccaggccttggctcaaaatggccaggtgctcgtccagtgctgggaaggttacagccatctccagctctagttatcatgtaccttatgattgtcagaagttggacatcaagtccatcctgagtatcatgaggcagaactgtgagatcagccccaatgatgggttcctggctcagctttgycatctcaatgacaaactagccaaggaggggaaggtgaaaccc

SEQ ID NO: 374 - DNA, 658 bp, Homo sapiens
gctgataggaagatgtcttcaggaaacgctaaaattgggcaccctgcccccaacttcaaagccacagccattatgccagacagtcagtttaaagatatcagcctgtctgactacaaaggaaatatgttgtattcttcttttaccsgcttgacttcacttttgtgtgccccacagagaacattgctttcagtgatacagaagaatttaagaaattcaactgccaagtgattggtgcttctgtggattctcacttctgtcagctggcatggatccacacccctaagaaacaaggaggactgggacccaggaacattcctttggcctcagacccgaagtgcaccattgctcaggattatgggatcttaaaggctgaagaaggcatctcattcaggggcctctttatcgttgatgatatgggtattcttcggcagatcactgtaaatgacctccctgttgactgctctgtggatgagactttgagactagttcaggccttccagttcactgacaaacatagggaagtgtgcccagctggctggaaacctggcagtgatactatcaagactgatgtccaaaagagcaaagaatatttatccaagcaggagtgagtgctgggctgttttagtgccaggctgcagtgggaacccctgagaacaaa

SEQ ID NO: 375 - DNA, 1974 bp, Homo sapiens
cgggctgtcctcagcargggcgcggtctggtactcgtgcgtcttttatcgcctcagtttccctccgccgactagcgcgcggggcccggttctccatcgcgcgcacggcagcctagcgcaatgaggcgggcagcactgcgttcgagataagttgcgggagatagtaggagcatccacaaactggagagaccatgtgaaggcaatggaagraaggaaattacttcatagtttcttggctaaatcacaggatggactgcctcctaggagaatgaaggacagttatattgaagttctcttgcctttgggcagtgagcctgrattacgagagaaatatttgactgttcaaaacaccgtaagatttggcaggattcttgaggatcttgacagcttgggagttcttatttgttacatgcacaacaaaatccactccgccaagatgtctcctttatcgatagttacagccctggtggataagattgatatgtgtaagaagagcttgagcccagaacaggacattaagttcagtggccatgttagctgggtcgggaagacatccatggaagtgaagatgcaaatgttccagttacatggtgatgaattttgtcctgttttggatgcaacatttgtaatggtggctcgtgattctgaaaataaagggccggcatttgtaaatccactcatccctgaaagcccagaggaagaggagctctttagacaaggggaattgaacaaggggagaagaattgccttcagytccacgtcgttactgaaaatggcccccagcgctgaggagaggaccaccatacatgagatgtttctcagcacactggatccaaagactataagttttcggagtcgagttttaccctctaatgcagtgtggatggagaattcaaaactgaagagtttggaaatttgccaccctcagsagcggaacattttcaatcggatctttggtggtttccttatgaggaaggcatatgaacttgcgtgggctactgcttgtagctttggtggttctcgaccgtttgtggtagcagtagatgacatcatgtttcagaaacctgttgaggttggctcattgctctttctttcttcacaggtatgctttactcagaataattatattcaagtcagagtacacagtgaagtggcctccctkcaggagaagcagcatacaaccaccaatgtctttcatttcacgttcatgtcggaaaaagaagtgccaytggttttcccaaaaacatatggagagtccatgttgtacttagatgggcagckgcatttcaactccatgagtggcccagcgaccttgagaaaggactaccttgtggagccctaagaacaccacatttgttgaaaactagcactctacccacagtgacgtggtatctgatgaagacctgatcgagtgtattgattttagtattgcttcgtgtcctccacacaggaggaggatgtattcagcctttaggatgatcagaaaagcagaaagagagagtggccggatggggctgaggggagaaagaattattaaacaataaatactttcaagacaattttaattgtgaacctaccatgttgcctcccatcttctgaaaaaacaaaaaaattccaaggcygggcgcggtagctcatgcctgtaatcccagcactttgggaggccaaggcggatgggaggatcgcttgagaccagcctgggaaacatagtgagaccccgtttctacaaaaagttaaaaaattatctgagcatggtggtgtgcacctgtagtcccagttaggaggctgaggtgagtggattgcttgagtccaggagtttgagtctgcagtgagctatgatcatgccactgcactccagtctgggtgacagcaagaccctgtctcaagcaatttttttatattagtttatgtaatgtttattgaaatcacagtgtcaacaagcacctctggcatgaaatagtcacaggagcgaaca

SEQ ID NO: 376 - DNA, 2105 bp, Homo sapiens
cggtcccgcccccggacrccgctgtccsgctcccgggctgtcctcagcargggcgcggtctggtactcgtgcgtcttttatcgcctcagtttccctccgccgactagcgcgcggggcccggttctccatcgcgcgcacggcagcctagcgcaatgaggcgggcagcactgcggctttgtgccttgggcaaagggcagcttactcctggaagaggactgactcaaggaccccagaaccccaagaaacagggaatcttccacattcatgaagttcgagataagttgcgggagatagtaggagcatccacaaactggagagaccatgtgaaggcaatggaagraaggaaattacttcatagtttcttggctaaatcacaggatggactgcctcctaggagaatgaaggacagttatattgaagttctcttgcctttgggcagtgagcctgrattacgagagaaatatttgactgttcaaaacaccgtaagatttggcaggattcttgaggatcttgacagcttgggagttcttatttgttacatgcacaacaaaatccactccgccaagatgtctcctttatcgatagttacagccctggtggataagattgatatgtgtaagaagagcttgagcccagaacaggacattaagttcagtggccatgttagctgggtcgggaagacatccatggaagtgaagatgcaaatgttccagttacatggtgatgaattttgtcctgttttggatgcaacatttgtaatggtggctcgtgattctgaaaataaagggccggcatttgtaaatccactcatccctgaaagcccagaggaagaggagctctttagacaaggggaattgaacaaggggagaagaattgccttcagytccacgtcgttactgaaaatggcccccagcgctgaggagaggaccaccatacatgagatgtttctcagcacactggatccaaagactataagttttcggagtcgagttttaccctctaatgcagtgtggatggagaattcaaaactgaagagtttggaaatttgccaccctcagsagcggaacattttcaatcggatctttggtggtttccttatgaggaaggcatatgaacttgcgtgggctactgcttgtagctttggtggttctcgaccgtttgtggtagcagtagatgacatcatgtttcagaaacctgttgaggttggctcattgctctttctttcttcacaggtatgctttactcagaataattatattcaagtcagagtacacagtgaagtggcctccctkcaggagaagcagcatacaaccaccaatgtctttcatttcacgttcatgtcggaaaaagaagtgccaytggttttcccaaaaacatatggagagtccatgttgtacttagatgggcagckgcatttcaactccatgagtggcccagcgaccttgagaaaggactaccttgtggagccctaagaacaccacatttgttgaaaactagcactctacccacagtgacgtggtatctgatgaagacctgatcgagtgtattgattttagtattgcttcgtgtcctccacacaggaggaggatgtattcagcctttaggatgatcagaaaagcagaaagagagagtggccggatggggctgaggggagaaagaattattaaacaataaatactttcaagacaattttaattgtgaacctaccatgttgcctcccatcttctgaaaaaacaaaaaaattccaaggcygggcgcggtagctcatgcctgtaatcccagcactttgggaggccaaggcggatgggaggatcgcttgagaccagcctgggaaacatagtgagaccccgtttctacaaaaagttaaaaaattatctgagcatggtggtgtgcacctgtagtcccagttaggaggctgaggtgagtggattgcttgagtccaggagtttgagtctgcagtgagctatgatcatgccactgcactccagtctgggtgacagcaagaccctgtctcaagcaatttttttatattagtttatgtaatgtttattgaaatcacagtgtcaacaagcacctctggcatgaaatagtcacaggagcgaaca

SEQ ID NO: 377 - DNA, 1552 bp, Homo sapiens
ggaagagtgtgtgtctgcgggagaaagaggagaatcacccaagcggcctcagaagtcccagggagtggaggcccctgccatggagccgtgtggtgtatgtgtggtaacaccatgtctgtgcccctgctcaacgatgctgccaccgtgtctggagctgagcgggaaacggccgtggttatttttttacatggacttggagamacagggcacagctgggctgacgccctctccaccattcggctccctcacgtcaagtacatctgttcccatgagcctaggatccctgtgaccctcaacatgaagatggtgatgccctcctgaacatcaaggccttgattgagcatgaaatgaagaacgggatccctgccaatcaaatcatcctgggaggcttttcacagggccgggccctgtccctctacatggccctcacctgcccccaccctctggctggcatcctggctttgagctgstggccgcctctgcacyrgrmcttccccmaggcagctaatggcagtgccaaggacctggccatcctccagtgccatggggagctggaccccatggtgcccgtacggtttggggccctgatggctragaagctccrgtctgttgtcacacctgccagggtccagttccagacatacctgggtgtcatgcacagctcctgtcctcaggagatggcagctgtgaaggaatttcttgagaagctgctgcctcctgtctaactagtcgctggccccagtgcagtaccccagctcatgggggactcagcaagtaagcatggcaccatcttgggtctgagctggtcgagcccctgtccccacccttcctgacctgtccttttcccacaggcctctaggggcaggtggcaaggcctggctgggccttccttcctggcctcagccacctggctctgtctgcagtaggggcaggctgctttcttatcccatttccctggaggcgggcccccctggcagcagtattggaggggctacaggcagctggagaaagaggcccagccactgacccactcactcaggacctcactcactagccccactttgggccccctcctgtaaccttagggtttggcccatggggccctcccaggcccctgccccaactgattctgcccagataatcttgtgtctcctgcctccactcagctgcttctcagtcatgaacgtggccatggccccgggggtccccttgctgctgtgggctccctgtccctgggcaggagtgctggtgaggaggtggagccttttgaggggggccttccctcagctgtttccccacactggggggctgggccctgcctccccgttaccctccttccctgcaggcctggagyctgtagggctggactgaggttcaggtctccccccagctgtctcacccccactttgtccccactctagagcagggaggcrgtgggggaggagttgtgtcttgtcttctgtctccatgtggtttttgggtgtttttcttcttgtgtcctggattctgataaaattaaagaaattgcttcctcaaaaaaaaaaaaaaatta

SEQ ID NO: 378 - DNA, 1539 bp, Homo sapiens
tgtgtgtctgcgggagaaagaggagaatcacccaagcggcctcagaagtcccagggagtggaggcccctgccatggagccgtgtggtgtatgtgtggtaacaccatgtctgtgcccctgctcaacgatgctgccaccgtgtctggagctgagcgggaaacggccgtggttatttttttacatggacttggagamacagggcacagctgggctgacgccctctccaccattcggctccctcacgtcaagtacatctgttcccatgagcctaggatccctgtgaccctcaacatgaagatggtgatgccctcctggtttgacctgatggggctgagtccagatgccccagaggacgaggctggcatcaagaaggcagcagagaacagggccgggccctgtccctctacatggccctcacctgcccccaccctctggctggcatcctggctttgagctgstggccgcctctgcacyrgrmcttccccmaggcagctaatggcagtgccaaggacctggccatcctccagtgccatggggagctggaccccatggtgcccgtacggtttggggccctgatggctragaagctccrgtctgttgtcacacctgccagggtccagttccagacatacctgggtgtcatgcacagctcctgtcctcaggagatggcagctgtgaaggaatttcttgagaagctgctgcctcctgtctaactagtcgctggccccagtgcagtaccccagctcatgggggactcagcaagtaagcatggcaccatcttgggtctgagctggtcgagcccctgtccccacccttcctgacctgtccttttcccacaggcctctaggggcaggtggcaaggcctggctgggccttccttcctggcctcagccacctggctctgtctgcagtaggggcaggctgctttcttatcccatttccctggaggcgggcccccctggcagcagtattggaggggctacaggcagctggagaaagaggcccagccactgacccactcactcaggacctcactcactagccccactttgggccccctcctgtaaccttagggtttggcccatggggccctcccaggcccctgccccaactgattctgcccagataatcttgtgtctcctgcctccactcagctgcttctcagtcatgaacgtggccatggccccgggggtccccttgctgctgtgggctccctgtccctgggcaggagtgctggtgaggaggtggagccttttgaggggggccttccctcagctgtttccccacactggggggctgggccctgcctccccgttaccctccttccctgcaggcctggagyctgtagggctggactgaggttcaggtctccccccagctgtctcacccccactttgtccccactctagagcagggaggcrgtgggggaggagttgtgtcttgtcttctgtctccatgtggtttttgggtgtttttcttcttgtgtcctggattctgataaaattaaagaaattgcttcctcaaaaaaaaaaaaaaatta

SEQ ID NO: 379 - DNA, 1595 bp, Homo sapiens
ccgagggggaagagtgtgtgtctgcgggagaaagaggagaatcacccaagcggcctcagaagtcccagggagtggaggcccctgccatggagccgtgtggtgtatgtgtggtaacaccatgtctgtgcccctgctcaacgatgctgccaccgtgtctggagctgagcgggaaacggccgtgggcacagctgggctgacgccctctccaccattcggctccctcacgtcaagtacatctgttcccatgagcctaggatccctgtgaccctcaacatgaagatggtgatgccctcctggtttgacctgatggggctgagtccagatgccccagaggacgaggctggcatcaagaaggcagcagagaacatcaaggccttgattgagcatgaaatgaagaacgggatccctgccaatcaaatcatcctgggaggcttttcacagggccgggccctgtccctctacatggccctcacctgcccccaccctctggctggcatcctggctttgagctgstggccgcctctgcacyrgrmcttccccmaggcagctaatggcagtgccaaggacctggccatcctccagtgccatggggagctggaccccatggtgcccgtacggtttggggccctgatggctragaagctccrgtctgttgtcacacctgccagggtccagttccagacatacctgggtgtcatgcacagctcctgtcctcaggagatggcagctgtgaaggaatttcttgagaagctgctgcctcctgtctaactagtcgctggccccagtgcagtaccccagctcatgggggactcagcaagtaagcatggcaccatcttgggtctgagctggtcgagcccctgtccccacccttcctgacctgtccttttcccacaggcctctaggggcaggtggcaaggcctggctgggccttccttcctggcctcagccacctggctctgtctgcagtaggggcaggctgctttcttatcccatttccctggaggcgggcccccctggcagcagtattggaggggctacaggcagctggagaaagaggcccagccactgacccactcactcaggacctcactcactagccccactttgggccccctcctgtaaccttagggtttggcccatggggccctcccaggcccctgccccaactgattctgcccagataatcttgtgtctcctgcctccactcagctgcttctcagtcatgaacgtggccatggccccgggggtccccttgctgctgtgggctccctgtccctgggcaggagtgctggtgaggaggtggagccttttgaggggggccttccctcagctgtttccccacactggggggctgggccctgcctccccgttaccctccttccctgcaggcctggagyctgtagggctggactgaggttcaggtctccccccagctgtctcacccccactttgtccccactctagagcagggaggcrgtgggggaggagttgtgtcttgtcttctgtctccatgtggtttttgggtgtttttcttcttgtgtcctggattctgataaaattaaagaaattgcttcctcaaaaaaaaaaaaaaatta

SEQ ID NO: 380 - DNA, 510 bp, Homo sapiens
gagaaagaggagaatcacccaagcggcctcagaagtcccagggagtggaggcccctgccatggagccgtgtggtgtatgtgtggtaacaccatgtctgtgcccctgctcaacgatgctgccaccgtgtctggagctgagcgggaaacggccgtggttatttttttacatggactaccctcaacatgaagatggtgatgccctcctggtttgacctgatggggctgagtccagatgccccagaggacgaggctggcatcaagaaggcagcagagaacatcaaggccttgattgagcatgaaatgaagaacgggatccctgccaatcaaatcatcctgggaggcttttcacagggccgggccctgtccctctacatggccctcacctgcccccacctgtctcacccccactttgtccccactctagagcagggaggcrgtgggggaggagttgtgtcttgtcttctgtctccatgtggtttttgggtgtttttcttcttgtgtcctggattc

SEQ ID NO: 381 - DNA, 1646 bp, Homo sapiens
tagtgttccggcgggggcggccgagggggaagagtgtgtgtctgcgggagaaagaggagaatcacccaagcggcctcagaagtcccagggagtggaggcccctgccatggagccgtgtggtgtatgtgtggtaacaccatgtctgtgcccctgctcaacgatgctgccaccgtgtctggagctgagcgggaaacggccgtggttatttttttacatggacttggagamacagggcacagctgggctgacgccctctccaccattcggctccctcacgtcaagtacatctgttcccatgagcctaggatccctgtgaccctcaacatgaagatggtgatgccctcctggtttgacctgatggggctgagtccagatgccccagaggacgaggctggcatcaagaaggcagcagagaacatcaaggccttgattgagcatgaaatgaagaacgggatccctgccaatcaaatcatcctgggaggcttttcacagggccgggccctgtccctctacatggccctcacctgcccccaccctctggctggcatcctggctttgagctgstggccgcctctgcacyrgrmcttccccmaggcagctaatggcagtgccaaggacctggccatcctccagtgccatggggagctggaccccatggtgcccgtacggtttggggccctgatggctragaagctccrgtctgttgtcacacctgccagggtccagttccagacatacctgggtgtcatgcacagctcctgtcctcaggagatggcagctgtgaaggaatttcttgagaagctgctgcctcctgtctaactagtcgctggccccagtgcagtaccccagctcatgggggactcagcaagtaagcatggcaccatcttgggtctgagctggtcgagcccctgtccccacccttcctgacctgtccttttcccacaggcctctaggggcaggtggcaaggcctggctgggccttccttcctggcctcagccacctggctctgtctgcagtaggggcaggctgctttcttatcccatttccctggaggcgggcccccctggcagcagtattggaggggctacaggcagctggagaaagaggcccagccactgacccactcactcaggacctcactcactagccccactttgggccccctcctgtaaccttagggtttggcccatggggccctcccaggcccctgccccaactgattctgcccagataatcttgtgtctcctgcctccactcagctgcttctcagtcatgaacgtggccatggccccgggggtccccttgctgctgtgggctccctgtccctgggcaggagtgctggtgaggaggtggagccttttgaggggggccttccctcagctgtttccccacactggggggctgggccctgcctccccgttaccctccttccctgcaggcctggagyctgtagggctggactgaggttcaggtctccccccagctgtctcacccccactttgtccccactctagagcagggaggcrgtgggggaggagttgtgtcttgtcttctgtctccatgtggtttttgggtgtttttcttcttgtgtcctggattctgataaaattaaagaaattgcttcctcaaaaaaaaaaaaaaatta

SEQ ID NO: 382 - DNA, 1144 bp, Homo sapiens
cccagccatgcccaccatcattgagcgggagttcaaggagttggatgctcagcatcgctggcagctgccgtacttggaaattcgaaatgagtcycatgactatcttcatagagtggccaagtttccagaaaacagaaatcgaaatagatacagagatgtaagcccatatgatcacagtcgtgttaaactgcagaatactgagaatgattatattaatgccagcttagttgacatagaagaggcacgaaggagttacatcttaacaccgggtccacttcctaacatgtgctgccatttctggcttacggtttggcagcagaagaccaaagcagttgttgtgctgaaccgcattgtggagaaagaatcggttaaatgtgcgcagtactggccaacagatgaccaaaagatgctgtttaaagaaacgggattcaatgtgaagctctttcagaagatgtgaagtcatattacacagtacatctactacgattagaaaatatcaatagtggtgaaaccagaacaatatctcacttgcattatacgacctggccagattttggagtccctgaatcaccagcttcatttctcaatttcttgttgaaagtgagagaatctggctccttgaaccctgaccatgggcctgcagtgatccattgtagcgaaggcactgggtgcacgggcaccttctctctggtagacgcttgtcttgttttgatgggaaaaggagattatattaacattaaacaagtgttattgaacatgagaaaatactgaatgggtcttattcagaccccagatcaactgagattctcatacatggctataatagaaggagcaaaatgtataaaggtagattctagtatacagaaacggtggaaagaattttctaaggaaaacttagctcctgcttttgatcattcaccgaacaaaataatgactgaaaaatacaatgggaacagaattggtctagaagaagaaaaactgacaggtgaccgatgtacagtaaatgcaagatacaatggaagagaacagtgagaatgctctacggaaacatattctagaggacagaaaggccaccacagctcagaaggtgcagcagatgaaacagaggctaaatgagaacgaacaaaaaagaaaaaggccaaga

SEQ ID NO: 383 - DNA, 2499 bp, Homo sapiens
ctgcaggatgtcgctgctgagcctgtcttggctgggcctcaggccggtggcagcatccccgtggcttctcctgctggtggtcggggcctcctggctcctggcccgcatcctggcctggacctatgccttctatcacaacggccgccgcctccggtgtttcccgcagccmcggaaacagaactggttcttgggtcacctgggcctggtcactcccacagaggagggcttgagggtcctgacccagctggtggccacctacccccagggctttgtgaggtggttgggccccatcactcccatcatcaacttgtgccaccctgacatcgtycgatctgtcatcaatacctcagatgccattacagacaaggacatagtcttctwcaagaccctgaagccctggctgggggatgggctcttgttaagtgttggtgacaagtggagacaccaccgtcgcttgctgaygcctgccttccatttcaacatcctgaagccctatataaagattttcagcaagagtgcaaacatcatgcatgccaagtggcaacgcctggccatggagggcagcacctgtctggatgtgtttgagcacatcagccttatgaccctggacagtctgcagaaatgcatcttcagctttgacagcaattgtcaggagaagcccagtgaatatattactgcgatcatggagctcagtgcccttgtagtgaaacggaataaccagttcttccggtacaaggacttcctgtacttcctcactccctgtggacggcgcttccacagggcctgcagactggtgcacgacttcacagatgccgtcatccaggagcggcgccgcaccctcactagccagggtgttgatgacttcctccaagccaaggccaagtccaagactttggactttattgatgtgctcctgctgagcgaggataaaaatggtaaagagttgtcagatgaggacataagagcagaagctgacactttcatgtttggaggccatgacaccacggccagtggcctctcctgggtcttgtacaacctcgcgaggcacccagaataccaagaacgctgccggcaggaggtgcaagagcttctgaaggaccgtgagcctaaagagattgaatgggacgacctggcccagttgcccttcctgaccatgtgcctgaaggagagcctgcggttgcatcccccaatccctacattygcccgcggctgcacccaggacgtggtgctcccagacagccgagtcatccccaaagggaatgtctgtaacatcaacatcttcgcaatccatcacaacccctcagtctggccagaccctgaggtctatgaccccttccgcttcgacccmgaaaacgcccagaagaggtcacctatggcttttattcctttctcggcggggcccaggaactgcatcgggcagaagttcgcgatggcagagatgaaggtggtcctggcgctcacgctgctgcgcttccgcatcctgcccgaccacagggagccacgcaggacgccggagattgttttgcgtgcggaggacggactttggctgcgagtagaacccctgggctgaggcctgcagtgacccacccacctacctttgcatcacctacctttgcaccaaytaccttttcagatttccggtaataaatctgtgttggcccctgtgcctsagtcccrcggatggccagtagggggcgctggaggactgcggggatctagggcctggctgggaagaggcggggagatgtctctgtgyccaagatactcactgcctctctgggtgagcacaggagccccgtgctgagggtgggatctcccagagtctaagtaaagactttttccccccmaaaataattgtgtattctgatataaatttttgccaatttagaatccctgttttttagctaggtgcatagcagcctgaaatacagatcacatttgaaagcctttcttgaagctcaattggttaagtgactgtggctgtcccatgtgtagaagccaaagattatgtggtaattctggtaacctttcttaagagaaagctgctacagtctgtctgctcagtcctcccctcttccttcctgctgcttggaagattttttttttttttgagacagggtgtctctcgtcacccaggccggagtgcagtggctcactgcaacctccacctcctgggttcaagtgattctcctgactcagtcgcctgagtagataggataacaggcgcctaccaccacacccggctaattgtatttttagtacagatggggttttgctatgttggccaggctggtctcaaactcctggcctcaagtgatcagcccacctcagcctcccaaagtgccagaattgcaggtgtgagaacaaaaattcttgagtttcaatgtttattttagaatcaggtgctaacatgcaaatttattacaaaggtatattgcatcatgctgaggtttggagtatgaatgactccatcacccatgtagtgagcatagtatctaa

SEQ ID NO: 384 - DNA, 3700 bp, Homo sapiens
cgctgggggcccgagcccacaccaccttcctagcaaagcaagcagcgggacgccaaggccagcaggccgcattaagaacgctggactgagccaaaagcctacacagaccaagccgctcgggaaaggatcaacaactgccgacaacccggagggcgaaaacgcccgcggcgtaggggaagcaaactaggagatgmgcgggcccagcgccagcggcgggaggaggsagcgcggccgtcgcaggcgggagcgaaggcggggacggagggcgggctcgctccactcgactccggattggtcgagcttagagagccgagtgacgtcagcgggggagaacgcctgatttgtgtggtgggcgcgggcggtggggggaagcgcagtgcgcaggcgcaactgcctggctcygctcgctccggcgctccggcccagctctcgcggacaagtccagacatcgcgcgcccccccttctccgggtccgccccctcccccttctcggcgtcgtcgaagataaacaatagttggccggcgagcgcctagtgtgtctcccgccgccggattcggcgggctgcgtgggaccggcgggatcccggccagccggccatggcggggctgtactcgctgggagtgagcgtcttctccgaccagggcgggaggaagtacatggaggacgttactcaaatcgttgtggarcccgaaccgacggctgaagaaaagccctcgccgcggcggtcgctgtctcagccgttgcctccgcggccgtcgccggccgcccttcccggcggcgaagtctcggggaaaggcccagcggtggcagcccgagaggctcgcgaccctctcccggackccggggcctcgccggcacctagccgctgctgccgccgccgttcctccgtggcctttttcgccgtgtgcgacgggcacggcgggcgggaggcggcacagtttgcccgggagcacttgtggggtttcatcaagaagcagaagggtttcacctcgtccgagccggctaaggtttgcgctgccatccgcaaaggctttctcgcttgtcaccttgccatgtggaagaaactggcggaatggccaaagactatgacgggtcttcctagcacatcagggacaactgccagtgtggtcatcattcggggcatgaagatgtatgtagctcacgtaggtgactcaggggtggttcttggaattcaggatgacccgaaggatgactttgtcagagctgtggaggtgacacaggaccataagccagaacttcccaaggaaagagaacgaatcgaaggacttggtgggagtgtaatgaacaagtctggggtgaatcgtgtagtttggaaacgacctcgactcactcacaatggacctgttagaaggagcacagttattgaccagattccttttctggcagtagcaagagcacttggtgatttgtggagctatgatttcttcagtggtgaatttgtggtgtcacctgaaccagacacaagtgtccacactcttgaccctcagaagcacaagtatattatattggggagtgatggactttggaatatgattccaccacaagatgccatctcaatgtgccaggaccaagaggagaaaaaatacctgatgggtgagcatggacaatcttgtgccaaaatgcttgtgaatcgagcattgggccgctggaggcagcgtatgctccgagcagataacactagtgccatagtaatctgcatctytccagaagtggacaatcagggaaactttaccaatgaagatgagttatacctgaacctgactgacagcccttcctataatagtcaagaaacctgtgtgatgactccttccccatgttctacaccaccagtcaagtcactggaggaggatccatggccaagggtgaattctaaggaccatatacctgccctggttcgtagcaatgccttctcagagaattttttagaggtttcagctgagatagctcgagagaatgtccaaggtgtagtcataccctcaaaagatccagaaccacttgaagaaaattgcgctaaagccctgactttaaggatacatgattctttgaataatagccttccarttggccttgtgcctactaattcaacaaacactgtcatggaccaaaaaaatttgaagatgtcaactcctggccaaatgaaagcccaagaaattgaaagaacccctccaacaaactttaaaaggacattagaagagtccaattctggccccctgatgaagaagcatagacgaaatggcttaagtcgaagtagtggtgctcagcctgcaagtctccccacaacctcacagcgaaagaactctgttaaactcaccatgcgacgcagacttaggggccagaagaaaattggaaatcctttacttcatcaacacaggaaaactgtttgtgtttgctgaaatgcatctgggaaatgaggtttttccaaacttaggatataagagggctttttaaatttggtgccgatgttgaactttttttaaggggagaaaattaaaagaaatatacagtttgactttttggaattcagcagttttatcctggccttgtacttgcttgtattgtaaatgtggattttgtagatgttagggtataagttgctgtaaaatttgtgtaaatttgtatccacacaaattcagtctctgaatacacagtattcagagtctctgatacacagtaattgtgacaatagggctaaatgtttaaagaaatcaaaagaatctattagattttagaaaaacatttaaactttttaaaatacttattaaaaaatttgtataagccacttgtcttgaaaactgtgcaactttttaaagtaaattattaagcagactggaaaagtgatgtattttcatagtgacctgtgtttcacttaatgtttcttagagccaagtgtcttttaaacattattttttatttctgatttcataattcagaactaaatttttcatagaagtgttgagccatgctacagttagtcttgtcccaattaaaatactatgcagtatctcttacatcagtagcatttttctaaaaccttagtcatcagatatgcttactaaatcttcagcatagaaggaagtgtgtttgcctaaaacaatctaaaacaattcccttctttttcatcccagaccaatggcattattaggtcttaaagtagttactcccttctcgtgtttgcttaaaatatgtgaagttttccttgctatttcaataacagatggtgctgctaattcccaacatttcttaaattattttatatcatacagttttcattgattatatgggtatatattcatctaataaatcagtgaactgttcctcatgttgctgaatttgtagttgttggtttattttaatggtatgtacaagttgagtatcccttatccaaaatgcttgggaccagaagtgtttcagattttttaaaattttggaatatttgctttatactgagcttttgagtgttcccaatctgaaattcaaaatgctctaatgagcatttcctttgagcatcatgcctgctctgaaaaagtttctgattctggagcattttggattttggattttcagattagggatgcttaacctggattaacattctgttgtgccatgatcatgctttacagtgagtgtattttatttatttattattttgtttgtttgtttgagatggagtctcactct

SEQ ID NO: 385 - DNA, 1367 bp, Homo sapiens
atggtggcctccatgttcttccrcccgctgttggtggccgccacccttcggaccacactgcgggctgctgctcaggttctgggaagttctggattgtttaataaccatggactccaagtacagcagcaacagcaaaggaatctctcactacatgaatacatgagtatggaattattgcaagaaactggtgtctctgttcccaaaggatatgtggcaaagtgaccagatgaagcttatgcaattgccaaaaaattaggttcaaaagatgttgtgatgaaggcacaggttttagctggtggtagaggaaaaggaacattkgaaagtggcctcaaaggaggagtgaagatggttttctctccagaagaagcaaaagctgttccttcacaaatgattaggaaacagttgtttaccaagcaaatgggagaaaagggcagaatatgcaatcaggtattggtctgtgagtgaaaatatcccaagagagagtgctactttgcaataacaatggaaaggtcatttcaaggtcttgtattaataggaagtttacatagtggggccaacattgaagatgttgctgctgagactcctgaagcaataattaaagtacctattgatattgtagaaggtatcaaagaggaataagctctccagcttgcacagaagatgggatttccatctaatattgtggcttcagcagcagaaaacatgatcaagctttacagcctttttctgaaatacgatgcaaccatgatagaaataaattcaatggtggaagattcagatggagctgcattgtgtaaggatgcaaagatcaattttgactctaattcagcctatcgccaaaagaaaatgtttgatctacaggactggacccaggaagatgaaaggaacaaagatgctgctaaggcagatctcaactacactggcctcgatggaagtataggctgcctagtaaatggtgctggtttggctatggccacaatggatataataaaacttcatggagagactccagctaatttccttgttggtggtggtgctacagtccatcaagtaacagaagcatttaagcctatcacttcagataaaaaggtactggctattctggtcaacatttgtggaggaatcatgcactgtgatattacagcaaagggtatagtcatggcagtaaaaagtttggaaattaaaatacctgttgtggtacagttacaaggtacacaagttgatgatgttaaggcactaaaagcagacagtggacttaaaatacttgcttgtgatgatttggtggaagctgctagagtgcttgtaaagctctctgaaatagtgaagcaaagcaagcgcatgtggatgtgaaatttcaattgccaata

SEQ ID NO: 386 - DNA, 4727 bp, Homo sapiens
gcagcactggccacactataaaattcaggttcagaaaaacagggtaagtcacagacagcaacgcttccagcatttattttctttgcacccatgggcaatttgagaaaatttacctttagaacgaactctgttaaaggtacagacaatacagtactttttattcagaaggtttctgcataaaggtgatagtcttttgacttaatatattattgtctcctgccttgtgtttctggaatgaatgaaggtcattatttagaggataatctgggttgtatttgtgtcgtcagattgaattttcattgcacatgctacttaatgtctttaccaaataataacaaagggaaagaaaaccaaatatagatgtataataaggaaaagctggcctatagaaaataccaaaccagataatagtagcaaagtttaagccaattttgtttttaaaatgtcatgtacgtggaaaaaggtttaactttagttttctttgggtggtggttaaaagttataagtgattaaaagtttttttctttttctacaatgaacattatgtgaccttgcaatttaaaaagccaacgcccttttaagaaagttatgtccatcagtattcctctaacttcattttctctcgtttcttcttccctcacttttctaagttttcctttattaaccccatttttctttagtttgtttgcatgcttccttgcttttctttttttttttcctgggtatgatagagaattagtcccattctctaagtatgtaaatcaaggagtgaattttcaagtagacaaaaatgatttacagcatccttgcattcgctaccgatctctgcttttgttagctcttgtttttagctgggaaaaagccaattaccgccattttaacgtttcaggtgttcttaattcattttgaaacgctgactgatgaaaaaaataaggaatatcctctatgaattatcctgaactggcttataatatattgtttgaattcctgttatgagcttctgtttctttaacaatattttgtaaagtgtgtttcacataacagcagataatcaccagaatgggagtgaatgacttgtggcaaattttggagcctgttaagcaacacatccccttgcgtaatcttggtgggaaaaccattgcagttgatctgagtctctgggtgtgtgaggcacagacagtcaaaaaaatgatgggcagcgtcatgaagccccacctcaggaacttattttttcgtatctcatatttaacacaaatggatgtaaaactggtatttgttatggaaggggaaccaccaaagctgaaagctgatgtcataagcaagaggaatcagwctcggtatgggtcttctggaaaatcgtggtctcagaaaacagggagatcacattttaaatcagtcttaagagagtgcctccatatgctcgaatgcttaggaatcccctgggttcaggctgctggggaagctgaagccatgtgtgcttatctcartgctggtggtcatgtcgatggctgcctcaccaatgatggagatactttcctttatggggcccagactgtttacaggaatttcactatgaatacaaaggacccacatgttgactgttacacaatgtcatctatcaagagtaaactaggtttggatagagatgctctggttggattagcaatacttcttggctgtgattatctcccaaaggttattcaagaattccttttaaacaaggataaattggtgaaggttatcagaattgttaagactcgaatcagaaatggagttcattgttttgaaatagaatgggaaaagcctgaacattatgctatggaagataaacaacatggagaatttgctttattaacaattgaggaagaatcattgtttgaagcagcatatcctgagatcgttgctgtttaccaaaaacaaaagttagaaattaaagggaagaaacaaaaacgtattaagcctaaagaaaacaatttgccagaaccagatgaagtaatgagctttcagtcacacatgactttaaaacccacatgtgaaatctttcataagcagaattccaagttaaattcggggatttcccctgatcctacattaccacaggaatctatttctgcctcattgaatagcttgcttttacctaaaaatactccatgtttgaatgcacaagaacagttcatgtcttctctaagacctttggctatacagcaaattaaagctgtcagtaagtctctaatttcagaatctagtcaacccaatacctcatctcataatatatccgtgattgctgatctacacttgagcactattgactgggaaggtacttcttttagtaattctccagctattcaaaggaatactttttctcatgatttaaaatcagaagttgaatcagagctatcagccatccctgatggctttgaaaatatcccagaacaactgtcctgtgaatcagaaaggtacactgcaaacataaagaaagtgttggatgaggattctgatgggattagtcctgargagcatctactttctggcattactgatttatgtcttcaggatttgcctttaaaggaacgaatatttayaaaattatcatatcctcaggataatctacaaccagatgtcaacctgaaaactttgtccatacttagtgtaaaagaatcttgtattgctaacagtggttctgattgtacatcacatctttcaaaggatcttccaggaattcccttgcaaaatgaatccagagactctaaaattctaaaaggagaccagctgcttcaagaagactataaagtcaatacttctgtcccttattctgtcagtaacacagtggtaaagacctgcaatgttagaccaccaaatactgctttagatcatagtagaaaagttgatatgcaaaccactcggaaaattttaatgaagaagagtgtttgccttgacagacattcctctgatgaacaaagtgccccagtgtttgggaaagctaagtacacaactcaaagaatgaagcacagttctcaaaagcataattcatcccatttcaaagaaagtggccataacaagttgagtagccctaagatacatattaaagaaactgaacagtgtgtcagatcttatgaaacagctgaaaatgaagaaagctgtttcccagattcaacaaaaagttctctgagttctctacaatgtcataagaaagaaaacaactctggtacttgtttggatagccctcttcctttacgccagagattaaaactaagattccaaagcacttgaaatttaaaacacttaggtataacttaactattttagtactatcagcaatagcagagacagagggaaggtatctagttcatgtgtggtaaaaattttaatgttctctgtgtcatgaaacacttgccattttaatcaaagttgtaatttttaaaaagtcacctaaaactctggttttaaaagatcctctgtattgaaaacttctgataatgtatgtcattatgtccttactattccttaattgtagttttaaaatattggtatagtacttgacagagtaaatacttcatctgattgttcatttttactttttcttccacaagcctctaaagtatttatattccagcttgttcccaagaggataattctttatacttctcttcattcttttaaggccttgcaaggtcttccgttataactcgctttcctaaaagctattttctccctcagtgtgaagatacctttagtgtgctcttccactttggaaggccatgcaaggtgttccattataactctttttcctaagagttatattctccctcagtttgaagatacctttagtgtgctcttccacttttggtgtcttagtctcttttgaggggcaaaaatagaaaaggagagaagatgtcagtatgtttagtaaaaatcatgctcgtaatggctgaataaactgagcaaagtaactccttatgtatccccagaagttcacaggtatatcgggtggaaaaagatttggaaaatcaaatgtataaccaaaaggattagaaactagcccaggatcacgtagctaactaataatcctgtgggaatcagttttcttgcctgctaatttttttatttttctattttttccttctatagcacttttcccccttttgttttgaatctatgcaatattgactttaataccaccaaatattaagtcatgcattaatttaggtcgcactcaaaaattctagagaggcatccagattgaaaaggaaaatggtgtctgcagatgacaagattgtatgcatcaaaaattctaagaaatccactagaaaactattaaaactgataaagcgagttcatccaggtcgtagaatacaagaccaatgtgcaatgatcattgcattttgtttttgtttgtttgtttttttttgagacagagtctcactcttgtcgagactggggtgtagtggcgccatcttggctcactgcaacctctgcctcccaggttcacgcaattcacatgcctcagccacctgagtagcagggattacaggtgtgtgccaccatgcctggctaatttttagtatttttagtagagatgggattttcccttgttggtcaggctagtcatgaactcctggcctcaagcgatccacccatcttggcctcccagagtgctgggattacaggtgtgaatcaccatactcagcctcaattgtatttctgtacacctctaaataaatggaaat

SEQ ID NO: 387 - DNA, 1478 bp, Homo sapiens
atgggcctcaggacgactaaacagatrgggagaggcactaaagctcctggtcaccaagaggatcatatggtaaaggaaccagtggaagacacagaccctagcactttatcctttaatatggtagacaaatatcccattcaagatacggaactccctaaagctgaagaatgtgatacaattactttgaactgcccacgaaattcagatatgaaaaatcagggagaagaaaatggctttccagatagcactggagatcctcttccagagatcagcaaggacaactcctgcaaagaaaactgtacttgttyctcctgcttgctccgggcccccaccataagtgacttgctcaatgatcaggacttactagaygtgatcaggataaagctggatccgtgtcacccaacggtgaaaaactggaggaattttgcaagcaaatgggggatgtcctatgacraattgtgcttcctggagcagaggccacagagccccaccttggagttcttgctccggaacagtcagaggacggtgggccagctgatggagctctgcaggctctaccacagggccgacgtggagaaggttctgcgcaggtgggtggacgaggagtggcccaagcgggagcgtggagacccctccaggcacttctagagctcttcttcttccttcattggcctctccggatgttgaaacaaccacaggtcaagaaggaatgtgaatctgttgttttataagagtttaggacaaggacgtggaacagtggacactggttttccccaaagctggcagttttgtggaggggtagcttgtttcggtggtggatctctgtttatttttgcacatctgttataatttaatattcaaatctggaattaagaaaacatattttctagtatcctctaagggccaaagtcctacaatcggaatggattcatgccacgttgaagataaaattatcctctctctgaaatacggtaaagatttaaataggtcctgagactgttgatagccccagacatacccacagcattatatgtaacatctctcctgatcagtgccattcccacggtttcaaagaaaacagctacaaggaatgcttacctgagtgtctgcagcaccctccacttctctcctaggcaatgagacccagtggctagaaattcaccatgtctattctcaagatccatgccagggagctctttgactctcgtgggaatcccactgttgaggttgatctcttcacctcagaaggtctcttcagagctgctgtgcccagtggtgcttcaactggtatctatgaggtcctagagctccaggacaatgataagmctcrctatatggggaagggtgtctcaaagcctgttgagcagctctagccttgcagtcatgtaattggcccaagtgtcatctccggggtggccacaggcaagatccccagtgattttgtgctcaaaataaaaagcctcattgacccatgagaa

SEQ ID NO: 388 - DNA, 1559 bp, Homo sapiens
agtgagctcgtggaagaagcgaaggaggagaagaagaagggaggggaaggcggaggagggcaggggcgcgcagagccacggtttgctccaggcgcgtcggaaccgcaggacttttcatccccgtggtcccacggtcctcccgcgccccggaggcctgccagccccgctcggacgctcgtttgcccctaacccgccgccatggcttcaccggacgaccctctgcgcgcagatcatatggtaaaggaaccagtggaagacacagaccctagcactttatcctttaatatgtcagacaaatatcccattcaagatacggaactccctaaagctgaagaatgtgatacaattactttgaactgcccacgaaattcagatatgaaaaatcagggagaagaaaatggctttccagatagcactggagatcctcttccagagatcagcaaggacaactcctgcaaagaaaactgtacttgttyctcctgcttgctccgggcccccaccataagtgacttgctcaatgatcaggacttactagaygtgatcaggataaagctggatccgtgtcacccaacggtgaaaaactggaggaattttgcaagcaaatgggggatgtcctatgacraattgtgcttcctggagcagaggccacagagccccaccttggagttcttgctccggaacagtcagaggacggtgggccagctgatggagctctgcaggctctaccacagggccgacgtggagaaggttctgcgcaggtgggtggacgaggagtggcccaagcgggagcgtggagacccctccaggcacttctagagctcttcttcttccttcattggcctctccggatgttgaaacaaccacaggtcaagaaggaatgtgaatctgttgttttataagagtttaggacaaggacgtggaacagtggacactggttttccccaaagctggcagttttgtggaggggtagcttgtttcggtggtggatctctgtttatttttgcacatctgttataatttaatattcaaatctggaattaagaaaacatattttctagtatcctctaagggccaaagtcctacaatcggaatggattcatgccacgttgaagataaaattatcctctctctgaaatacggtaaagatttaaataggtcctgagactgttgatagccccagacatacccacagcattatatgtaacatctctcctgatcagtgccattcccacggtttcaaagaaaacagctacaaggaatgcttacctgagtgtctgcagcaccctccacttctctcctaggcaatgagacccagtggctagaaattcaccatgtctattctcaagatccatgccagggagctctttgactctcgtgggaatcccactgttgaggttgatctcttcacctcagaaggtctcttcagagctgctgtgcccagtggtgcttcaactggtatctatgaggtcctagagctccaggacaatgataagmctcrctatatggggaagggtgtctcaaagcctgttgagcccatcaataaaactattgcacctgtc

SEQ ID NO: 389 - DNA, 1823 bp, Homo sapiens
atgcttaaatacacgcactggaatgctgtgtctctgacaaacagaaatcaaatcagcacaaaggcagaccaagaggaagtttatcctcccacctacaaattccccagagagctttcatctagaaggtttgactctggccagacaaccagcgagcatcttctcgcaatctgttgcttcttccatggcaaactccagagaattaagaagccaaactcaacatcgccatgggcctcaggacgactaaacagatrgggagaggcactaaagctcctggtcaccaagagggacttttcatccccgtggtcccacggtcctcccgcgccccggaggcctgccagccccgctcggacgctcgtttgcccctaacccgccgccatggcttcaccggacgaccctctgcgcgcagatcatatggtaaaggaaccagtggaagacacagaccctagcactttatcctttaatatgtcagacaaatatcccattcaagatacggaactccctaaagctgaagaatgtgatacaattactttgaactgcccacgaaattcagatatgaaaaatcagggagaagaaaatggctttccagatagcactggagatcctcttccagagatcagcaaggacaactcctgcaaagaaaactgtacttgttyctcctgcttgctccgggcccccaccataagtgacttgctcaatgatcaggacttactagaygtgatcaggataaagctggatccgtgtcacccaacggtgaaaaactggaggaattttgcaagcaaatgggggatgtcctatgacraattgtgcttcctggagcagaggccacagagccccaccttggagttcttgctccggaacagtcagaggacggtgggccagctgatggagctctgcaggctctaccacagggccgacgtggagaaggttctgcgcaggtgggtggacgaggagtggcccaagcgggagcgtggagacccctccaggcacttctagagctcttcttcttccttcattggcctctccggatgttgaaacaaccacaggtcaagaaggaatgtgaatctgttgttttataagagtttaggacaaggacgtggaacagtggacactggttttccccaaagctggcagttttgtggaggggtagcttgtttcggtggtggatctctgtttatttttgcacatctgttataatttaatattcaaatctggaattaagaaaacatattttctagtatcctctaagggccaaagtcctacaatcggaatggattcatgccacgttgaagataaaattatcctctctctgaaatacggtaaagatttaaataggtcctgagactgttgatagccccagacatacccacagcattatatgtaacatctctcctgatcagtgccattcccacggtttcaaagaaaacagctacaaggaatgcttacctgagtgtctgcagcaccctccacttctctcctaggcaatgagacccagtggctagaaattcaccatgtctattctcaagatccatgccagggagctctttgactctcgtgggaatcccactgttgaggttgatctcttcacctcagaaggtctcttcagagctgctgtgcccagtggtgcttcaactggtatctatgaggtcctagagctccaggacaatgataagmctcrctatatggggaagggtgtctcaaagcctgttgagcagctctagccttgcagtcatgtaattggcccaagtgtcatctccggggtggccacaggcaagatccccagtgattttgtgctcaaaataaaaagcctcattgacccatgagaa

SEQ ID NO: 390 - DNA, 2953 bp, Homo sapiens
atgcttaaatacacgcactggaatgctgtgtctctgacaaacagaaatcaaatcagcacaaaggcagaccaagaggaagtttatcctcccacctacaaattccccagagagctttcatctagaaggtttgactctggccagacaaccagcgagcatcttctcgcaatctgttgcttcttccatggcaaactccagagaattaagaagccaaactcaacatcgccatgggcctcaggacgactaaacagatrgggagaggcactaaagctcctggtcaccaagagggacttttcatccccgtggtcccacggtcctcccgcgccccggaggcctgccagccccgctcggacgctcgtttgcccctaacccgccgccatggcttcaccggacgaccctctgcgcgcagatcatatggtaaaggaaccagtggaagacacagaccctagcactttatcctttaatatgggagaagaaaatggctttccagatagcactggagatcctcttccagagatcagcaaggacaactcctgcaaagaaaactgtacttgttyctcctgcttgctccgggcccccaccataagtgacttgctcaatgatcaggacttactagaygtgatcaggataaagctggatccgtgtcacccaacggtgaaaaactggaggaattttgcaagcaaatgggggatgtcctatgacraattgtgcttcctggagcagaggccacagagccccaccttggagttcttgctccggaacagtcagaggacggtgggccagctgatggagctctgcaggctctaccacagggccgacgtggagaaggttctgcgcaggtgggtggacgaggagtggcccaagcgggagcgtggagacccctccaggcacttctagagctcttcttcttccttcattggcctctccggatgttgaaacaaccacaggtcaagaaggaatgtgaatctgttgttttataagagtttaggacaaggacgtggaacagtggacactggttttccccaaagctggcagttttgtggaggggtagcttgtttcggtggtggatctctgtttatttttgcacatctgttataatttaatattcaaatctggaattaagaaaacatattttctagtatcctctaagggccaaagtcctacaatcggaatggattcatgccacgttgaagataaaattatcctctctctgaaatacggtaaagatttaaataggtcctgagactgttgatagccccagacatacccacagcattatatgtaacatctctcctgatcagtgccattcccacggtttcaaagaaaacagctacaaggaatgcttacctgagtgtctgcagcaccctccacttctctcctaggcaatgagacccagtggctagaaattcaccatgtctattctcaagatccatgccagggagctctttgactctcgtgggaatcccactgttgaggttgatctcttcacctcagaaggtctcttcagagctgctgtgcccagtggtgcttcaactggtatctatgaggtcctagagctccaggacaatgataagmctcrctatatggggaagggtgtctcaaagcctgttgagcccatcaataaaactattgcacctgtcctggttagcaagaaactgaacgtcacagaacaagagaagattgacaaacttatgatagagatggatggaacagaaaataaatctaaatttggtgcaaatgccattctgggagtgtccctcgctgcctgcaaagctagtgctgttgagaagggggttcccctgtaccaccacatcgccgacttgtctggcaactccaaagtcatcttgccagtcccggtgttcratgtcatcaatggcagttctcatgctgtcaccaagctggccatgcaggagttcatggtcctcccagtcggtgcagcaaacttcagggaagccatgcccattggagcggaggtttaccacagcctgaagaatgtcatcaaggagaaatatgggaaagatgccaccggtgtgggggatggaggcgcgtttgctcccaacatcctggagaataaagaaggcctggagctgctgaagactgcgattgggaaagctggctacactgataaggtgatcgtcagcatggaygtagaggcctccgagttcttcaggtctggaaagtatgacctggaattcaagtttctcgacgaccccaccaggtacatctcacctgactgtctggctgacctgtacaagtccttcatcaaaaactacccagtggtgtctactgaagatccctttgaccaggatgactggggagcttggcagaagttcacrgccagtgcaggaatccaggtagtggaggatgatctcagagtgaccaacccaaagaggacagcctcggccgtgaatgagaagaagtgcaactgcctcctgctcaaagtgaaccagattcgctcygtgactgagtcccttcaggcgtgcaagctgkcccaggcsaatggttggtgygtcatggtgcctcatcattctggggagactgaaaataccttcatcactgacctggtggtggggctgtgacctgggcagctcaagactggtgccccttgctgatctgagcgcttggccaagtacaaccagctcctcagaattgaagaggagctgggcmgcaaggctaagtttgcyggcaggaacttcagaaaccccccagccaagtaagctgtgggcaggcaagcccttcagtcacctggtggctaattagacccctccccttgtgtcaactccggcagctcaagacccccgagcaacatttgtaggggccgctgctagttagctacccttgcccaccgccgtggagttcgcacctcttccttagaacttctacagaagcaggttgcagtgagccgagattgcgccactgcacaccagtctggagacagagtgagagtccgtcccag

SEQ ID NO: 391 - DNA, 1646 bp, Homo sapiens
agtgagctcgtggaagaagcgaaggaggagaagaagaagggaggggaaggcggaggagggcaggggcgcgcagagccacggtttgctccaggcgcgtcggaaccgcaggacttttcatccccgtggtcccacggtcctcccgcgccccggaggcctgccagccccgctcggacgctcgtttgcccctaacccgccgccatggcttcaccggacgaccctctgcgcgcagatcatatggtaaaggaaccagtggaagacacagaccctagcactttatcctttaatatggtagacaaatatcccattcaagatacggaactccctaaagctgaagaatgtgatacaattactttgaactgcccacgaaattcagatatgaaaaatcagggagaagaaaatggctttccagatagcactggagatcctcttccagagatcagcaaggacaactcctgcaaagaaaactgtacttgttyctcctgcttgctccgggcccccaccataagtgacttgctcaatgatcaggacttactagaygtgatcaggataaagctggatccgtgtcacccaacggtgaaaaactggaggaattttgcaagcaaatgggggatgtcctatgacraattgtgcttcctggagcagaggccacagagccccaccttggagttcttgctccggaacagtcagaggacggtgggccagctgatggagctctgcaggctctaccacagggccgacgtggagaaggttctgcgcaggtgggtggacgaggagtggcccaagcgggagcgtggagacccctccaggcacttctagagctcttcttcttccttcattggcctctccggatgttgaaacaaccacaggtcaagaaggaatgtgaatctgttgttttataagagtttaggacaaggacgtggaacagtggacactggttttccccaaagctggcagttttgtggaggggtagcttgtttcggtggtggatctctgtttatttttgcacatctgttataatttaatattcaaatctggaattaagaaaacatattttctagtatcctctaagggccaaagtcctacaatcggaatggattcatgccacgttgaagataaaattatcctctctctgaaatacggtaaagatttaaataggtcctgagactgttgatagccccagacatacccacagcattatatgtaacatctctcctgatcagtgccattcccacggtttcaaagaaaacagctacaaggaatgcttacctgagtgtctgcagcaccctccacttctctcctaggcaatgagacccagtggctagaaattcaccatgtctattctcaagatccatgccagggagctctttgactctcgtgggaatcccactgttgaggttgatctcttcacctcagaaggtctcttcagagctgctgtgcccagtggtgcttcaactggtatctatgaggtcctagagctccaggacaatgataagmctcrctatatggggaagggtgtctcaaagcctgttgagcagctctagccttgcagtcatgtaattggcccaagtgtcatctccggggtggccacaggcaagatccccagtgattttgtgctcaaaataaaaagcctcattgacccatgagaa

SEQ ID NO: 392 - DNA, 1122 bp, Homo sapiens
agtgaaatcatccaacatcaaggctatccctgtgaggaatatgaagtcgcaactgaagatgggtatatcctttctgttaacaggattcctcgaggcctagtgcaacctaagaagacaggttccaggcctgtggtgttactgcagcatggcctagttggaggtgctagcaactggatttccaacctgcccaacaatagcctgggcttcattctggcagatgctggttttgacgtgtggatggggaacagcaggggaaacgcctggtctcgaaaacacaagacactctccatagaccaagatgagttctgggctttcagttatgatgagatggctaggtttgaccttcctgcagtgataaactttattttgcagaaaacgggccaggaaaagatctattatgtcggctattcacagggcaccaccatgggctttattgcattttccaccatgccagagctggctcagaaaatcaaaatgtattttgctttagcacccatagccactgttaagcatgcaaaaagccccgggaccaaatttttsttgctgccagatatgatgatcaagggattgtttggcaaaaaagaatttctgtatcagaccagatttctcagacaacttgttatttacctttgtggccaggtgattcttgatcagatttgtagtaatatcatgtyacttctgggtggattcaacaccaacaayatgaayatgagccgagcaagtgtatatgctgcccacactcttgctggaacatctgtgcaaaatattctacactggagccaggcagtgaattctggtgaactccgggcatttgactgggggagtgagaccaaaaatctggaaaaatgcaatcagccaactcctgtaaggtacagagtyagagatatgayggtccctacagcaatgtggacaggaggtcaggactggctttcaaatccagaagacgtgaaaatgctgctctctgaggtgaccaacctcatctaccataagaatattcctgaatgggctcaygtggatttcatctggggtttggatgctcctcaccgtatgtacaatgaaatcatccatctgatgcagcaggaggagaccaacctttcccagggayggtgtgaggccgtattg

SEQ ID NO: 393 - DNA, 1030 bp, Homo sapiens
tcccggcgcagtcaccggcacaggctatggctgcgacttccctcatgtccaggttggctgcctggctgctgcagcccgtgcacagctgctccctctgcccycgccccttccacctcacggcagttacagatgaagctgttgtaatttctggaaggaaactggcccagcagatcaagcaggaagtgcggcaggaggtagaagagtgggtggcctcaggcgacaaacggccacacctgagcatgatcctggttggcgagagttctgcaagtcactcctacgtcctcaacaaaaccagggcagctgcagatgtgggaatcaacagtgagacaattgtgaaaccagcttcaatttcagaggaagaattrttgaatttaatcagcaaactgaataattatgataatgtagatggcctccttgttcagctgcctcttccagacatattgatgagagaaggatctgcaatgctgtttctccagacaaggatgctgatggctttcatgtaattaatgcagggcgaatgtgtttggaccagtattccatgttaccggctaccccatgcggtgtgtgggaaataattaagcgaactgacattccaaccctagggaagaatgtggttgtggctggaaggtcaaaaagtgttgaaatgcccattgcaatgttactgcacacagatggggtgcatgaacgtcccggaggtgatgccactgttacaatatcttatcgatatacttccaaagagcagttgaagaaacatacaattcttgcagatattgtaatatctgctgcaggtattccaaatctgatcacagcagatatgatcaaggaagaagcagcagtcactgatatgggaataaatagagttcatgatcctgtaactgccaaactgaagttggttggagatgtggattttgaaggagtcagacaaaaagccggttatatcactccagttcctggaggtgttggccccatgacagtggcaatgctaatgaagaataccattatggccgggcgcggtggctcacacctgtaa

SEQ ID NO: 394 - DNA, 1242 bp, Homo sapiens
tcccggcgcagtcaccggcacaggctatggctgcgacttccctcatgtccaggttggctgcctggctgctgcagcccgtgcacagctgctccctctgcccycgccccttccacctcacggcagttacagatgaagctgttgtaatttctggaaggaaactggcccagcagatcaagcaggaagtgcggcaggaggtagaagagtgggtggcctcaggcgacaaacggccacacctgagcatgatcctggttggcgagagttctgcaagtcactcctacgtcctcaacaaaaccagggcagctgcagatgtgggaatcaacagtgagacaattgtgaaaccagcttcaatttcagaggaagaattrttgaatttaatcagcaaactgaataattatgataatgtagatggcctccttgttcagctgcctcttccagacatattgatgagagaaggatctgcaatgctgtttctccagacaaggatgctgatggctttcatgtaattaatgcagggcgaatgtgtttggaccagtattccatgttaccggctaccccatgcggtgtgtgggaaataattaagcgaactgacattccaaccctagggaagaatgtggttgtggctggaaggtcaaaaagtgttgaaatgcccattgcaatgttactgcacacagatggggtgcatgaacgtcccggaggtgatgccactgttacaatatcttatcgatatacttccaaagagcagttgaagaaacatacaattcttgcagatattgtaatatctgctgcaggtattccaaatctgatcacagcagatatgatcaaggaagaagcagcagtcactgatatgggaataaatagagttcatgatcctgtaactgccaaactgaagttggttggagatgtggattttgaaggagtcagacaaaaagccggttatatcactccagttcctggaggtgttggccccatgacagtggcaatgctaatgaagaataccattatttttccagaaattttttaagagtttgagttaatattgaatttaagcagactttctgattaaaggtctttttttcttttttaataaaacacatctgtctggtgtgatatgaatttctgaaattctgtcttcctatgactcctagttgtgacctaacctgagtttttttcttatttaatcaatgtagatattcctatattcagtaacacttacttctatagccttaaatagataattttttt

SEQ ID NO: 395 - DNA, 660 bp, Homo sapiens
atggccaaccccactgtgttcttcaacattgcaattgatagtgagtccttgggctgcatctccttcaagctatttgcagacaaagttctaaagatggaagaaaatttttgtgctctgaacacyggagagaaagtatttgaattattccggggtgtgtgtcagggtggtgacttcacacaccataatggcactggtggcaagtccctctacagcaaggaatttgatgatgagaacttcatcctaagcatacagctcctggcgtcttgtccacggcaaatgctggacccaccacaaatggttcccagtttttcwtctgtactgccaagacagaggatggatgacagcatgtggtctttggcaagccctcaggagctgcagaccactgttgcacgtgggctgttacccacagggtttgagtatgagctaaggcaagagaagcagaaaccaggaccagatgggaactcccaggaagaaggcagcatggtcatgagcaacatcaaagacatcaaagataaatcaagccaagacaggaatgaagagaaggatgccttggtcaaggtcagcttaaagtcagttgttaacttagacgtgcccttcctccaaccagaaaatggaaaatgtcagatgcctcccaattgtcctgagtccgtgcatcctttc

SEQ ID NO: 396 - DNA, 1242 bp, Homo sapiens
aggtttaaataaaatagaatgtatttctctccatacgacaatcttaggatagtccagggcaggtaggcaattccgttccacaaggtcataaggagaacaggctagaggagcagccctctcttccttaacatgtaatttctgaattttggtcccagtgagtcctgtacttttcatcatttccgagccagagagaagagggaaaaagaatagaagacaggcaaatttctcataaaaataaaatccagaaggcacacatttcacttctgctaacatctcattggccaaaacttagaacctggctatagttacctgcaaaggaggctggaaatgcagtctctagctaagcaatcatatgtcagaaattggcatttccaaatacccagtggatattcatcaggatatacaaatgagaagttggaattcctgggaattcttagaaatttctgaaataataagttatccttttaaaaaaaaaacttttattttaggttcagggatacatgtataggtttgttataaagataaactcgtgttattctgaaaagacttccatttgcagacatcgctgctgcccagaactccctgccaccagccatggccaaccccactgtgttcttcaacattgcaattgatagtgagtccttgggctgcatctccttcaagctatttgcagacaaagttctaaagatggaagaaaatttttgtgctctgaacacyggagagaaagtatttggtgataaakgtccctgcttttacagaattattccggggtgtgtgtcagggtggtgacttcacacaccataatggcactggtggcaagtccctctacagcaaggaatttgatgatgagaacttcatcctaagcatacagctcctggcgtcttgtccacggcaaatgctggacccaccacaaatggttcccagtttttcwtctgtactgccaagacagaggatggatgacagcatgtggtctttggcaaggtgaaagatggcatgagtattgtggaagccctggaacgctctgggtccaggaatggtaagaccagcaagaagatcacagctgctgactgtggacaactctaataaatttgattgttttatctgaaccaccagatcgttccttctatagctcaggaaagcatgcttccaccccatttgctcacagcatcctataatctttgcacagtcctttgggttccatattttccttatcctcttccatgtctagctggatcgcagagt

SEQ ID NO: 397 - DNA, 2439 bp, Homo sapiens
ggaattgctaaaatgcacggaattgctcctgcttcaagatgtcaagaccgagggagcttgagctgttctataccttttccgggaaggacaactgagtcccacaggatcacatgttgaatggtgtaaacagcttatagctgctacaatttctagtcagatttcaggttcagtgacatcagaaaatgtgtccagagattacaaggttttcaggaggcctgatctaagggctctaagggatggaaataagctggcacagatggaagaggctccacttttcccaggagaatcaattaaagccattgtgaaagatgtcatgtatatctgcccatttatgggagcagtgagtggaaccctgacagtgacggactttaagctgtacttcaaaaatgtcgagagggacccgcattttatccttgatgttccccttggagtgatcagcagagtggagaagattggagcacagagccatggagacaattcctgtggtatagagatagtgtgcaaggatatgaggaacttgcggcttgcttataaacaggaagaacagagtaaactagggatatttgaaaacctcaacaaacatgcatttcctctttctaacggacaggcactatttgcattcagctataaagaaaaatttccaattaatggctggaaagtttatgatccagtatctgaatataagagacagggcttgccaaatgagagttgtgttgtcatggattcatccggaaagtcaagcaacgattacccgttgcagccagccacttgtgggtcccaatgataagcgctgcaaagaggatgaaaaatacttgcaaacaataatggatgctaacgcacagtcacacaagcttatcatctttgatgctcgacaaaacagtgtcgctgataccaacaagacaaagggtggaggatatgaaagtgaaagtgcttacccaaatgcagaacttgtgttcttggagatccacaacattcatgtcatgcgagagtcactacgcaaattaaaagagattgtgtacccttcgatcgatgaggcgcggtggctctccaatgtggatgggacgcattggctggaatatataaggatgctgcttgctggggcagtaagaattgctgataaaatagaatctgggaaaacatctgtggtggtgcattgcagcgacggttgggaccgaacagcccagctcacatctctggctatgctaatgttggacagttactacaggaccattaaaggatttgaaactctcgtagaaaaggagtggataagctttggacacaggtttgcactgcgagtgggccatggtaatgacaaccatgcggatgctgaccgatctcccatatttctgcagtttgttgattgtgtttggcaaatgacaaggcagtttccttcagcattcgagtttaatgagctattcttgattacaattttggatcacctttatagctgtctttttgggacctttttgtgcaactgtgaacagcagcgattcaaagaggatgtatatacaaagacgatatctttatggtcgtatatcaatagccagctagacgagttttctaatcccttctttgtgaattatgaaaaccacgtgttatatcctgttgctagtctgagtcatttggaattgtgggtaaattattatgtacgatggaatccacggatgagacctcagatgcccattcaccagaatctcaaggagctgctggccgtcagggcggagctgcagaagcgtgtggagggyctacagcgggaggtggccacgcgcgccgtctcatcctcatctgagcggggctcctcgccctcccactccgccacctccgtccacacctcggtctgatgggcgagaaatatgtaatcccctggctgactaggactgttaaacatagtgtggactggatgatgccttcgacaaaccagagaagccaagttggggggagctggtgcctggagtgggccctgtgcacctcacctggcggaggctgggggggctctgtcagcaggaccctagaggagactctcattcgattttaaagaagcacaacgggtcattttcctttgtatgttcctagcgcagaactgtttctaaaacaacttgaagtatagttttgttatctaagcaatttttkttttaagtaagtaagtgtactagaatgcgaagccgttatggttcaggtttttaaaaactggtacagtattgtatytgtctcatctgttgcactgtatttcaatcatctgtaattaaaatgatcatatgtttrctccctggtcttttttaagtaagtaagtaagtatcttagtagatttttcctttgaggaaaatcggtaataaaataacatggattgaatgtttactgtgcgtcaagcacagttaatatatgatgatgtaaagtaactaactttatgtgatttaattcattcagtaaattgtaaatgta

SEQ ID NO: 398 - DNA, 4142 bp, Homo sapiens
ggaattgctaaaatgcacggaattgctcctgcttcaagatgtcaagaccgagggagcttgagctgttctataccttttccgggaaggacaactgagtcccacaggatcacatgttgaatggtgtaaacagcttatagctgctacaatttctagtcagatttcaggttcagtgacatcagaaaatgtgtccagagattacaaggctctaagggatggaaataagctggcacagatggaagaggctccacttttcccaggagaatcaattaaagccattgtgaaagatgtcatgtatatctgcccatttatgggagcagtgagtggaaccctgacagtgacggactttaagctgtacttcaaaaatgtcgagagggacccgcattttatccttgatgttccccttggagtgatcagcagagtggagaagattggagcacagagccatggagacaattcctgtggtatagagatagtgtgcaaggatatgaggaacttgcggcttgcttataaacaggaagaacagagtaaactagggatatttgaaaacctcaacaaacatgcatttcctctttctaacggacaggcactatttgcattcagctataaagaaaaatttccaattaatggctggaaagtttatgatccagtatctgaatataagagacagggcttgccaaatgagagttggaaaatatccaaaataaacagtaattatgagttctgtgacacctaccctgccatcattgttgtgccaactagtgtaaaagatgatgacctttcaaaagtggcagcttttcgagcaaaaggcagagtccctgtgttgtcatggattcatccggaaagtcaagcaacgattacccgttgcagccagccacttgtgggtcccaatgataagcgctgcaaagaggatgaaaaatacttgcaaacaataatggatgctaacgcacagtcacacaagcttatcatctttgatgctcgacaaaacagtgtcgctgataccaacaagacaaagggtggaggatatgaaagtgaaagtgcttacccaaatgcagaacttgtgttcttggagatccacaacattcatgtcatgcgagagtcactacgcaaattaaaagagattgtgtacccttcgatcgatgaggcgcggtggctctccaatgtggatgggacgcattggctggaatatataaggatgctgcttgctggggcagtaagaattgctgataaaatagaatctgggaaaacatctgtggtggtgcattgcagcgacggttgggaccgaacagcccagctcacatctctggctatgctaatgttggacagttactacaggaccattaaaggatttgaaactctcgtagaaaaggagtggataagctttggacacaggtttgcactgcgagtgggccatggtaatgacaaccatgcggatgctgaccgatctcccatatttctgcagtttgttgattgtgtttggcaaatgacaaggcagtttccttcagcattcgagtttaatgagctattcttgattacaattttggatcacctttatagctgtctttttgggacctttttgtgcaactgtgaacagcagcgattcaaagaggatgtatatacaaagacgatatctttatggtcgtatatcaatagccagctagacgagttttctaatcccttctttgtgaattatgaaaaccacgtgttatatcctgttgctagtctgagtcatttggaattgtgggtaaattattatgtacgatggaatccacggatgagacctcagatgcccattcaccagaatctcaaggagctgctggccgtcagggcggagctgcagaagcgtgtggagggyctacagcgggaggtggccacgcgcgccgtctcatcctcatctgagcggggctcctcgccctcccactccgccacctccgtccacacctcggtctgatgggcgaggtcagcctgctgctccactgtctcccggtggctcaggaaagggacctggcgatcactgttatggctgtagcttgtgatcttgtcttttaggattaggcccagggaccatttgtgtggctaggtgacagctcccactgttggcaaccgttaccctcctgtcagcggtttcacaggggagccgtctgtcacgcccaccctgtgaagcaacttctggcattcaggcagcttgggagaaactaagtgaacggaatgcagtactgaggttcaagaaagctgtacgccatttctttccaacttaaatccttcagtaacaacaaacaccactcacttcaagatgcattgccagccccgtggcttccctcagctcttggccacaacttgaaaactgtcttgaatgaagtacttggggagaagacaggccactgccctctgttccacagttttcttcatgcacggggtcctcctgttaacaattactgttgtgtacatataaggtatttttagagaagagaaacaggcctttattttcctatgtccttttttacgtttagaatagtcacccgaggggggatcagctcaactgtactgtgggagaaattcttttccaacaaacctcatgctcgtttttctgtggtgcaatttcaagggcaacgtgttctgtcctcacctcactctggtactcgcctcttggggcggctcagcccattcatggggatggcaccaagcggccatgctcagtcttccagccccgctgagggtaaaccgaggcctctggcagctgtgcacaggtgctggcctctggctccttcaaggagcactgcctgtcactcgctcctgggctgtctagccatgtctcccacccccactttaccgcagccagctgctgggatcaaagcaagtctgttcttatgttatttgcctgtatgaaatcatttctcattttatcacaattccttcaactcagcttactcgcgtggctgcctgttcatatttgaaagcagccaccgtgctgtggctttggtttggaaaagcatagcacgcacttcccttggttttcccttcccagagccgaccgcagctggtcagccctctcttcccgctcctgaacctttacttactgactttgagctctgtgactccgtcggttctcgcaggaattaactaacttaccaattggttcaatccacttgagcgccatagctctgagctcctctgtgtgacatgccacagatgactattgcacacctgggtcctgccccagcaggccatgcccctcccatgtgccgtgcctgttgctgcagctgccccccsaccccgccactggctgcaggaattcagcctttagaggcagaggcagctgcagcggcccctgaggtcaaaccccagtgtgactgcatagcagtgttagctggttggtttcaaactactggattccaggcaaaggcctacagattgaccttattatttttgaaaatatgttaagggttttttcatagagagagaaagaatggatttttttttaactgggaacctcctgattcttacggaaaattatccttctataagaagataccagagagatttattcaaggtaatttgataacytaaaatcaattctccattttttatcatatgtgggatttgttgctaagtcgtgttcaacaatagcttttatgttcctaacatatctgaaagcttatttatgaatggatatactggattattgatatactgattttttttttaatggggacatttgccattttcttcccagaaatatgtaatcccctggctgactaggactgttaaacatagtgtggactggatgatgccttcgacaaaccagagaagccaagttggggggagctggtgcctggagtgggccctgtgcacctcacctggcggaggctgggggggctctgtcagcaggaccctagaggagactctcattcgattttaaagaagcacaacgggtcattttcctttgtatgttcctagcgcagaactgtttctaaaacaacttgaagtatagttttgttatctaagcaatttttkttttaagtaagtaagtgtactagaatgcgaagccgttatggttcaggtttttaaaaactggtacagtattgtatytgtctcatctgttgcactgtatttcaatcatctgtaattaaaatgatcatatgttt

SEQ ID NO: 399 - DNA, 4349 bp, Homo sapiens
gggtaacgcggggccgccaggtgacagctaatggcggcggccgcctgaggcgggcgggcggtatagagcgggcggcaggaggcaagcagcgaaaccttcccggccgccgctcccgtcccgacggcggcttccccaaggcggcaggactcggcgcgccatggacaggccggcggcggcggcggcggcgggctgcgagggcggcgggggcccgaacccggggccggcgggcggcaggaggcctcctcgggccgcggggggcgccaccgccggctcccggcagcccagcgtggagaccctggacagtcccacaggatcacatgttgaatggtgtaaacagcttatagctgctacaatttctagtcagatttcaggttcagtgacatcagaaaatgtgtccagagattacaaggctctaagggatggaaataagctggcacagatggaagaggctccacttttcccaggagaatcaattaaagccattgtgaaagatgtcatgtatatctgcccatttatgggagcagtgagtggaaccctgacagtgacggactttaagctgtacttcaaaaatgtcgagagggacccgcattttatccttgatgttccccttggagtgatcagcagagtggagaagattggagcacagagccatggagacaattcctgtggtatagagatagtgtgcaaggatatgaggaacttgcggcttgcttataaacaggaagaacagagtaaactagggatatttgaaaacctcaacaaacatgcatttcctctttctaacggacaggcactatttgcattcagctataaagaaaaatttccaattaatggctggaaagtttatgatccagtatctgaatataagagacagggcttgccaaatgagagttggaaaatatccaaaataaacagtaattatgagttctgtgacacctaccctgccatcattgttgtgccaactagtgtaaaagatgatgacctttcaaaagtggcagcttttcgagcaaaaggcagagtccctgtgttgtcatggattcatccggaaagtcaagcaacgattacccgttgcagccagccacttgtgggtcccaatgataagcgctgcaaagaggatgaaaaatacttgcaaacaataatggatgctaacgcacagtcacacaagcttatcatctttgatgctcgacaaaacagtgtcgctgataccaacaagacaaagggtggaggatatgaaagtgaaagtgcttacccaaatgcagaacttgtgttcttggagatccacaacattcatgtcatgcgagagtcactacgcaaattaaaagagattgtgtacccttcgatcgatgaggcgcggtggctctccaatgtggatgggacgcattggctggaatatataaggatgctgcttgctggggcagtaagaattgctgataaaatagaatctgggaaaacatctgtggtggtgcattgcagcgacggttgggaccgaacagcccagctcacatctctggctatgctaatgttggacagttactacaggaccattaaaggatttgaaactctcgtagaaaaggagtggataagctttggacacaggtttgcactgcgagtgggccatggtaatgacaaccatgcggatgctgaccgatctcccatatttctgcagtttgttgattgtgtttggcaaatgacaaggcagtttccttcagcattcgagtttaatgagctattcttgattacaattttggatcacctttatagctgtctttttgggacctttttgtgcaactgtgaacagcagcgattcaaagaggatgtatatacaaagacgatatctttatggtcgtatatcaatagccagctagacgagttttctaatcccttctttgtgaattatgaaaaccacgtgttatatcctgttgctagtctgagtcatttggaattgtgggtaaattattatgtacgatggaatccacggatgagacctcagatgcccattcaccagaatctcaaggagctgctggccgtcagggcggagctgcagaagcgtgtggagggyctacagcgggaggtggccacgcgcgccgtctcatcctcatctgagcggggctcctcgccctcccactccgccacctccgtccacacctcggtctgatgggcgaggtcagcctgctgctccactgtctcccggtggctcaggaaagggacctggcgatcactgttatggctgtagcttgtgatcttgtcttttaggattaggcccagggaccatttgtgtggctaggtgacagctcccactgttggcaaccgttaccctcctgtcagcggtttcacaggggagccgtctgtcacgcccaccctgtgaagcaacttctggcattcaggcagcttgggagaaactaagtgaacggaatgcagtactgaggttcaagaaagctgtacgccatttctttccaacttaaatccttcagtaacaacaaacaccactcacttcaagatgcattgccagccccgtggcttccctcagctcttggccacaacttgaaaactgtcttgaatgaagtacttggggagaagacaggccactgccctctgttccacagttttcttcatgcacggggtcctcctgttaacaattactgttgtgtacatataaggtatttttagagaagagaaacaggcctttattttcctatgtccttttttacgtttagaatagtcacccgaggggggatcagctcaactgtactgtgggagaaattcttttccaacaaacctcatgctcgtttttctgtggtgcaatttcaagggcaacgtgttctgtcctcacctcactctggtactcgcctcttggggcggctcagcccattcatggggatggcaccaagcggccatgctcagtcttccagccccgctgagggtaaaccgaggcctctggcagctgtgcacaggtgctggcctctggctccttcaaggagcactgcctgtcactcgctcctgggctgtctagccatgtctcccacccccactttaccgcagccagctgctgggatcaaagcaagtctgttcttatgttatttgcctgtatgaaatcatttctcattttatcacaattccttcaactcagcttactcgcgtggctgcctgttcatatttgaaagcagccaccgtgctgtggctttggtttggaaaagcatagcacgcacttcccttggttttcccttcccagagccgaccgcagctggtcagccctctcttcccgctcctgaacctttacttactgactttgagctctgtgactccgtcggttctcgcaggaattaactaacttaccaattggttcaatccacttgagcgccatagctctgagctcctctgtgtgacatgccacagatgactattgcacacctgggtcctgccccagcaggccatgcccctcccatgtgccgtgcctgttgctgcagctgccccccsaccccgccactggctgcaggaattcagcctttagaggcagaggcagctgcagcggcccctgaggtcaaaccccagtgtgactgcatagcagtgttagctggttggtttcaaactactggattccaggcaaaggcctacagattgaccttattatttttgaaaatatgttaagggttttttcatagagagagaaagaatggatttttttttaactgggaacctcctgattcttacggaaaattatccttctataagaagataccagagagatttattcaaggtaatttgataacytaaaatcaattctccattttttatcatatgtgggatttgttgctaagtcgtgttcaacaatagcttttatgttcctaacatatctgaaagcttatttatgaatggatatactggattattgatatactgattttttttttaatggggacatttgccattttcttcccagaaatatgtaatcccctggctgactaggactgttaaacatagtgtggactggatgatgccttcgacaaaccagagaagccaagttggggggagctggtgcctggagtgggccctgtgcacctcacctggcggaggctgggggggctctgtcagcaggaccctagaggagactctcattcgattttaaagaagcacaacgggtcattttcctttgtatgttcctagcgcagaactgtttctaaaacaacttgaagtatagttttgttatctaagcaatttttkttttaagtaagtaagtgtactagaatgcgaagccgttatggttcaggtttttaaaaactggtacagtattgtatytgtctcatctgttgcactgtatttcaatcatctgtaattaaaatgatcatatgttt

SEQ ID NO: 400 - DNA, 2753 bp, Homo sapiens
gggtaacgcggggccgccaggtgacagctaatggcggcggccgcctgaggcgggcgggcggtatagagcgggcggcaggaggcaagcagcgaaaccttcccggccgccgctcccgtcccgacggcggcttccccaaggcggcaggactcggcgcgccatggacaggccggcggcggcggcggcggcgggctgcgagggcggcgggggcccgaacccggggccggcgggcggcaggaggcctcctcgggccgcggggggcgccaccgccggctcccggcagcccagcgtggagaccctggacagtcccacaggatcacatgttgaatggtgtaaacagcttatagctgctacaatttctagtcagatttcaggttcagtgacatcagaaaatgtgtccagagattacaaggctctaagggatggaaataagctggcacagatggaagaggctccacttttcccaggagaatcaattaaagccattgtgaaagatgtcatgtatatctgcccatttatgggagcagtgagtggaaccctgacagtgacggactttaagctgtacttcaaaaatgtcgagagggacccgcattttatccttgatgttccccttggagtgatcagcagagtggagaagattggagcacagagccatggagacaattcctgtggtatagagatagtgtgcaaggatatgaggaacttgcggcttgcttataaacaggaagaacagagtaaactagggatatttgaaaacctcaacaaacatgcatttcctctttctaacggacaggcactatttgcattcagctataaagaaaaatttccaattaatggctggaaagtttatgatccagtatctgaatataagagacagggcttgccaaatgagagttggaaaatatccaaaataaacagtaattatgagttctgtgacacctaccctgccatcattgttgtgccaactagtgtaaaagatgatgacctttcaaaagtggcagcttttcgagcaaaaggcagagtccctgtgttgtcatggattcatccggaaagtcaagcaacgattacccgttgcagccagccacttgtgggtcccaatgataagcgctgcaaagaggatgaaaaatacttgcaaacaataatggatgctaacgcacagtcacacaagcttatcatctttgatgctcgacaaaacagtgtcgctgataccaacaagacaaagggtggaggatatgaaagtgaaagtgcttacccaaatgcagaacttgtgttcttggagatccacaacattcatgtcatgcgagagtcactacgcaaattaaaagagattgtgtacccttcgatcgatgaggcgcggtggctctccaatgtggatgggacgcattggctggaatatataaggatgctgcttgctggggcagtaagaattgctgataaaatagaatctgggaaaacatctgtggtggtgcattgcagcgacggttgggaccgaacagcccagctcacatctctggctatgctaatgttggacagttactacaggaccattaaaggatttgaaactctcgtagaaaaggagtggataagctttggacacaggtttgcactgcgagtgggccatggtaatgacaaccatgcggatgctgaccgatctcccatatttctgcagtttgttgattgtgtttggcaaatgacaaggcagtttccttcagcattcgagtttaatgagctattcttgattacaattttggatcacctttatagctgtctttttgggacctttttgtgcaactgtgaacagcagcgattcaaagaggatgtatatacaaagacgatatctttatggtcgtatatcaatagccagctagacgagttttctaatcccttctttgtgaattatgaaaaccacgtgttatatcctgttgctagtctgagtcatttggaattgtgggtaaattattatgtacgatggaatccacggatgagacctcagatgcccattcaccagaatctcaaggagctgctggccgtcagggcggagctgcagaagcgtgtggagggyctacagcgggaggtggccacgcgcgccgtctcatcctcatctgagcggggctcctcgccctcccactccgccacctccgtccacacctcggtctgatgggcgagaaatatgtaatcccctggctgactaggactgttaaacatagtgtggactggatgatgccttcgacaaaccagagaagccaagttggggggagctggtgcctggagtgggccctgtgcacctcacctggcggaggctgggggggctctgtcagcaggaccctagaggagactctcattcgattttaaagaagcacaacgggtcattttcctttgtatgttcctagcgcagaactgtttctaaaacaacttgaagtatagttttgttatctaagcaatttttkttttaagtaagtaagtgtactagaatgcgaagccgttatggttcaggtttttaaaaactggtacagtattgtatytgtctcatctgttgcactgtatttcaatcatctgtaattaaaatgatcatatgtttrctccctggtcttttttaagtaagtaagtaagtatcttagtagatttttcctttgaggaaaatcggtaataaaataacatggattgaatgtttactgtgcgtcaagcacagttaatatatgatgatgtaaagtaactaactttatgtgatttaattcattcagtaaattgtaaatgta

SEQ ID NO: 401 - DNA, 2592 bp, Homo sapiens
ggaattgctaaaatgcacggaattgctcctgcttcaagatgtcaagaccgagggagcttgagctgttctataccttttccgggaaggacaactgagtcccacaggatcacatgttgaatggtgtaaacagcttatagctgctacaatttctagtcagatttcaggttcagtgacatcagaaaatgtgtccagagattacaaggagattcaggaagaacacaatggctacccttctgaagctgaagctgatcaggctctaagggatggaaataagctggcacagatggaagaggctccacttttcccaggagaatcaattaaagccattgtgaaagatgtcatgtatatctgcccatttatgggagcagtgagtggaaccctgacagtgacggactttaagctgtacttcaaaaatgtcgagagggacccgcattttatccttgatgttccccttggagtgatcagcagagtggagaagattggagcacagagccatggagacaattcctgtggtatagagatagtgtgcaaggatatgaggaacttgcggcttgcttataaacaggaagaacagagtaaactagggatatttgaaaacctcaacaaacatgcatttcctctttctaacggacaggcactatttgcattcagctataaagaaaaatttccaattaatggctggaaagtttatgatccagtatctgaatataagaggcttgccaaatgagagttggaaaatatccaaaataaacagtaattatgagttctgtgacacctaccctgccatcattgttgtgccaactagtgtaaaagatgatgacctttcaaaagtggcagcttttcgagcaaaaggcagagtccctgtgttgtcatggattcatccggaaagtcaagcaacgattacccgttgcagccagccacttgtgggtcccaatgataagcgctgcaaagaggatgaaaaatacttgcaaacaataatggatgctaacgcacagtcacacaagcttatcatctttgatgctcgacaaaacagtgtcgctgataccaacaagacaaagggtggaggatatgaaagtgaaagtgcttacccaaatgcagaacttgtgttcttggagatccacaacattcatgtcatgcgagagtcactacgcaaattaaaagagattgtgtacccttcgatcgatgaggcgcggtggctctccaatgtggatgggacgcattggctggaatatataaggatgctgcttgctggggcagtaagaattgctgataaaatagaatctgggaaaacatctgtggtggtgcattgcagcgacggttgggaccgaacagcccagctcacatctctggctatgctaatgttggacagttactacaggaccattaaaggatttgaaactctcgtagaaaaggagtggataagctttggacacaggtttgcactgcgagtgggccatggtaatgacaaccatgcggatgctgaccgatctcccatatttctgcagtttgttgattgtgtttggcaaatgacaaggcagtttccttcagcattcgagtttaatgagctattcttgattacaattttggatcacctttatagctgtctttttgggacctttttgtgcaactgtgaacagcagcgattcaaagaggatgtatatacaaagacgatatctttatggtcgtatatcaatagccagctagacgagttttctaatcccttctttgtgaattatgaaaaccacgtgttatatcctgttgctagtctgagtcatttggaattgtgggtaaattattatgtacgatggaatccacggatgagacctcagatgcccattcaccagaatctcaaggagctgctggccgtcagggcggagctgcagaagcgtgtggagggyctacagcgggaggtggccacgcgcgccgtctcatcctcatctgagcggggctcctcgccctcccactccgccacctccgtccacacctcggtctgatgggcgagaaatatgtaatcccctggctgactaggactgttaaacatagtgtggactggatgatgccttcgacaaaccagagaagccaagttggggggagctggtgcctggagtgggccctgtgcacctcacctggcggaggctgggggggctctgtcagcaggaccctagaggagactctcattcgattttaaagaagcacaacgggtcattttcctttgtatgttcctagcgcagaactgtttctaaaacaacttgaagtatagttttgttatctaagcaatttttkttttaagtaagtaagtgtactagaatgcgaagccgttatggttcaggtttttaaaaactggtacagtattgtatytgtctcatctgttgcactgtatttcaatcatctgtaattaaaatgatcatatgtttrctccctggtcttttttaagtaagtaagtaagtatcttagtagatttttcctttgaggaaaatcggtaataaaataacatggattgaatgtttactgtgcgtcaagcacagttaatatatgatgatgtaaagtaactaactttatgtgatttaattcattcagtaaattgtaaatgta

SEQ ID NO: 402 - DNA, 2056 bp, Homo sapiens
tttgcatgtattttcataagggatgttaatctgtggttttctcttcttgtgatgtctttgtctagctttggtatcaggatacagctagcctcatggaatgaactaggaagtatgccctcctcttctagtttttggatgacccatcatctcttacctcacctacagcaggaaccttgaaattggacttctgcctcacaccctgcaatctcatctccacattatgaccagagtgatcttcttttttwaaaaaaacttattgttactatttcaattgataaatgaattgtatatatttatggtgtacaacgtggtattttgattgtgtacacattgtggaatggctaaatcaagctaattaacacaccattttttgtggtgagaacacttaaaatctactctcagcagttttcagatacagactacattgttattgactgtagtcaccatgttgtacagagtgatcttctcagtggacaactctgtgcacatccctcagagccgcaaggcagtgatatccaggttcctgaacagggtctccaaagccctccacccacgggtcctttccttcctgtctcgccacatcttccaggtccatgtctcagctatgtgaggttcttttcagttccttaagcacatcccactgttagctcagagatatgttgcagtcctaactccaagtacctataaatgtggccttatttcacaatagggtctttgtaaatgtaattaagttaggatgtggtcatattgaattggggggtgggggttaagccaaatgactgtgtccttagaagaagaggagaagagacagacacagacaaaggaaagaaggtcaggtggaaatggaggcagagatcagaatgatgtgtgtataagccaagaacacctgggrctatcggaacctggggcagccaaggaaggatcctcccctagagtgttcggaggaagcatggcactgccgataccttgaattcagacttccagcctccagaactaggagagaataaacttctgttgttttaagccactgagtttgtggttctttttccagcagccctaggaaactcatacaaggatataggaggtttatttgcagatgagtttgttgcttctttagtggtctgtatctcatagcactagaaagaatagaaaagttaattccagataatgtgatgtatttgttttgtttttcgtagacaaagggtggaggatatgaaagtgaaagtgcttacccaaatgcagaacttgtgttcttggagatccacaacattcatgtcatgcgagagtcactacgcaaattaaaagagattgtgtacccttcgatcgatgaggcgcggtggctctccaatgtggatgggacgcattggctggaatatataaggatgctgcttgctggggcagtaagaattgctgataaaatagaatctgggaaaacatctgtggtggtgcattgcagcgacggttgggaccgaacagcccagctcacatctctggctatgctaatgttggacagttactacaggaccattaaaggatttgaaactctcgtagaaaaggagtggataagctttggacacaggtttgcactgcgagtgggccatggtaatgacaaccatgcggatgctgaccgatctcccatatttctgcagtttgttgattgtgtttggcaaatgacaaggcagtttccttcagcattcgagtttaatgagctattcttgattacaattttggatcacctttatagctgtctttttgggacctttttgtgcaactgtgaacagcagcgattcaaagaggcatggggggctgggacccagcgagcccgtggctctctcaggagtagatgagtgctagaccctggacctcctgactccgagttcatgtagtctccgctgcaccaactccaaaaccgtgggattctgcttttcatcctctgtggtgttggccagatcatacttgaaggccttggaaatggagtctgctgattagccaaaaagcccactttaggtagcaagctaacacttttttacatcaaagtagtaaagaagcagttacc

SEQ ID NO: 403 - DNA, 2964 bp, Homo sapiens
gggtaacgcggggccgccaggtgacagctaatggcggcggccgcctgaggcgggcgggcggtatagagcgggcggcaggaggcaagcagcgaaaccttcccggccgccgctcccgtcccgacggcggcttccccaaggcggcaggactcggcgcgccatggacaggccggcggcggcggcggcggcgggctgcgagggcggcgggggcccgaacccggggccggcgggcggcaggaggcctcctcgggccgcggggggcgccaccgccggctcccggcagcccagcgtggagaccctggacagtcccacaggatcacatgttgaatggtgtaaacagcttatagctgctacaatttctagtcagatttcaggttcagtgacatcagaaaatgtgtccagagattacaaggctctaagggatggaaataagctggcacagatggaagaggctccacttttcccaggagaatcaattaaagccattgtgaaagatgtcatgtatatctgcccatttatgggagcagtgagtggaaccctgacagtgacggactttaagctgtacttcaaaaatgtcgagagggacccgcattttatccttgatgttccccttggagtgatcagcagagtggagaagattggagcacagagccatggagacaattcctgtggtatagagatagtgtgcaaggatatgaggaacttgcggcttgcttataaacaggaagaacagagtaaactagggatatttgaaaacctcaacaaacatgcatttcctctttctaacggacaggcactatttgcattcagctataaagaaaaatttccaattaatggctggaaagtttatgatccagtatctgaatataagagacagggcttgccaaatgagagttggaaaatatccaaaataaacagtaattatgagttctgtgacacctaccctgccatcattgttgtgccaactagtgtaaaagatgatgacctttcaaaagtggcagcttttcgagcaaaaggcagagtccctgtgttgtcatggattcatccggaaagtcaagcaacgattacccgttgcagccagccacttgtgggtcccaatgataagcgctgcaaagaggatgaaaaatacttgcaaacaataatggatgctaacgcacagtcacacaagcttatcatctttgatgctcgacaaaacagtgtcgctgataccaacaagacaaagggtggaggatatgaaagtgaaagtgcttacccaaatgcagaacttgtgttcttggagatccacaacattcatgtcatgcgagagtcactacgcaaattaaaagagattgtgtacccttcgatcgatgaggcgcggtggctctccaatgtggatgggacgcattggctggaatatataaggatgctgcttgctggggcagtaagaattgctgataaaatagaatctgggaaaacatctgtggtggtgcattgcagcgacggttgggaccgaacagcccagctcacatctctggctatgctaatgttggacagttactacaggaccattaaaggatttgaaactctcgtagaaaaggagtggataagctttggacacaggtttgcactgcgagtgggccatggtaatgacaaccatgcggatgctgaccgatctcccatatttctgcagtttgttgattgtgtttggcaaatgacaaggcagtttccttcagcattcgagtttaatgagctattcttgattacaattttggatcacctttatagctgtctttttgggacctttttgtgcaactgtgaacagcagcgattcaaagaggcatggggggctgggacccagcgagcccgtggctctctcaggagtagatgagtgctagaccctggacctcctgactccgagttcatgtagtctccgctgcaccaactccaaaaccgtgggattctgcttttcatcctctgtggtgttggccagatcatacttgaaggccttggaaatggagtctgctgattagccaaaaagcccactttaggatgtatatacaaagacgatatctttatggtcgtatatcaatagccagctagacgagttttctaatcccttctttgtgaattatgaaaaccacgtgttatatcctgttgctagtctgagtcatttggaattgtgggtaaattattatgtacgatggaatccacggatgagacctcagatgcccattcaccagaatctcaaggagctgctggccgtcagggcggagctgcagaagcgtgtggagggyctacagcgggaggtggccacgcgcgccgtctcatcctcatctgagcggggctcctcgccctcccactccgccacctccgtccacacctcggtctgatgggcgagaaatatgtaatcccctggctgactaggactgttaaacatagtgtggactggatgatgccttcgacaaaccagagaagccaagttggggggagctggtgcctggagtgggccctgtgcacctcacctggcggaggctgggggggctctgtcagcaggaccctagaggagactctcattcgattttaaagaagcacaacgggtcattttcctttgtatgttcctagcgcagaactgtttctaaaacaacttgaagtatagttttgttatctaagcaatttttkttttaagtaagtaagtgtactagaatgcgaagccgttatggttcaggtttttaaaaactggtacagtattgtatytgtctcatctgttgcactgtatttcaatcatctgtaattaaaatgatcatatgtttrctccctggtcttttttaagtaagtaagtaagtatcttagtagatttttcctttgaggaaaatcggtaataaaataacatggattgaatgtttactgtgcgtcaagcacagttaatatatgatgatgtaaagtaactaactttatgtgatttaattcattcagtaaattgtaaatgta

SEQ ID NO: 404 - DNA, 1521 bp, Homo sapiens
gggtaacgcggggccgccaggtgacagctaatggcggcggccgcctgaggcgggcgggcggtatagagcgggcggcaggaggcaagcagcgaaaccttcccggccgccgctcccgtcccgacggcggcttccccaaggcggcaggactcggcgcgccatggacaggccggcggcggcggcggcggcgggctgcgagggcggcgggggcccgaacccggggccggcgggcggcaggaggcctcctcgggccgcggggggcgccaccgccggctcccggcagcccagcgtggagaccctggacagtcccacaggatcacatgttgaatggtgtaaacagcttatagctgctacaatttctagtcagatttcaggttcagtgacatcagaaaatgtgtccagagattacaaggctctaagggatggaaataagctggcacagatggaagaggctccacttttcccaggagaatcaattaaagccattgtgaaagatgtcatgtatatctgcccatttatgggagcagtgagtggaaccctgacagtgacggactttaagctgtacttcaaaaatgtcgagagggacccgcattttatccttgatgttccccttggagtgatcagcagagtggagaagattggagcacagagccatggagacaattcctgtggtatagagatagtgtgcaaggatatgaggaacttgcggcttgcttataaacaggaagaacagagtaaactagggatatttgaaaacctcaacaaacatgcatttcctctttctaacggacaggcactatttgcattcagctataaagaaaaatttccaattaatggctggaaagtttatgatccagtatctgaatataagagacagggcttgccaaatgagagttggaaaatatccaaaataaacagtaattatgagttctgtgacacctaccctgccatcattgttgtgccaactagtgtaaaagatgatgacctttcaaaagtggcagcttttcgagcaaaaggcagagtccctgtgttgtcatggattcatccggaaagtcaagcaacgattacccgttgcagccagccacttgtgggtcccaatgataagcgctgcaaagaggatgaaaaatacttgcaaacaataatggatgctaacgcacagtcacacaagcttatcatctttgatgctcgacaaaacagtgtcgctgataccaacaagctttggtatcaggatacagctagcctcatggaatgaactaggaagtatgccctcctcttctagtttttggatgacccatcatctcttacctcacctacagcaggaaccttgaaattggacttctgcctcacaccctgcaatctcatctccacattatgaccagagtgatcttcttttttwaaaaaaacttattgttactatttcaattgataaatgaattgtatatatttatggtgtacaacgtggtattttgattgtgtacacattgtggaatggctaaatcaagctaattaacacaccattttttg

SEQ ID NO: 405 - DNA, 2026 bp, Homo sapiens
cggaagtggccggtcagcgtcgctgccggtctccggcggagacggactctggagtttgrgcggccsgggcggccactaggtactctgatattccgtactaaacacgtctgcaagtcaagatgtcgcacccgtccccccaagccaagccctccaaccccagtaaccctcgagtcttctttgacgtggacatcggaggggagcgagttggtcgaattgtcttagaattgtttgcagatatcgtacccaaaactgcggaaaattttygtgcactgtgtacaggagaaaaaggcattggacacacgactgggaaacctctccatttcaaaggatgcccttttcatcgaattattaagaaatttatgattcagggtggagacttctcaaatcagaatgggacaggtggagaaagtatttatggtgaaaaatttgaagatgaaaatttccattacaagcatgatcgggagggtttactgagcatggcaaatgcaggccgcaacacaaacggttctcagttttttatcacaacagttccaactcctcatttggatgggaaacatgtggtgtttggccaagtaattaaaggaataggagtggcaaggatattggaaaatgtggaagtgaaaggtgaaaaacctgctaaattgtgcgttattgcagaatgtggagaattgaaggaaggagatgacgggggaatattcccaaaagatggctctggcgacagtcatccagatttccctgaggatgcggatatagatttaaaagatgtagataaaattttattaataacagaagacttaaaaaacattggaaatacttttttcaaatcccagaaytgggagatggctattaaaaaatatgcagaagttttaagatacgtggacagttcaaaggctgttattgagacagcagatagagccaagctgcaacctatagctttaagctgtgtactgaatattggtgcttgtaaactgaagatgtcaaattggcagggagcaattgacagttgtttagaggctcttgaamtagacccatcaaataccaaagcattgtaccgcagagctcaaggatggcaaggattaaaagaatatgatcaagcattggctgatcttaagaaagctcaggrgatagcaccagaagataaagctatccaggcagaattgctgaaagtcaaacaaaagataaaggcacagaaagataaagagaaggcagtatatgcaaaaatgtttgcttagaaaggattcagttttgcttattgtgtgttgattgtataaatgcaataagaaaatgtaaaggtttttgtctrtgaatatgatccctaatgtgtttcttttgacaccttagttccttactgtttacagtttaggagtactgataggggttcatgcttaataaacatgtcacaatacagtaagtaaagtggttttgtttgtttctttgagatggagtcttgctctgtcacccaggctggagtgcggtggcgcaatctcggctcactgcatcctctgcctcccgggttcaagcaattctcctgcctcagcttcccaagtagctgggattacaggcacgtgccaccacgcccagctaatttttgtatttttagtagagatggggtttcaccatattggtcacgtcacgttggtcttgaactcctgaccttgtgatccaccccgccttggcctcccaaagtgctgggattacaggtgtgagccaccgtgcccggccaagtaaaatgttttttaaaatggttatgtgcattattcataaaaaataatggtgtccagtctttttaaacttgtaaagacacatcttattgaataaagagatgagagcttaagtttgtatattgtttccttcgattctttgatgtatccatggtggatgatgctaggttttcatacttatagataatacacacacacacacacacacaaacttgttcagggatgggcatacttyttctgcaagggccagatcataaagtttttaggctttgtagaccatgtaatgtcacacccactcamctgca

SEQ ID NO: 406 - DNA, 1923 bp, Homo sapiens
tccggaagctgcctctggctgctctgttaacgtgtcccgcgagcgaggcgcgtcgcaaaaggtcgcggcggaacttccctgcgcttttcagaccmtactctttacggtactaggcactgctgagctgggagatgtcggcggcgtgttgggaggaaccgtggggtcttcccggcrgctttgcgaagcgggtcctggtgaccggcggtgctggtttcattgcatcacatatgattgtctctttagtggaagattatccaaactatatgatcataaatctagacaagctggattactgtgcaagcttgaagaatcttgaaaccatttctaacaaacagaactacaaatttatacagggtgacatatgtgattctcactttgtgaaactgctttttgaaacagagaaaatagatatagtactacattttgcygcacaaacacatgtagatctttcattcgtacgtgcctttgagtttacctatgttaatgtttatggcactcacgttttggtaagtgctgctcatgaagccagagtggagaagtttatttatgtcagcacagatgaagtatatggtggcagtcttgataaggaatttgatgaatcttcacccaaacaacctacaaatccttatgcatcatctaaagcagctgctgaatgttttgtacagtcttactgggaacaatataagtttccagttgtcatcacaagaagcagtaatgtttatggaccacatcaatatccagaaaaggttattccaaaatttatatctttgctacagcacaacaggaaatgttgcattcatgggtcagggcttcaaacaagaaacttcctttatgctactgatgttgtagaagcatttctcactgtcctcaaaaaagggaaaccaggtgaaatttataacatcggaaccaattttgaaatgtcagttgtccagcttgccaaagaactaatacaactgatcaaagagaccaattcagagtctgaaatggaaaattgggttgattatgttaatgatagacccaccaatgacatgagatacccaatgaagtcagaaaaaatacatggcttaggatggagacctaaagtgccttggaaagaaggaataaagaaaacaattgaatggtacagagagaattttcacaactggaagaatgtggaaaaggcattagaaccctttccggtataatcaccatttatatagtcgagacagttgtcaaagaagaaagttatcctacctcgccaagtggtatgaaattaagtgaccaaatgaagtgcactcttttcttttggaattagattcatgactttctgtataaaattcaaatgcagaatgcctcaatctttgggagagtttcagtactggcatagaatttaaatgtcaaaattctttctgaaaccctttctcctagaaactaggaaataatagstgtagaagactctccctaagggtagccaggaagaagtctcctgattcggacaaccatgaggggtagtggtgctagggagaaggcaaccttcactggttttgaactcagtgcctaagaaagtctctgaaatgttcgtttttaggcaatataggatgtcttaggccctaattcaccatttcttttttaagatctgatatgctatcattgccttaataatggaacaaaatagaagcatatctaacactttttaaattgataattttgtaaaattgattamgttgaatgctttttaagagaagtgtgtaaagtttttatattttcacaaaaatttatcatgtttactgtttaaaatgattgtatttataaaattgtcaatatcttaatgtatttaatgtagaatattgctttttaaaataatgtttttattttgctgtagaaaaataaaaaaaaatttgattatatatttttaatccttctttgccctaaagactttaagaa

SEQ ID NO: 407 - DNA, 1224 bp, Homo sapiens
atgtgcagcaataacatgtcagccccgctgccagccatcgtgcccgccacctggaaggccaccgcggcggtgattttccttcatggattgggagatactgggcaccgatggatagaagcctttgcaggtatcagaagttcacatatcaaatatatctgcctgcatgctcctgttatgcctttacattaaatatgaacatggctgtgccttcatggtttgatattattgggctttcaccagattcacaggaggacgaacctgggattaaacaggcagcagaaaatataaaagctttgatcgatcaagaagtgaagaatggcattccttctaaccgaattattgtaggaggattttctcagggaggagctttatctttatatactgcccttaccacgtagcagaaactggcggatgtcactgcgctcagttgctggcttccacttcgggcttcatttccacagggtcctatcaggggcgctaacagagatatttctattctccagtgccacggagattgtgacccgttagttcccctgatgtttggttctcttacggttgaaaaactaaaaactttggcgatccagccaatgtgacctttaaaacctatgatggtatgatacatagctcatgtcaacaggaaatgatggatgtcaagcaattcattgataaactcctacttccaattgattgacgtcactaagaggccttgtgtagaagtacaccagcatcactgtagtagagtataaaccttttcccatgcccagtcttcaaatttctaatgcttacagtgttaaaatgttttgcaaatacacgccaatgacacagatcaaataacgtctcctcataagaaatttatgaccttttaagtttctatacatgtattcttataagaagatccaggatatactatgttaaaatagatgaagcaggtagcttcttttttctcaaatgtaattcagcaaaataatacaatactgccaccagattttttattacatcatttgaaaattagcagtatgcttactgaaaatttgttcggatataaatgagcagttaagatgtaaacaatttatgcatgctgtgacttggtctatggatttattccaaaattgcttagtcacgacgcagtgtctgtatttttatatatgtattcatatatacatgattgtaatacataataagaatgaagtggtattacwttattcctaataatacagataatgc

SEQ ID NO: 408 - DNA, 1814 bp, Homo sapiens
cagtcatagctttctctctggcagagtccgatggcccgagtcccgctccacagtgcgggtggagggcacggaggggtgtgtgtggggggcgacagcccaggaagwctagggggcggcagggcgcgtgggggcgggggttgggagaccgcagggaggatccccgaccttgtctgaagatccaagcaggcggagccgcggtctggtccgcggggtaggcggggcgcaagagtgttcccgggggcggggggccgacccgcgtctaaaggtttccgcgattcacccgccggcgcctggcctggcccagttgcaycacgagcgctgcggacactcggggcggcagtcggtctgtcagtcctcccgccaggtcccgcggcccgcacctgccgcccgcacctgcagctccgcacctgcggccagtgcctactgccctctcttgccgcccgcacctgcagccccgcacctgccgcttgcacctgcagccccgcgctctacccggttcaagcatggctgaccaggcgcccttcgacacggacgtcaacaccctgacccgcttcgtcatggaggagggcaggaaggcccgcggcacgggckagttgacccagctgctcaactcgctctgcacagcagtcaaagccatctcttcggcggtgcgcaaggcgggcatcgcgcacctctatggcattgctggttctaccaacgtgacaggtgatcaagttaagaagctggacgtcctctccaacgacctggttatgaacatgttaaagtcatcctttgccacktgtgttctcgtgtcagaagaagataaacacgccatcatagtggaaccggagaaaaggggtaaatatgtggtctgttttgatccccttgatggatcttccaacatcgattgccttgtgtccgttggaaccatttttggcatctatagaaagaaatcaactgatgagccttctgagaaggatgctctgcaaccaggccggaacctggtggcagccrgctacgcactgtatggcagtgccaccatgctggtccttgccatggactgtggggtcaactgcttcatgctggacccggccatcggggagttcattttggtggacaaggatgtgaagataaaaaagaaaggtaaaatctacagccttaasgagggctacgcyarggactttgaccctgccgtcactgagtacatccagaggaagaagwtccccccagataattcagctccttatggggcccggtatgtgggctccatggtggctgatgttcatcgcactctggtctacrgagggatatttctgtaccccgctaacaagaagagccccaatggaaagctgagactgctgtacgaatgcaaccccatggcctacgtcatggagaaggctggggkaatggccaccactgggaaggaggccgtgttagacgtcattcccacagacattcaccagagggcgccggtgatcttgggrtcccccgacgacgtgctcgagttcctgaaggtgtatgagaagcactctgcccagtgagcacctgccctgcctgyatcyggagaattgcctctacctggaccttttgtctcacacagcagtaccctgacctgctgtgcaccttacattcctagagagcagaaataaaaagcatgactakttccmccatcaaatgctgtagaatgcttggcactccctaaccaaatgctgtctccataatgccactggtgttaagatatattttgagtggatggaggagaaataaacttattcctccttaaaaaaagtctcccttgctttgtgtcaaataataatgatgatgacaataataac

SEQ ID NO: 409 - DNA, 2021 bp, Homo sapiens
atggatttgcagccgctgcaagtgtgtggaagggccgtgttcgtgttggcaaagaaggtcggctgctgagccagggcgtgtctcccggaggcctgtgggctgccaggatccccacctctctgcaatgggctgcccaggctgaccagccggttcctgctggaagctcctggtctgatctggggataccatgtccaagccccccgacctcctgctgcggctgctccggggcgccccaaggcagcgggtctgcaccctgttcatcatcggcttcaagttcacgtttttcgtctccatcatgatctactggcacgttgtgggagagcccaaggagaaagggcagctctataacctgccagcagagatcccctgccccaccttgacaccccccaccccaccctcccacggccccactccaggcaacatcttcttcctggagacttcagaccggaccaaccccaacttcctgttcatgtgctcggtggagtcggccgccagaactcaccccgaatcccacgtgctggtcctgatgaaagggcttccgggtggcaacgcctctctgccccggcacctgggcatctcacttctgagctgcttcccgaatgtccagatgctcccgctggacctgcgggagctgttccgggacacacccctggccgactggtacgcggccgtgcaggggcgctgggagccctacctgctgcccgtgctctccgacgcctccaggatcgcactcatgtggaagttcggcggcatctacctggacacggacttcattgttctcaagaacctgcggaacctgaccaacgtgctgggcacccagtcccgctacgtcctcaacggcgcgttcctggccttcgagcgccggcacgagttcatggcgctgtgcatgcgggacttcgtggaccactacaacggctggatctggggtcaccagggcccgcagctgctcacgcgggtcttcaagaagtggtgttccatccgcagcctggccgagagccgcgcctgccgcggcgtcaccaccctgccccctgaggccttctaccccatcccctggcaggactggaagaagtactttgaggacatcaacccsgaggagctgccgcggctgctcagtgccacctatgctgtccacgtgtggaacaagaagagccagggcacgcggttcgaggccacrtccagggcactgctggcccagctgcatgcccgctactgccccacgacgcacgaggccatgaaaatgtacttgtgaggggcccgccaggtcacctccccaacctgctcctgatggggcactgggccgcccttcccggggaggcaagattgagggcccgggagagggaggcccgagctgccaccgggcttaggcaggctgttgaggagctgtgggagcaggcccagtgggaggctgtggacaccccgaggacagtgtcctgtctcgaggcagggctgacacatggtgccatagccagcggagggcgctcagtgagtgccccgggccttctagacaacaggcaggaaggatgaacctcagggcacccccaggtggtgcggaaagccaggcagttgggacagaggtgcccacgagggcagaggccrgtgctaaggggatggggaagaagggacaagattcccagagaggagaggaggctgttggtaggaaagtggcagggctgggggagacmcagccccaagggtccggggcggaggatrctttgttcttttctggttttggttcctctttcgcggggggtgggggaggtcaacagggactgagtggggcagaggcccagaagtgccagcctggggagccgtttgggggcagccccttctgcccaccccatccttcttcctctccagagatgccaggggggcgtgtatgctctrccccttccctcagacaggggctgggtggggaggctctttaggctcaggagaagcattttaaagaaacccccaccctgccgcccgcattataaacacaggagaataatcaatagaataaaagtgaccgactgtcactt

SEQ ID NO: 410 - DNA, 2079 bp, Homo sapiens
cgcgccgcccgcccgccggggccccgctgtccgccgcccgccgccgctggagctagagatggatttgcagccgctgcaagtgtgtggaagggccgtgttcgtgttggcaaagaaggtcggctgctgagccagggcgtgtctcccggaggcctgtgggctgccaggatccccacctctctgcaatgggctgcccaggctgaccagccggttcctgctggaagctcctggtctgatctggggataccatgtccaagccccccgacctcctgctgcggctgctccggggcgccccaaggcagcgggtctgcaccctgttcatcatcggcttcaagttcacgtttttcgtctccatcatgatctactggcacgttgtgggagagcccaaggagaaagggcagctctataacctgccagcagagatcccctgccccaccttgacaccccccaccccaccctcccacggccccactccaggcaacatcttcttcctggagacttcagaccggaccaaccccaacttcctgttcatgtgctcggtggagtcggccgccagaactcaccccgaatcccacgtgctggtcctgatgaaagggcttccgggtggcaacgcctctctgccccggcacctgggcatctcacttctgagctgcttcccgaatgtccagatgctcccgctggacctgcgggagctgttccgggacacacccctggccgactggtacgcggccgtgcaggggcgctgggagccctacctgctgcccgtgctctccgacgcctccaggatcgcactcatgtggaagttcggcggcatctacctggacacggacttcattgttctcaagaacctgcggaacctgaccaacgtgctgggcacccagtcccgctacgtcctcaacggcgcgttcctggccttcgagcgccggcacgagttcatggcgctgtgcatgcgggacttcgtggaccactacaacggctggatctggggtcaccagggcccgcagctgctcacgcgggtcttcaagaagtggtgttccatccgcagcctggccgagagccgcgcctgccgcggcgtcaccaccctgccccctgaggccttctaccccatcccctggcaggactggaagaagtactttgaggacatcaacccsgaggagctgccgcggctgctcagtgccacctatgctgtccacgtgtggaacaagaagagccagggcacgcggttcgaggccacrtccagggcactgctggcccagctgcatgcccgctactgccccacgacgcacgaggccatgaaaatgtacttgtgaggggcccgccaggtcacctccccaacctgctcctgatggggcactgggccgcccttcccggggaggcaagattgagggcccgggagagggaggcccgagctgccaccgggcttaggcaggctgttgaggagctgtgggagcaggcccagtgggaggctgtggacaccccgaggacagtgtcctgtctcgaggcagggctgacacatggtgccatagccagcggagggcgctcagtgagtgccccgggccttctagacaacaggcaggaaggatgaacctcagggcacccccaggtggtgcggaaagccaggcagttgggacagaggtgcccacgagggcagaggccrgtgctaaggggatggggaagaagggacaagattcccagagaggagaggaggctgttggtaggaaagtggcagggctgggggagacmcagccccaagggtccggggcggaggatrctttgttcttttctggttttggttcctctttcgcggggggtgggggaggtcaacagggactgagtggggcagaggcccagaagtgccagcctggggagccgtttgggggcagccccttctgcccaccccatccttcttcctctccagagatgccaggggggcgtgtatgctctrccccttccctcagacaggggctgggtggggaggctctttaggctcaggagaagcattttaaagaaacccccaccctgccgcccgcattataaacacaggagaataatcaatagaataaaagtgaccgactgtcactt

SEQ ID NO: 411 - DNA, 2355 bp, Homo sapiens
tccggaccctttcttcccatcctttgctcctaggattttacatgttgcctgcaaagggagtcaaacttagggggcaggcaaacaaacgagttctttccagcctctgtaaccggatcgctagagcgaaataaactcgcacaagtgtccagagatcgtagccagacagccagcctgcgcttgaagcaacttttaagtgaggctgcaagagccgccgggatgtagattttagttcgtggccaagcacaactacgacaccctgtccctgcccccaccccatccccaagaatgcatggaggaaggagagaggacgaggtgagggccgcctgcatttctgcacgtcggcgccggttagaaaccctgcagttttgagagagaagaagaggagatggaggggccaggagccacgactcccgggagagcgcagggaggggcgtgggtgccccttcgcccacctccgcccccgtcacctcgacagctgtcccgctcttggaattcattggcttcctctacccggcctcccaaacaccaccccaatctagtttagccccccgccccaccctcgctgacctaataaggccatgcagtgtgcggggsagctacataaaagcgcgrgctcgcggcgactctgcaccacgcaggggaagagaaagcaggagccgtccagcacggaggaaggcgaccatggccaaggagtggggctacgccagtcacaacggtcctgaccactggcatgaacttttcccaaatgccaagggggaaaaccagtcgcccrttgagctgcatactaaagacatcaggcatgacccttctctgcagccatggtctgtgtcttatgatggtggctctgccaagaccatcctgaataatgggaagacctgccgagttgtatttgatgatacttatgataggtcaatgctgagagggggtcctctccctggaccctaccgacttcgccagtttcatcttcactggggctcttcggatgatcatggctctgagcacaccgtggatggagtcaagtatgcagcggagcttcatttggttcactggaacccgaagtataacacttttaaagaagccctgaagcagcgcgatgggatcgctgtgattggcatttttctgaagataggacatgagaatggcgagttccagattttccttgatgcattggacaagattaagacaaagggcaaggaggcgcccttcacaaagtttgacccatcctgcctgttcccggcatgccgggactactggacctaccagggctcattcaccacgccgccctgcgaggaatgcattgtgtggctgctgctgaaggagcccatgaccgtgagctctgaccagatggccaagctgcggagcctcctctccagtrctgagaacgagcccccagtgcctcttgtgagcaactggcgacctccacagcctatcaataacagggtggtgagagcttccttcaaatgaggctgctggatcttgccctcttcaggaaaggaaacctaccaytggagagcttggttccttgcctccttctggtgctcytactccaagtctatttcatttttccacactgagcaatgaatgtgagagatgtggtcaccaagatctaagttacttgttgaaagaaagttactttcgacaagatctaatatgaaagcatagatttcacatttgatctctgtaataatcatctttcctataaaagtagcatttttggtaaagtttcaaagaagaagaaacagagatggaagagtaaagatatttttaaaatggctagctattgggcaccagtttttctgttatctaaaatttcacacaacttcattgtttttatttttatattatgagttgtcmatcttaaagaaatatgagtaattctacatgtagtagaggtgtatgaagatcatataacaattaaacataagccagaaattaaaatgactatagacagcaagaattgagctaataatatgttttaactcttaacaccagcaagaagtcagtcatttattgaagttttagctactaagattacttggttttgattaccagtgaaaagaaaacacaatacaatcaggagttttcaaatttttgattcagtatttgaatttcttcttcataaatgtagttgaatttatcctagtatttttctttacctgaagkagggccatttatttttaatttcactacatttttctttgcatgattattaaaataaaaactgcctctgttgtgtttctcactggaggctggaatgaatgatcactagaacacaaaagagtgaatgatgacacttgaagtcaaagcagttgtactgatcaccagaaccaataaagacataaatggaaaacgttg

SEQ ID NO: 412 - DNA, 1824 bp, Homo sapiens
tccggaccctttcttcccatcctttgctcctaggattttacatgttgcctgcaaagggagtcaaacttagggggcaggcaaacaaacgagttctttccagcctctgtaaccggatcgctagagcgaaataaactcgcacaagtgtccagagatcgtagccagacagccagcctgcgcttgaagcaacttttaagtgaggctgcaagagccgccgggatgtagattttagttcgtggccaagcacaactacgacaccctgtccctgcccccaccccatccccaagaatgcatggaggaaggagagaggacgaggtgagggccgcctgcatttctgcacgtcggcgccggttagaaaccctgcagttttgagagagaagaagaggagatggaggggccaggagccacgactcccgggagagcgcagggaggggcgtgggtgccccttcgcccacctccgcccccgtcacctcgacagctgtcccgctcttggaattcattggcttcctctacccggcctcccaaacaccaccccaatctagtttagccccccgccccaccctcgctgacctaataaggccatgcagtgtgcggggsagctacataaaagcgcgrgctcgcggcgactctgcaccacgcaggggaagagaaagcaggagccgtccagcacggaggaaggcgaccatggccaaggagtggggctacgccagtcacaacggtcctgaccactggcatgaacttttcccaaatgccaagggggaaaaccagtcgcccrttgagctgcatactaaagacatcaggcatgacccttctctgcagccatggtctgtgtcttatgatggtggctctgccaagaccatcctgaataatgggaagacctgccgagttgtatttgatgatacttatgataggtcaatgctgagagggggtcctctccctggaccctaccgacttcgccagtttcatcttcactggggctcttcggatgatcatggctctgagcacaccgtggatggagtcaagtatgcagcggagcttcatttggttcactggaacccgaagtataacacttttaaagaagccctgaagcagcgcgatgggatcgctgtgattggcatttttctgaagataggacatgagaatggcgagttccagattttccttgatgcattggacaagattaagacaaagggcaaggaggcgcccttcacaaagtttgacccatcctgcctgttcccggcatgccgggactactggacctaccagggctcattcaccacgccgccctgcgaggaatgcattgtgtggctgctgctgaaggagcccatgaccgtgagctctgaccagatggccaagctgcggagcctcctctccagtrctgagaacgagcccccagtgcctcttgtgagcaactggcgacctccacagcctatcaataacagggtggtgagagcttccttcaaatgaggctgctggatcttgccctcttcaggaaaggaaacctaccaytggagagcttggttccttgcctccttctggtgctcytactccaagtctatttcatttttccacactgagcaatgaatgtgagagatgtggtcaccaagatctaagttacttgttgaaagaaagttactttcgacaagatctaatatgaaagcatagatttcacatttgatctctgtaataatcatctttcctataaaagtagcattttggctagctattgggcaccagtttttctgttatctaaaatttcacacaacttcattgtttttatttttatattatgagttgtcmatcttaaagaaatatgagtaattctac

SEQ ID NO: 413 - DNA, 1465 bp, Homo sapiens
tgtagatgctgccactttggactctttcactgctgctgggagcagtagcaggaaaagaagtttgctacgaaagactcggctgcttcagtgatgactccccmtggtcaggaattacggaaagacccctccatatattgccttggtctccaaaagatgtcaacacccgcttcctcctatatactaatgagaacccaaacaactttcaagaagttgccgcagattcatcaagcatcagtggctccaatttcaaaacaaatagaaaaactcgctttattattcatggattcatagacaagggagaagaaaactggctggccaatgtgtgcaagaatctgttcaaggtggaaagtgtgaactgtatctgtgtggactggaaaggtggctcccgaactggatacacacaagcctcgcagaacatcaggatcgtgggagcagaagtggcatattttgttgaatttcttcagtcggcgttcggttactcaccttccaaygtgcatgtcattggccacagcctgggtgcccacgctgctggggaggctggaaggagaaccaatgggaccattggacgcatcacagggttggacccagcagaaccttgctttcagggcacacctgaattagtccgattggaccccagcgatgccaaatttgtggatgtaattcacacggatggtgcccccatagtccccaatttggggtttggaatgagccaagtcgtgggccacctagatttctttccaaatggaggagtggaaatgcctggatgtaaaaagaacattctctctcagattgtggacatagayrgaatctgggaagggactcgagactttgcggcctgtaatcacttaagaagctacaaatattacactgatagcatcgtcaaccctgatggcyttgctggattcccctgtgcctcttacaacgtcttcactgcaaacaagtgtttcccttgtccaagtggaggctgcccacagatgggtcactatgctgatagatatcctgggaaaacaaatgatgtgggccagaaattttatctagacactggtgatgccagtaattttgcacgttggaggtataaggtatctgtcacactgtctggaaaaaaggttacaggacacatactagtttctttgttcggaaataaaggaaactctaagcagtatgaaattttcaagggcactctcaaaccagatagtactcattccaatgaatttgactcagatgtggatgttggggacttgcagatggttaaatttatttggtataacaatgtgatcaacccaactttacctagagtgggagcatccaagattatagtggagacaaatgttggaaaacagttcaacttctgtagtccagaaacygtcagggaggaagttctgctcaccctcacaccgtgttaggagactactgttatttgaccaatgaattgacttctaataaaatctagtggtgatgcattaca

SEQ ID NO: 414 - DNA, 2047 bp, Homo sapiens
gaggaagcaaccatgcaggtgctaaccaagcgttaccccaagaactgcctgctgaccgtcatggaccggtatgcagccgaggtgcacaacatggagcaggtggtgatgatccccagccttctgcgggacgtgcagctgagtgggcctgggggccaggcccaggctgaggcccctgatctctacacctacttcaccatgctcaaggccatctgtgtggatgtggaccatgggctgctgccrcgggaggagtggcaggccaaggtggcaggcagcgaagagaatggaaccgcagagacagaggaagtcgaggacgagagtgcctcaggagagctggacctggaagcccagttccacctgcacttctccagcctccatcacatcctcatgcacctcaccgagaaagcccaggaggtgacaaggaaataccaggaaatgacgggacaagtttggtagaccttggacactagggaagatcccttcacatgatagaagacagactctttgatgaggtcggcggagcagttcactagccaatgatgagagcagaaaggcctagacctgcagccagaagtgaaggcrgctcagttctccgggatgcttctctacctcctgagcaccaattcctggattccagtcactggctcacctttagaatgtctgttgctattcactgctcccctcgctcctcttaacagcttggggaggtgaccagtggttcaggagggactagacaattacctgtccagtgtggtatggtaggaagagtgtaggtgttggcacgtgaccaaaattcacatccctcctcatggcagtcattcagtatgtgtacttgtacaagttatttaacccattggagcctaaattccctcatctataaaatggggataatattatctacctcacaagcttatgaaaactaaacatgatgaatcaaaagcacttggcatgtgagggctattaaaatagcctgattttttttttctccccctctccccaatgtatttgctctggcccttgctttttaccctccagagctaagaggtagcagagtctctkgggatgagtgattcaccctcttacttggcgaccactgatgagatcaacaacaggtgaactataaacctattatttattgcagaactaataaaaaatccaaagcctkgtatttgtacatctttattatttctaaagcactttcctcaacctaatttcagtttttacaattggtactcaagaaaatagagacagaaatcatttgattttgcccagaaaccatctgcttatatttataaggccacctaatttgaaatcacatatagaccaggcgcggtggctcacgcctgtaattccaacactttggaaggccaaggcaggtggatcacaaggtcaagagattgagaccatcttggccaacatggtgaaaccccgtctctactaaaaacacaaaaatcagctgggcgtcgtggcatgcacctgtagtcccagctactcgggaggctgaggcaggagaattgcttgaacccaggaggtggaggttgcagtgagccgaaattgcgccactgcactccagcctgatgacagagcaagactgtctcaaaaaaaaaaaaaaaaataccacatatactttatctccmaaacctaatctgattataaattctaagctaggaaacaaaaacttttgggacaagtacttttttttttgacggggtctcctttgtcacccaggctggagtgtcacccaggctgcagtgaactgtgacacaaccacaattaattgcatcctcgaattccagggctcaatagatcctcccacctcagccttatgagtagctgggattgcaggaacgtgccaccacgcccagctaatttttgtattttatgtagagacagtgtttcaccatgttgcccaagttggtctcgaactcctgggctcatgcaatctgccctgcctcagcctctcaaagtgctgggattacaggcatgagccactgcatcgggccaggacaagcatttgataagccataaaaagtaacctcattccagttag

SEQ ID NO: 415 - DNA, 1804 bp, Homo sapiens
gtttctgctttgggacaaccatacatctaattccttaaagtagttttatatgtaaaacttgcaaagaatcagaacaatgcctccamgaccatcatcaggtgaactgtggggcatccacttgatgcccccaagaatcctagtrgaatgtttactaccaaatggaatgatagtgactttagaatgcctccgtgaggctacattartaaccataaagcatgaactatttaaagaagcaagaaaataccccctccatcaacttcttcaagatgaatcttcttacattttcgtaagtgttactcaagaagcagaaagggaagaattttttgatgaaacaagacgactttgtgaccttcggctttttcaaccmtttttaaaagtaattgaaccagtaggcaaccgtgaagaaaagatcctcaatcgagaaattggttttgctatcggcatgccagtgtgtgaatttgatatggttaaagatccwgaagtacaggacttccgaagaaatattctkaaygtttgtaaagaagctgtggatcttagggayctcaattcacctcatagtagagcaatgtatgtctatcckccaaatgtagaatcttcaccagaattgccaaagcacatatataataaattagataaagggcaaataatagtggtgatctgggtaatagtttctccaaataatgacaagcagaagtatactctgaaaatcaaccatgactgtgtaccagaacaagtaattgctgaagcaatcaggaaaaaaactcgaagtatgttgctatcctctgaacaactaaaactctgtgttttagaatatcagggcaagtatattttaaaagtgtgtggatgtgatgaatacttcctagaaaaatatcctctgagtcagtataagtatataagaagctgtataatgcttgggaggatgcccaatttgatgttgatggctaaagaaagcctttattctcaactgccaatggactgttttacaatgccatcttattccagacgcatttccacagctacaccatatatgaatggagaaacatctacaaaatccctttgggttataaatagwgcactcagaataaaaattctttgtgcaacctacgtgaatgtaaatattcgagacattgataagatctatgttcgaacaggtatctaccatggaggagaacccttatgtgacaatgtgaacactcaaagagtaccttgttccaatcccaggtggaatgaatggctgaattatgatatatacattcctgatcttcctcgtgctgctcgactttgcctttccatttgctctgttaaaggccgaaagggtgctaaagaggaacactgtccattggcatggggaaatataaacttgtttgattacacagacactctagtatctggaaaaatggctttgaatctttggccagtacctcatggattagaagatttgctgaaccctattggtgttactggatcaaatccaaataaagaaactccatgcttagagttggagtttgactggttcagcagtgtggtaaagttcccagatatgtcagtgattgaagagcatgccaattggtctgtatcccgagaagcaggatttagctattcccacgcaggactggacagattaattcattcaatcaacaagatcacaccctattacgttccaggccatgtgcagtgcactcagaacacagagatcaatgggatgcagtcccacccacacacttcccatgtcagggctgatttccaacaggcaaaaaatgctacaygagatgtgttgatttgcaatgaattaaattataacttc

SEQ ID NO: 416 - DNA, 4198 bp, Homo sapiens
gtttctgctttgggacaaccatacatctaattccttaaagtagttttatatgtaaaacttgcaaagaatcagaacaatgcctccamgaccatcatcaggtgaactgtggggcatccacttgatgcccccaagaatcctagtrgaatgtttactaccaaatggaatgatagtgactttagaatgcctccgtgaggctacattartaaccataaagcatgaactatttaaagaagcaagaaaataccccctccatcaacttcttcaagatgaatcttcttacattttcgtaagtgttactcaagaagcagaaagggaagaattttttgatgaaacaagacgactttgtgaccttcggctttttcaaccmtttttaaaagtaattgaaccagtaggcaaccgtgaagaaaagatcctcaatcgagaaattggttttgctatcggcatgccagtgtgtgaatttgatatggttaaagatccwgaagtacaggacttccgaagaaatattctkaaygtttgtaaagaagctgtggatcttagggayctcaattcacctcatagtagagcaatgtatgtctatcckccaaatgtagaatcttcaccagaattgccaaagcacatatataataaattagataaagggcaaataatagtggtgatctgggtaatagtttctccaaataatgacaagcagaagtatactctgaaaatcaaccatgactgtgtaccagaacaagtaattgctgaagcaatcaggaaaaaaactcgaagtatgttgctatcctctgaacaactaaaactctgtgttttagaatatcagggcaagtatattttaaaagtgtgtggatgtgatgaatacttcctagaaaaatatcctctgagtcagtataagtatataagaagctgtataatgcttgggaggatgcccaatttgatgttgatggctaaagaaagcctttattctcaactgccaatggactgttttacaatgccatcttattccagacgcatttccacagctacaccatatatgaatggagaaacatctacaaaatccctttgggttataaatagwgcactcagaataaaaattctttgtgcaacctacgtgaatgtaaatattcgagacattgataagatctatgttcgaacaggtatctaccatggaggagaacccttatgtgacaatgtgaacactcaaagagtaccttgttccaatcccaggtggaatgaatggctgaattatgatatatacattcctgatcttcctcgtgctgctcgactttgcctttccatttgctctgttaaaggccgaaagggtgctaaagaggaacactgtccattggcatggggaaatataaacttgtttgattacacagacactctagtatctggaaaaatggctttgaatctttggccagtacctcatggattagaagatttgctgaaccctattggtgttactggatcaaatccaaataaagaaactccatgcttagagttggagtttgactggttcagcagtgtggtaaagttcccagatatgtcagtgattgaagagcatgccaattggtctgtatcccgagaagcaggatttagctattcccacgcaggactgagtaacagactagctagagacaatgaattaagggaaaatgacaaagaacagctcaaagcaatttctacacgagatcctctctctgaaatcactgagcaggagaaagattttctatggagtcacagacactattgtgtaactatccccgaaattctacccaaattgcttctgtctgttaaatggaattctagagatgaagtagcccagatgtattgcttggtaaaagattggcctccaatcaaacctgaacaggctatggaacttctggactgtaattacccagatcctatggttcgargttttgctgttcrgtgcttggaaaaatatttaacagatracaaactttctcagtatttaattcagctagtacaggtcctaaaatatgaacaatatttggataacttgcttgtgagatttttactgaagaaagcattgactaatcaaaggattgggcactttttcttttggcatttaaaatctgagatgcacaataaaacagttagccagaggtttggcctgcttttggagtcctattgtcgtgcatgtgggatgtatttgaagcacctgaataggcaagtcgaggcaatggaaaagctcattaacttaactgacattctcaaacaggagaagaaggatgaaacacaaaaggtacagatgaagtttttagttgagcaaatgaggcgaccagatttcatggatgctctacagggctttctgtctcctctaaaccctgctcatcaactaggaaacctcaggcttgaagagtgtcgaattatgtcctctgcaaaaaggccactgtggttgaattgggagaacccagacatcatgtcagagttactgtttcagaacaatgagatcatctttaaaaatggggatgatttacggcaagatatgctaacacttcaaattattcgtattatggaaaatatctggcaaaatcaaggtcttgatcttcgaatgttaccttatggttgtctgtcaatcggtgactgtgtgggacttattgaggtggtgcgaaattctcacactattatgcaaattcagtgcaaaggcggcttgaaaggtgcactgcagttcaacagccacacactacatcagtggctcaaagacaagaacaaaggagaaatatatgatgcagccattgacctgtttacacgttcatgtgctggatactgtgtagctaccttcattttgggaattggagatcgtcacaatagtaacatcatggtgaaagacgatggacaactgtttcatatagattttggacactttttggatcacaagaagaaaaaatttggttataaacgagaacgtgtgccatttgttttgacacaggatttcttaatagtgattagtaaaggagcccaagaatgcacaaagacaagagaatttgagaggtttcaggagatgtgttacaaggcttatctagctattcgacagcatgccaatctcttcataaatcttttctcaatgatgcttggctctggaatgccagaactacaatcttttgatgacattgcatacattcgaaagaccctagccttagataaaactgagcaagaggctttggagtatttcatgaaacaaatgaatgatgcacatcatggtggctggacaacaaaaatggattggatcttccacacaattaaacagcatgcattgaactgaaaagataactgagaaaatgaaagctcactctggattccacactgcactgttaataactctcagcaggcaaagaccgattgcataggaattgcacaatccatgaacagcattagaatttacagcaagaacagaaataaaatactatataatttaaataatgtaaacgcaaacagggtttgatagcacttaaactagttcatttcaaaattaagctttagaataatgcgcaatttcatgttatgccttaagtccaaaaaggtaaactttgaagattgtttgtatctttttttaaaaaacaaaacaaaacaaaaatccccaaaatatatagaaatgatggagaaggaaaaagtgatgkttttttttgtcttgcaaatgttctatgttttgaaatgtggacacaacaaaggctgttattgcattaggtgtaagtaaactggagtttatgttaaattacattgattggaaaagaatgaaaatttcttatttttccattgctgttcaatttatagtttgaagtgggtttttgactgcttgtttaatgaaraaaaatgcttggggtggaagggactcttgagatttcaccagagactttttctttttaataaatcaaaccttttgatgatttgaggttttatctgcagttttggaagcagtcacaaatgagacctgttataaggtggtatttttttttttcttctggacagtatttaaaggatcttattcttatttcccagggaaattctgggctcccacaaagtaaaaaaaaaaaaaaatcatagaaaaagaatgagcaggaatagttcttattccagaattgtacagtattcaccttaagttgattttttttctccttctgcaattgaactgaatacatttttcatgcatgttttccagaaaatagaagtattaatgtta

SEQ ID NO: 417 - DNA, 993 bp, Homo sapiens
ctcaattccgcgccaggcctgccagacacctgcgccctcctgcagccaccgccacagctgccagcatgtctggcccagacatcaagacgccgamcgccatccagatctgccggattatgcggacgctaatgtggcccgcaatgtctaggcgggaccatcctgaagatgatcaaagaggcgggcgccatcatcagcacccggcattgcaatccgcagaacggggatcgctgtgtggccgctctggctcgggtcgagtgcacccacttcctgtggcccatgtgcatcggtgaggtggcccacgtcagcgcggagatcacctacacctccaagcactctgtggaggtgcaggtcaacatgatgtccgaaaacatcctcacaggtgccaaaaagctgaccaataaggccaccctctggtatgcgcccctgtcgctgacgaacgtggacaaggtcctcgaagagcctcctgttgtgtatttccggcaggagcaggaggaggagggccagaagcggtacaaaacccagaagctggagcgcatggagaccaactggaggaacggggacatcgtccagccagtcctcaacccagagccgaacactgtcagctacagccagtccagcttgatccacctggtggggccttcagactgtaccctgcacagcttcgtgcatgaaggggtgaccatgaaggtcatggacgaggtcgccgggatcttggctgcacgccactgcaagaccaacctcgtcacagcctccatggaggccattaattttgacaacaagatcagaaaaggctgcatcaagaccatctccggacgcatgaccttcacgagcaataagtccgtagagatcgaggtcttggtggatgccgactgtgttgtggacagctctcagaagcgctacagggccgccagtgtcttcacctaagtgtcgctgagccaggaaggcaggtcgctgcccatgccccagctcgtgccggagacccaggacgagaag

SEQ ID NO: 418 - DNA, 768 bp, Homo sapiens
gcggctttgcagatgacgccgccgaggaaaactgtgtrctattagccatggtcaaccccaccgtgttcttcgacattgccgtcgatggcgagcccttgggccgcgtctcctttgagctgttagctgacaaggtcccaaagacagcagaaaattttcatgctctgagcactggagagaaaggatttggttataagggttcctgctttcacagaattattccagggtttatgtgtcagggtggtgacttcacacgccataatggcactagtggcaagtccatctatggggagaaatttgaagatgagaacttcatcctaaagcatacaggtcctggcatcttgtccatggcaaatgctggacccaacacaaatggctcccagtttttcatctgcactgccaagactgagtggttggatggcatgcatgtgatctgtggcaaagtgaaagaaggcatgaatattgtggaggtcatggagtgctttgggtccaggaatggcaagaccagcaagaagatcaccattgctgactgtggacaactcgaataagtttgacttgtgttttatcttaaccaccagaccattccttctgtagctcaggagagcacccctccatcccatttgctcgcagtatcctagaatctttgtgctctcgctgcagttccctttgggttccatgttttccttgttccctcccatgcctagctggattgcagagttaagtttatgattatgaaataaaaactaaataacaaaaaatatatatatataa

SEQ ID NO: 419 - DNA, 4251 bp, Homo sapiens
gaagaagacacttcaatcatgggtgatattaaaaattttctgtatgcctggtgaggcaaaaggaagatgactccatcctatgaaattagagcattggggaacaaaagtaggcagaaattcttgtgtgaggttcaggtggaagggtataattacagtggcataggaaattccaccaataaaaaagatgcacagagcaatgctgccagagactttgttaactatttggttcaaataaatgaagagtgaagaagttccagctttttggggttgcatctctgcccccacttactgatattcctgacactacagcaaatgctgaaggaggtttaccaacaaccatgggaggtcctcttscgccacatctggctctcaaagctgaaaataattctgaggtaggggcctctggctatggtgttcctgggaccaaggagccaacttgaaggattactactcaagaaaggaagaacaagaagtgcaagcgactctagagtcagaagaagtggatttaaatgctgggcttcatggaaactggaccttggaaaatgctaaaactcatctaaaccaatattttcagaaagaaaaaatccaaggagaatataagtacacccaagtgggtcctgatcacaacaggagctttactgcagaaataaccatttacatcaagcagctgggcagaaggatttctgcacatgaacatggatcaaataagaaattggcagcacagtcctgtgccctgtcactagtcagacaactctaccatcttggagtggttgaagcttacwtcagacttacaaagaaggaaggagagagagtggaaccttacaaagtaaacctctctcaagatttagagcatcagccacaaaacatcatttgagagctaaattttgagattatgcccccgcctgaagatccttctatgccagttgcactcaacattggcaaattggctcactttgaaccatctcrgtgacaaaaccaagtgggtatagttcctcggtcacctccacaatccagatggaatccytggactactagcgacattgctgagggacctctggcttttgcttctccagagcaaataagcttggacctcaagaatgaattggtgtaccagttggaacaggatcatgatttgccagcaatcttgcaggagcgagagttactgcctgtgaagaaatttgaaagtgagattctggaagcaatcagtcaaaattcagttgtcattattagaggggctgctggatgtggtaaaaccacgcaggttccccagttcattctagatgactttatccagaatgactgacagcagagtgtaacattgtagtaactcagcccagaagaatcagtgtagtttccatggcagagtgagttgcatttgagagaggagaagagtctgtaaaaagctgtggttacagtgttcaatttgagtctrtacttccttgtcctcatgccagtataatgctttgtactgtaggtgtgctcctaagaaaattagaagcaggcatttgaggaatcagtcatgtaattgtagatgaaatacatggaagagacattaatactgacttccttttggtagtactgcgtgaagttgtttcagcttaccctgaagttctcattgttcttatgtccacttctattgataccagcatgttgtgtgaatatttcttcaattgccccatcatttaagtgtatgggaggacttacccagttcaagaatattttctggaagactgcattcagatgacycactttgttccttcaccgaaaaccaagaagaaggacaaggatgatgatggtggtgaggatgatgatgcaaattgcaacttgatctgtggtgatgaatatggtccagaaacaaggatgagcatgtctcaattgaatgaaaaagaaactccttttgaactcgtcgaagctctctttaagtacattgaaacccttaatattcccagagctgtgttggtatttttgcctggctggaatttgatttatactatgcagaagcatttggaaatgaatccacattttggaagccatcagtatcagattctacctctgcattctcagattccttgacaggaacagcgcaaagtgtttgatccagtaccagttggagtaaccaaggttattttgtccacaaatattgctgaaacaagcattatcataaytgatgtttatgtcgttgactcctgcaagcagaaagtgaaactctttgctactcacaacaatatgaccaactatgctrcagtatggggatcaaaaacaaaccttgaacagyggaaagggcaacctggccraatacggcctggattctgctttcacctctgcagccgagctcgttttgagagacttgaaacccacatgacaccagagatgttccaaacaccattgcatgaagttgctcttagcataaaacttccatgtctagttggaattggccagtttctggccaaagcaattgaaactctccctttggatgctgtgattgaagcagaacacactcttagagagcttgatgcattagatgccaatgatgatttgactccattgggacgaatcctggctaacctcctcattgagcctcgttttggcaaaatgatgataatggtgtgtattttctatgtgggagatgctatctgtaccattcctgctgctacctgctttccagagccttttrtaaatgaaggaaagtggctgggctacaaccattgaaattttgctggaaacggattttctcatcatgtagcccttttatcagtattccaagccggagatgatactagaatgggtggagaagaagcagaaatacgtttttgtgcgcacaaaagacttcatatggctacactaagaatgacttgggaagtcaaagttcagctcaaagagattctgattaattctgggtttccagaagattgtttggtgacacaagtgtttactaacactggaccagataataatttggatgttgttatctctcttcctggcctttggtgtgtaccccaatgtatgctatcataaggaaaagacaaagattctcaccactgaagggtgtaatgcacttatccacaaatcatctgttaattgtccttttagtagccaagacatgaagtacccatctcccttctttgcatttggtgaaaagattcgaactcgagccatctctgctaaaggcatgactttagtcaccccactacagttgcttctctttgcctccaagaaagtccaatctgatgggcagattgtgcttgcagatgactggattaaactgcaaatatctcatgaagctgctgcctgcatcaccgctctccaggcagccactgaggctctggttgttgaagtaaccaaacaacctgctatcatcagccagttggaccccgtaaatgaaagtatactgaacatgatccgtcaaatctctagaccctcagctgctgatatcaaccttatgattggcagtacatggtatggagatggtccaggtcctcctaagatggcccaatatgacaatggaagcggatatagaaggggaggttctagttatggcagtgaaggctatggcagtggctatagcagtggaggctatcgtagcggaggctatggtggcagctccagctcctgtcgggcaggatatggtgcaggtgttggtggaggstatagagaagtttcctgaggtggctatagaggcaactctggaggagattacagagggcctagtagaggctacagatgatctgggggattccagcgaggaggtggtaggggggcctatggaactggctactttggacaaggaagagaaggtggcatctgttaaggcttggttatgtcagttcctgtgtgtagacagtaagaaaaaaaaagccatgctatgtgtgacatttttttccaatgtttatttcccaccaaaaagtaaatgcattttaacccattctgtggttcactgtagcttaaggaaaccaagcatatagatgcattagtgattttgtttatattatgtaaaatgtaacgatctatcttagaaataccacagtttgtatttttctttaaggagtaaagatttgtctttaaaaataacttgatattttcctggctttcatttaatacaatggaaaataaagtattacacgaaaaaaaaattttttcttagagacagtatctcattatgttacccaggctgaagtgcagtggctattcacaggcacgattatagctcactatagcctcaaagtcctgggttcaagcctcctgagtagctag

SEQ ID NO: 420 - DNA, 492 bp, Homo sapiens
atgactccatcctatgaaattagagcattggggaacaaaagtaggcagaaattcttgtgtgaggttcaggtggaaggaaaggaagaacaagaagtgcaagcgactctagagtcagaagaagtggatttaaatgctgggcttcatggaaactggaccttggaaaatgctaaaactcatctaaaccaatattttcagaaagaaaaaatccaaggagaatataagtacacccaagtgggtcctgatcacaacaggagctttactgcagaaataaccatttacatcaagcagctgggcagaaggatttctgcacatgaacatggatcaaataagaaattggcagcacagtcctgtgccctgtcactagtcagacaactctaccatcttggagtggttgaagcttacwtcagacttacaaagaaggaaggagagagagtggaaccttacaaagtaaacctctctcaagatttagagcatcagccacaaaacatcatt

SEQ ID NO: 421 - DNA, 1392 bp, Homo sapiens
atgacycactttgttccttcaccgaaaaccaagaagaaggacaaggatgatgatggtggtgaggatgatgatgcaaattgcaacttgatctgtggtgatgaatatggtccagaaacaaggatgagcatgtctcaattgaatgaaaaagaaactccttttgaactcgtcgaagctctctttaagtacattgaaacccttaatattcccagagctgtgttggaacagcgcaaagtgtttgatccagtaccagttggagtaaccaaggttattttgtccacaaatattgctgaaacaagcattatcataaatgatgtttatgtcgttgactcctgcaagcagaaagtgaaactctttgctactcacaacaatatgaccaactatgctrcagtatggggatcaaaaacaaaccttgaacagyggaaagggcaacctggccraatacggcctggattctgctttcacctctgcagccgagctcgttttgagagacttgaaacccacatgacaccagagatgttccaaacaccattgcatgaagttgctcttagcataaaacttccatgtctagttggaattggccagtttctggccaaagcaattgaaactctccctttggatgctgtgattgaagcagaacacactcttagagagcttgatgcattagatgccaatgatgatttgactccattgggacgaatcctggctaacctcctcattgagcctcgttttggcaaaatgatgataatggaaaagacaaagattctcaccactgaagggtgtaatgcacttatccacaaatcatctgttaattgtccttttagtagccaagacatgaagtacccatctcccttctttgcatttggtgaaaagattcgaactcgagccatctctgctaaaggcatgactttagtcaccccactacagttgcttctctttgcctccaagaaagtccaatctgatgggcagattgtgcttgcagatgactggattaaactgcaaatatctcatgaagctgctgcctgcatcaccgctctccaggcagccactgaggctctggttgttgaagtaaccaaacaacctgctatcatcagccagttggaccccgtaaatgaaagtatactgaacatgatccgtcaaatctctagaccctcagctgctgatatcaaccttatgattggcagtacatggtatggagatggtccaggtcctcctaagatggcccaatatgacaatggaagcggatatagaaggggaggttctagttatggcagtgaaggctatggcagtggctatagcagtggaggctatcgtagcggaggctatggtggcagctccagctcctgtcgggcaggatatggtgcaggtgttggtggaggstatagagaagtttcc

SEQ ID NO: 422 - DNA, 1079 bp, Homo sapiens
agtttgttgctcccaccgagttctgragaacgccagcagctcgctgcttaaaattaaaccacagggttccatgatgggtcracttgatgggaaagtcatcatcctgacagccgctgctcaggggattggccaagcagctgccttagcttttgtaagagaaggtgycaaagtcatagccacagacattaatgtgtccaaacttcaggaactggaaaagtacctgggtattcaaactcgtgtccttgatgtcacaaagaagaaacaaattgatcagttcgccartgaagttgagagacttgatgttctctttaatgttgctggttttgtccatcatggaactgtcctggattgtgaggagaaagactgggacttctcgatgaatctcaatgtgcgcagcacgtacctgatgatcraggcattccttcctaaaatgcttgctcaaaaatctggcaatattatcaccatgttttctgtggtttccagcatcaaaggagttgtgaacagatgtgtgtacagcacaaccaaggcagccgtgattggcctcacaaaatctgtggctgcagatttcatccagcagggcatcaggtgcaactgtgtgtgcccaggaacggttgatacgccatctctacaagaaagaatacaagccagaggaaatcctgaagaggcacggaatgatttcctgaagagacaaaagatgggacgatttgcaactgcagaagaaatagccatgctctgcgtgtatgtggcttctgatgaatctgcttatgtaactggtaaccctgtcatcattgatggaggatggagcttgtgattttaggatctccatggtgggaaggaaggcaggctcttcctatccacagtgaacctggctatgaagaaaactcaccaatcatctccttcctgctaatcacatgttaatgaaactaagccctttttaacaatgtcactgtttgcaagagtctgattctttaagtatattaatctctttgtaatctcttctgaaatcattgtaaagaaataaaaatattgaactcacagcaagagaatagtttttaaaataaatctcaatttgtaagcat

SEQ ID NO: 423 - DNA, 765 bp, Homo sapiens
gtgctctgcggacgccaccgctgaggaaaaccgtgtactattagccatggtcaaccccaccatgttctttgaatttgccgtcgacagcgagcccttgggccatgtctccttcgagctgtttgcagacaagatcccaaagacagcagaaaattttcgtgctccgagcactggagagaaaggatttggttataaggtttcctgctttcacagaattattccagggtttatgtgtcagggtggtgactgtgaagtcaccataatggcactggtggcaagtccatctacacggagaaatttgaagatgagaacttcatcctaaagcatacaggtcctggcatcttgtccatggcaaatgctggacccaacacaaatggttcccagtttttcatctgcactgccaagagtgagtggttggatggcaagcaygtgctctttggcaaagtgaaagaaggcacgaatattgtggaggcatggagtgctttgggtccaggaatggcaagaccagcaagaagatcaccattgctgactgtggacaactcgaataagtttgacttgtgttttatcttaaccaccagaccattccttccgtagctcaggagagcacccctccaccccgtttgctcgcagtatcctagaatctttgtgctctcgctgcagttccctttgggttccatgttttccttgttccctcccatgcctagatggattgcagagttaagtttatgattatgaaataaaaactaaataacaacaacaaaaaagaaa

SEQ ID NO: 424 - DNA, 2892 bp, Homo sapiens
caaaggcaggcattctctttccttttccttctctcctgagcgctcctgcagttcctggggcgtagtaggggatccacaagcgtttgtgaccagtgaagttctttacaagggtgagatctgcacgggaggacccgagcgagggtctcggcttgccaggaagccggggttccccgggaagcgtggagttcacccgcgcactcgaagtgcctttgcaaaattatatctgggtgttggcacccagccactattctgccaatgaagtacatcctggtcacgggtggggtcatctcaggcattggtaaagggatcattgccagcagcattggaacgattctaaaatcatgtggactccgagttactgccataaaaatcgacccctatattaacatcgatgctggcactttttcaccttatgaacacggtgaagtcttcgtcttaaatgatggtggagaagttgatttagaccttggaaattatgaaagatttttggatattaatctttataaagacaacaatatcaccacggggaagatatatcagcatgtgatcaataaagagaggcgtggtgattacctggggaaaacagtgcaagttgtccctcacattactgatgctgtccaggagtgggttatgaatcaagccaaggtgccggtggatggtaataaggaagagccccaaatatgcctgggaggcaccattggagacatcgaaggaatgccgtttgtggaggcgtttagacaattccagtttaaggcgaaaagagagaatttctgtaatatccacgttagccttgtcccacagctcagtgctaccggagaacaaaaaaccaaacccacccaaaacagcgtccgcgcactgaggggtttaggcctgtctccagatctgattgtctgccgaagttcaacgcccattgagatggccgtgaaggagaagatttctatgttttgtcacgtgaaccctgaacaggtcatatgtatccatgatgtttcttccacataccgagttcctgtgcttttagaggaacaaagcattgtgaaatattttaaggagagattgcacctgcccatcggtgattctgcaagtaatttgctttttaagtggagaaatatggctgacaggtatgaaaggttacagaaaatatgctccatagccctggttggcaaatacaccaagctcagagactgctacgcctctgtgttcaaagccctggaacactcagccctggccatcaaccacaagttgaatctgatgtacatagactccattgatctggagaagatcactgaaaccgaggaccctgtgaaatttcatgaagcttggcagaagctatgcaaagctgatggtattcttgtgcctggaggctttggaatcagaggaacattgggaaaactccaggcgatttcttgggcaaggacaaagaagattccttttctgggagtttgtcttgggatgcaactagcagtgatagagtttgcaagaaactgccttaacttgaaagatgctgattccacagagtttaggccaaatgccccagttcctctggtgattgatatgcccgagcacaaccctggcaatttgggaggaacaatgagactgggaataagaagaactgttttcaaaactgaaaattcaatattaaggaaactttatggtgatgttccttttatagaagaaagacacagacatcggttcgaggtaaaccctaacctgatcaaacaatttgagcagaatgacttaagttttgtaggtcaggatgttgatggagacaggatggaaatcattgaactggcaaatcatccttattttgttggtgtccagttccatcctgagttttcttctaggccratgaagccttcccctccgtatctggggctgttacttgcagcaactgggaacctgaatgcctacttgcaacagggttgcaaactgtcttccagtgatagatacagtgatgccagtgatgacagcttttcagagccaaggatagctgagttggaaataagctgaaatgaatacatgactgggaataatggggactgcctgtgaggcctctgaaataattgaaggcaagatgaaggaactatctgaagaaatcactacactcttagagaatccctctgttctccagcaaacatgggatgtaaagcctcacagggaatctgataatacatacttctgtcaaccagaaccagaggggtagttttcttttccctccagaggcagcctttggtacttaaaatatctgtagctgattaaatttttcycaacaacctcactggggagaaagtgtgttcatgttttgtccagcggatcaggatgttaggatgacgagcaagagtccaggtcactgtgcctttgctgtgttgtatggaaaggatggcagggaacatgctgtaagtaattttgagtaagaaaatgagtcactgtgttacctggaactcagccacagatttgtgtgtggtccaagatcattgcagtttctcaccctgtttatttcctggtaaaagtaaaattgaataggtccaagacttgggggtggcaagtaaggctttgcctcaggcacaaaatttaagggggctccaaaaaactcaggaatcaagatcagcaatacagtctgagtatcccttatgtgaaatgcttggggctagaagtgttttgaatttcagattttggaatatttgcatatacatgcgatatcttggggatgagactcaagactaaacatgaaattcatttatgcttcatatacaccttatatacatagcctaaaggtaatttgatacaatattttaaataattttgtgcatgaaacaaagtttcgactgcattttgactgtgatttcwggcatgagatcagttatggaattttccacttctagcgtcatgttggca

SEQ ID NO: 425 - DNA, 2901 bp, Homo sapiens
caaaggcaggcattctctttccttttccttctctcctgagcgctcctgcagttcctggggcgtagtaggggatccacaagcgtttgtgaccagtgaagttctttacaagggtgagatctgcacgggaggacccgagcgagggtctcggcttgccaggaagccggggttccccgggaagcgtggagttcacccgcgcactcgaagtgcctttgcaaaattatatctgggtgttggcacccagccactattctgccaatgaagtacatcctggtcacgggtggggtcatctcaggcattggtaaagggatcattgccagcagcattggaacgattctaaaatcatgtggactccgagttactgccataaaaatcgacccctatattaacatcgatgctggcactttttcaccttatgaacacggtgaagtcttcgtcttaaatgatggtggagaagttgatttagaccttggaaattatgaaagatttttggatattaatctttataaagacaacaatatcaccacggggaagatatatcagcatgtgatcaataaagagaggcgtggtgattacctggggaaaacagtgcaagttgtccctcacattactgatgctgtccaggagtgggttatgaatcaagccaaggtgccggtggatggtaataaggaagagccccaaatatgcgttattgagctgggaggcaccattggagacatcgaaggaatgccgtttgtggaggcgtttagacaattccagtttaaggcgaaaagagagaatttctgtaatatccacgttagccttgtcccacagctcagtgctaccggagaacaaaaaaccaaacccacccaaaacagcgtccgcgcactgaggggtttaggcctgtctccagatctgattgtctgccgaagttcaacgcccattgagatggccgtgaaggagaagatttctatgttttgtcacgtgaaccctgaacaggtcatatgtatccatgatgtttcttccacataccgagttcctgtgcttttagaggaacaaagcattgtgaaatattttaaggagagattgcacctgcccatcggtgattctgcaagtaatttgctttttaagtggagaaatatggctgacaggtatgaaaggttacagaaaatatgctccatagccctggttggcaaatacaccaagctcagagactgctacgcctctgtgttcaaagccctggaacactcagccctggccatcaaccacaagttgaatctgatgtacatagactccattgatctggagaagatcactgaaaccgaggaccctgtgaaatttcatgaagcttggcagaagctatgcaaagctgatggtattcttgtgcctggaggctttggaatcagaggaacattgggaaaactccaggcgatttcttgggcaaggacaaagaagattccttttctgggagtttgtcttgggatgcaactagcagtgatagagtttgcaagaaactgccttaacttgaaagatgctgattccacagagtttaggccaaatgccccagttcctctggtgattgatatgcccgagcacaaccctggcaatttgggaggaacaatgagactgggaataagaagaactgttttcaaaactgaaaattcaatattaaggaaactttatggtgatgttccttttatagaagaaagacacagacatcggttcgaggtaaaccctaacctgatcaaacaatttgagcagaatgacttaagttttgtaggtcaggatgttgatggagacaggatggaaatcattgaactggcaaatcatccttattttgttggtgtccagttccatcctgagttttcttctaggccratgaagccttcccctccgtatctggggctgttacttgcagcaactgggaacctgaatgcctacttgcaacagggttgcaaactgtcttccagtgatagatacagtgatgccagtgatgacagcttttcagagccaaggatagctgagttggaaataagctgaaatgaatacatgactgggaataatggggactgcctgtgaggcctctgaaataattgaaggcaagatgaaggaactatctgaagaaatcactacactcttagagaatccctctgttctccagcaaacatgggatgtaaagcctcacagggaatctgataatacatacttctgtcaaccagaaccagaggggtagttttcttttccctccagaggcagcctttggtacttaaaatatctgtagctgattaaatttttcycaacaacctcactggggagaaagtgtgttcatgttttgtccagcggatcaggatgttaggatgacgagcaagagtccaggtcactgtgcctttgctgtgttgtatggaaaggatggcagggaacatgctgtaagtaattttgagtaagaaaatgagtcactgtgttacctggaactcagccacagatttgtgtgtggtccaagatcattgcagtttctcaccctgtttatttcctggtaaaagtaaaattgaataggtccaagacttgggggtggcaagtaaggctttgcctcaggcacaaaatttaagggggctccaaaaaactcaggaatcaagatcagcaatacagtctgagtatcccttatgtgaaatgcttggggctagaagtgttttgaatttcagattttggaatatttgcatatacatgcgatatcttggggatgagactcaagactaaacatgaaattcatttatgcttcatatacaccttatatacatagcctaaaggtaatttgatacaatattttaaataattttgtgcatgaaacaaagtttcgactgcattttgactgtgatttcwggcatgagatcagttatggaattttccacttctagcgtcatgttggca

SEQ ID NO: 426 - DNA, 1791 bp, Homo sapiens
atgacccacaccgtgcaaggcttggatgtggctggtcttctgaaagcacttcctcccattaaacttcattcctgttcagcagaaacagacgaggaccgtcaggaacacctgggaaggaacgagaatggaagagcagagcaaggggcaaggcatacagccctgcagggaacccagaaggcagccatccctgacagtgagagcagctcttgtcctgggaaggcagatgggtcctgccagaagcctgggcctggccttgttggcctcaccggcaagctcaagcttgccccccagctgctgatcaagcaagacatcgtgtcccttcttagcaactttgtcaccaggctgtgcttcccagagctgctgtcaccgcagttttttgtgcaggagccacaacacctacccatgcagtccatggacttctcatgggcatgttcacacgcaacccgcaggctggcggtgacggtttcgtggggcgatgtgcatgagcagggtctctggggccccctcctggctgtggcctcccccgggctgggtttcctggtggccctctggagtgcaagagacctggactgggccgactggaccgtcccacaccctgaccaactagttatttgtatatttggcccaccagttaaagaacctcctacagatgttactcccactttcttgacaacaggggtgctcagtactttacgccaagctgattttgaggcccataacattctcagggagtctgggtatgctgggaaaatcagccagatgccggtgattttgacaccattacattttgatagggacccacttcaaaagcagccttcatgccagagatctgtggttattcgaacctttattactagtgactccctgactggtatacctgcaacacctggcaatgagatccctgtagaggtggtattaaagatggtcmctgagattaagaagattcctggtatttctcgaattatagccggaggctgctacctgcatttcacaggtgagaaaaccaaggcacacgaggccatgccctccccagtagccagcaaatggcagagtagaagcacagaccgcttcctgggttttcaagaacagcaggatgtctggctttcgggggaatctccaccagctttattgctggaaacacactgggaagtctttaaatctcaccccagcgcactgagggccactgacaagggtgatgctcgggcaatggtaagttccagagcattttgctgggtctgcgcttggaaagccctccctgccgaggctaaagccctcagccccatgctcagtgtcacctgtcgagacagcatgagctatgtgggccagtgggggagtttcccggtcccccctctgtggtacctggaccgctacgctacccttggtggagatgctgaggactggcgggagctgcagggctgctgtgggggctcctatgtaggcaatgaggagcactgtgctaaggagtctcaggcacctggtcagcaggtcaggcagacccagggagaaggaaggactgtggacctgctgggccgcagagtcagcgattccctgggctccaggctgacgcctgccccgacaaatcaggacattccggccagttcgggggtgggtgtcttcagttccagcccaggcacgagaactgctgaccacttcctgcaggcctccgacccggcggcccagccacccatccggctggggtggccatcagtcatctggaaagcctatgagccccgtgtcctcgttttgcaaagagcagttcctgaaatcatggggcctagagctctgctcttc

SEQ ID NO: 427 - DNA, 609 bp, Homo sapiens
aaaaggcagactaggctgcattcactcaatggcttcttgctgccaattaaaactgtaagtgtgcagggtgactgtcgttcctacagttacgtgtgtggcatctccagtaaagatgaacctgactaggaatcacttatttttctggctaggcttatgcctcgcatgtgtcacaacgttaacagagttatttgtatatttggcccaccagttaaagaacctcctacagatgttactcccactttcttgacaacaggggtgctcagtactttacgccaagctgattttgaggcccataacattctcagggagtctgggtatgctgggaaaatcagccagatgccggtgattttgacaccattacattttgatagggacccacttcaaaagcagccttcatgccagagatctgtggttattcgaacctttattactagtgactccctgactggtatacctgcaacacctggcaatgagatccctgtagaggtggtattaaagatggtcmctgagattaagaagattcctggtatttctcgaattatgtatgacttaacatcaaagcccccaggaactactgagtgggagtaataaacttcttgttctattaaa

SEQ ID NO: 428 - DNA, 3975 bp, Homo sapiens
gtgggctcaaggcaggcttagagagaaggtgcaagagctgtctgaaaaggtcagagcaaagcatgaagctggtgagcagctgtgaccatagctggaagcttctctctgagctttctcctggttacctcctcctcccctacgtgaccagtcagccaagtgttaagtccaggggaacattttgctgcttccaagtactgtctcactagtgttatttgccataacttgcggccacagggcaaggtccaggtgctcagacctttacatcctggactttccaaggcctcccaaagctctctggcacccagggaacagtgtgcgtgtcgagagcttaatccgcaggagcatagccatggttctctggggtccagtgctgggagctctgctggtggtcattgctggatacctgtgcctgccagggatgctccgacaacgcaggccatgggagccccctctggacaagggtaccgtgccctggcttggccatgccatggctttccggaagaatatgtttgaatttctgaagcgcatgaggaccaagcatggggatgtgttcacagtgcagctagggggccagtacttcaccttcgtcatggaccccctctcctttggcyccatcctcaaggacacacagagaaaactagactttgggcaatatgcaaaaaaactggtgctgaaggtatttggataccgttcagtgcaaggggaccatgagatgatacactcagccagcaccaagcatctgaggggggatggcttgaaggatcttaatgagaccatgctggacagcctgtcctttgtaatgctgacgtccaaaggctggagtctggatgccagttgctggcatgaggacagcctctttcgcttctgctattacatcttgttcacagctggctacctgagcttgttcggctacacgaaggacaaggagcaggacctgctacaggcaggagagttattcatggagttccgcaagtttgaccttcttttcccaaggtttgtctactccctgctgtggccccgggagtggctagaagtgggccgactccagcgtctctttcacargatgctctccgtgagccacagccaggagaaggagggcatcagcaactggctgggcaacatgcttcagtttctgagggagcagggkgtaccctcagctatgcaggacaagttcaacttcatgatgctctgggcctcccaggggaacacggggcctacctctttctgggccctcttgtacctcctgaagyacccagaagctattcgggctgtgagggaggaagctacccaggtcctgggtgaggccaggctggagaccaagcagtcctttgccttcaaactcggtgccctgcaacacaccccagttctagacagcgtggtggaggagacgctgcggctgagggctgcacccaccctcytyaggttggttcatgaagactataccctgaagatgtccagtgggcaggagtatctgttccgccatggagacatcctggccctctttccctacctctcagtgcacatggaccctgacatccaccctgagcccaccgtcttcaagtacgatcgcttcctcaaccctaatggcagccggaaagtggacttcttcaagacaggcaagaagatccaccactacaccatgccctggggttcgggcgtttccatctgccctgggaggttctttgcactcagtgaggtgaagctctttatcctgcttatggtcacacactttgacttagagttggtggaccctgacacaccactaccccatgttgacccrcagcgctggggttttggcaccatgcagcccagccacgatgtgcgcttccgctaccgcctgcatcctacagagtgagcttggccaagccagctgcaaacctggccagaggagttctattgcatctctcacctgttctcacccctctgcagccccaagaccccactggccacccctccctctggtcctgtggcaccccctacctctgttctgcctgtcctcgctctctccccgcctagtcatctgacaggcttatcattctctttaaaataccatctctcagagtgggttctgccgaaccctcctctcacaggaagtccagaggaagggggagtatctgtgggcaacttggtttgggagatgatgcctgccttgagaagtcctgagtacagagactggttccccccagacacgagtaacatggcatcttgcaaacatcagcctccactctcccagcttgctttagttttttcagcaacacttatcccacatcctatggaattcaggttctagaacagtgtcatccaacataaatatgaagcaagctacatgagtagtggggttttttggttttgtttgtttgttttgagacagagtcttgctctgtcgccgaggctgcagtgcagcggtgcgatctctgctcactgcaacctctgcctcctgggtttaagcaattctcctgcctcagcctccccagtagctgggattacaggcacctaccaccttgcccagctaatttagtttcctggtaaacacatttttaaaaagtaaaatgaaacaattcatttttataatatactttacttaatccaatatatccaaaatattggcatttcaacgtgatcactattaaaaattttaacgtaatagtttttaccttccctttttcatcctgtcttcaaagtctggtatgtactgtacttttgcagttcttcccagttcagactagccacattccaagtgcttaattgccgtgtgtggcaggtggctgccctattggatascmacaggtctagagaaatgatacctttttttttttttgagacagagtctcactctgttgcccaggctgcagtgcagtggtgtgatcttggctcactacaacctctgcctcccgggttcaagtaattctcctgcctcaggcttctgagtagctgggattataggtgcgcaccaccacacccggctagtttctgtatttttagtagagacggcgtttcaccattttggccggcctcctcggcctcccaaagttctgggattacaggcatgagccactgtgcccagtcaggatgtctttaatgtaggaatcattcaagatccctcctcagtgcccatgtctcccccacctcagggtgctgtcaaccctcccttggtttccatgatcattgctgaactcagagctttcttctatccccagacccacatgggagtctcccagcacctctgactcagcttggccaatgcagaacttggcatctgaacccctgcctcttccctgaaccactcctcctcctgatttccctgctctctctgctcagaacactaccattcacyccatctcccagagacactctccctcctcctctttcaccttcatacaagcaggcccccgtcctatcagtacacccccctgtgatgcctctgaaatatgtaccctcctcccctctcctactgtcattcttatacctgtgatctctgcgtttctcttctacactgctgccagaggcctttttgccaaaagcactgctgattgtcactcttttactttcctggttcccctttgacttcacacacttgacgtttacattttgtcacagttggtcccccttgccttcacatacctgatgtttaaattttgtcacggttrgtctccaaacttctcaactttgccagctttctccaatgaaaccatcagtagagacattgctgttcctgcccatcccagtgccagctactccttcctggaagccttcctggatttcacgcatcccatcctctggccagaaatggcctccgaactgtgcagctcctgcrgcaccatttgtatcatagcatatctgttatgtgtcgttgctttctgtgtcttggtttctgcctgctgcccacttccctagactggagcctactggggcatggtattttattcatttctgacctccaattccctaagtggagattaaatgttagaaacctga

SEQ ID NO: 429 - DNA, 1849 bp, Homo sapiens
gccaagttatgggtgcgttctgccagcgtcctagcagtgataaagaacaggaaaaagagaaaaaatcagtgatctgtgtcgagggcaatattgcaagtgggaagacgacatgcctggaattcttctccaacgcgacagacgtcgaggtgttaacggagcctgtgtccaagtggagaaatgtccgtggccacaatcctctgggcctgatgtaccacgatgcctctcgctggggtcttacgctacagacttatgtgcagctcaccatgctggacaggmatactcgtcctcaggtgtcatctgtacggttgatggagaggtcgattcacagcgcaagatacatttttgtagaaaacctgtatagaagtgggaagatgccagaagtggactatgtagttctgtcggaatggtttgactggatcttgaggaacatggacgtgtctgttgatttgatagtttaccttcggaccaatcctgagacttgttaccagaggttaaagaagagatgcagggaagaggagaaggtcattccgctggaatacctggaagcaawtcaccatctccatgaggagtggctcatcaaaggcagccttttccccatggcagcccctgttctggtgattgaggctgaccaccacatggagaggatgttagaactctttgaacaaaatcgggatcgaatattaactccagagaatcggaagcattgcccataggaggcaaaaggtctatggctcatgtctgaaaaatgcctgctgctgccaagttagctattgggagcaatctggaaaaacttgctcccaggagggctttgtgtctggccagcttgattttcctaatggtctcatctcctttgctagtgtctttgtcatgcgtctctggccctcgtgggtaaatgacaaacgggaccaatgggtttgccaagccctttgctgttcgcagcctcacattcccccggtgcctctcccatggctttgtgctgctgagtcgctctcatgaagcccttagggagagcacctgttgtgtgcctgacaccacgctggagctgtgtaccaatcgtctcagccttcattaggaggccgaggtaggagtcttatatcccaggtgaggaatttgaagctcagaaaggttgaggggctccccagaggtcacacagcctgtgtgcagtggagctggcaccattcagactttcagccgactcagcaactttcccttgccctgggctgcctcctcctgagagctgttccccaccgccctgcctcttccggttggaggctctcatgtctctttggggagagctggcagtgtgcggagctgataacattttcccaatattgagcagttcccaaggacagtcagcatttctagacttccacaaaattatgctgcatttggctggagcccggtgttcagtggtttccctgcccgaggtcgctgcagccccatctaccacatcttcatgtggacattgagattcacaygctggctcctgaagggtgctcagtctccttggtgattaaggggcagccagccctggcttccaaggctcccgtactgtctgtgtccttgtataaggagctttgctcttggaattactgaaagtctgtggcccaagagagagacacaagtggccttaagtctttttgaagtgttatttcatccagggaaatgcctcgagccatagagcctgaaatcatctttgttggctcagaaaataccttagcttcactcagctggactgcattgaaggcgaggctgccccttggatcaagcagaaaacaagagaaagaaagaacgttccctttggggatagtctggaaagttgggatttgcaaataaaggctctggaagc

SEQ ID NO: 430 - DNA, 2075 bp, Homo sapiens
gtctctttaagggccaggcgccgggatccaggcggcgcccaacggctggactagcagtcgtccgcgccgactcgcacargaaggaascccgggcctctggatccgctcgcccggctatgctgctgtggccgctgcggggctgggccgcccgggcgctgcgctgctttgggccgggaagtcgcgggagcccggcctcaggccccgggccgcggagggtgcagcgccgggcctggcctcccgataaagaacaggaaaaagagaaaaaatcagtggtgttaacggagcctgtgtccaagtggagaaatgtccgtggccacaatcctctgggcctgatgtaccacgatgcctctcgctggggtcttacgctacagacttatgtgcagctcaccatgctggacaggmatactcgtcctcaggtgtcatctgtacggttgatggagaggtcgattcacagcgcaagatacatttttgtagaaaacctgtatagaagtgggaagatgccagaagtggactatgtagttctgtcggaatggtttgactggatcttgaggaacatggacgtgtctgttgatttgatagtttaccttcggaccaatcctgagacttgttaccagaggttaaagaagagatgcagggaagaggagaaggtcattccgctggaatacctggaagcaawtcaccatctccatgaggagtggctcatcaaaggcagccttttccccatggcagcccctgttctggtgattgaggctgaccaccacatggagaggatgttagaactctttgaacaaaatcgggatcgaatattaactccagagaatcggaagcattgcccataggaggcaaaaggtctatggctcatgtctgaaaaatgcctgctgctgccaagttagctattgggagcaatctggaaaaacttgctcccaggagggctttgtgtctggccagcttgattttcctaatggtctcatctcctttgctagtgtctttgtcatgcgtctctggccctcgtgggtaaatgacaaacgggaccaatgggtttgccaagccctttgctgttcgcagcctcacattcccccggtgcctctcccatggctttgtgctgctgagtcgctctcatgaagcccttagggagagcacctgttgtgtgcctgacaccacgctggagctgtgtaccaatcgtctcagccttcattaggaggccgaggtaggagtcttatatcccaggtgaggaatttgaagctcagaaaggttgaggggctccccagaggtcacacagcctgtgtgcagtggagctggcaccattcagactttcagccgactcagcaactttcccttgccctgggctgcctcctcctgagagctgttccccaccgccctgcctcttccggttggaggctctcatgtctctttggggagagctggcagtgtgcggagctgataacattttcccaatattgagcagttcccaaggacagtcagcatttctagacttccacaaaattatgctgcatttggctggagcccggtgttcagtggtttccctgcccgaggtcgctgcagccccatctaccacatcttcatgtggacattgagattcacaygctggctcctgaagggtgctcagtctccttggtgattaaggtcctgcttgaactgctgccaactccatgtcagggaagtcgcttttggtgcctggctggtttgcccagagccaagctggggcaaggggcagccagccctggcttccaaggctcccgtactgtctgtgtccttgtataaggagctttgctcttggaattactgaaagtctgtggcccaagagagagacacaagtggccttaagtctttttgaagtgttatttcatccagggaaatgcctcgagccatagagcctgaaatcatctttgttggctcagaaaataccttagcttcactcagctggactgcattgaaggcgaggctgccccttggatcaagcagaaaacaagagaaagaaagaacgttccctttggggatagtctggaaagttgggatttgcaaataaaggctctggaagcattgctggtcctgaa

SEQ ID NO: 431 - DNA, 2050 bp, Homo sapiens
gtctctttaagggccaggcgccgggatccaggcggcgcccaacggctggactagcagtcgtccgcgccgactcgcacargaaggaascccgggcctctggatccgctcgcccggctatgctgctgtggccgctgcggggctgggccgcccgggcgctgcgctgctttgggccgggaagtcgcgggagcccggcctcaggccccgggccgcggagggtgcagcgccgggcctggcctcccgataaagaacaggaaaaagagaaaaaatcagtgatctgtgtcgagggcaatattgcaagtgggaagacgacatgcctggaattcttctccaacgcgacagacgtcgaggtgttaacggagcctgtgtccaagtggagaaatgtccgtggccacaatcctctgggcctgatgtaccacgatgcctctcgctggggtcttacgctacagacttatgtgcagctcaccatgctggacaggmatactcgtcctcaggtgtcatctgtacggttgatggagaggtcgattcacagcgcaagatacatttttgtagaaaacctgtatagaagtgggaagatgccagaagtggactatgtagttctgtcggaatggtttgactggatcttgaggaacatggacgtgtctgttgatttgatagtttaccttcggaccaatcctgagacttgttaccagaggttaaagaagagatgcagggaagaggagaaggtcattccgctggaatacctggaagcaawtcaccatctccatgaggagtggctcatcaaaggcagccttttccccatggcagcccctgttctggtgattgaggctgaccaccacatggagaggatgttagaactctttgaacaaaatcgggatcgaatattaactccagagaatcggaagcattgcccataggaggcaaaaggtctatggctcatgtctgaaaaatgcctgctgctgccaagttagctattgggagcaatctggaaaaacttgctcccaggagggctttgtgtctggccagcttgattttcctaatggtctcatctcctttgctagtgtctttgtcatgcgtctctggccctcgtgggtaaatgacaaacgggaccaatgggtttgccaagccctttgctgttcgcagcctcacattcccccggtgcctctcccatggctttgtgctgctgagtcgctctcatgaagcccttagggagagcacctgttgtgtgcctgacaccacgctggagctgtgtaccaatcgtctcagccttcattaggaggccgaggtaggagtcttatatcccaggtgaggaatttgaagctcagaaaggttgaggggctccccagaggtcacacagcctgtgtgcagtggagctggcaccattcagactttcagccgactcagcaactttcccttgccctgggctgcctcctcctgagagctgttccccaccgccctgcctcttccggttggaggctctcatgtctctttggggagagctggcagtgtgcggagctgataacattttcccaatattgagcagttcccaaggacagtcagcatttctagacttccacaaaattatgctgcatttggctggagcccggtgttcagtggtttccctgcccgaggtcgctgcagccccatctaccacatcttcatgtggacattgagattcacaygctggctcctgaagggtgctcagtctccttggtgattaaggggcagccagccctggcttccaaggctcccgtactgtctgtgtccttgtataaggagctttgctcttggaattactgaaagtctgtggcccaagagagagacacaagtggccttaagtctttttgaagtgttatttcatccagggaaatgcctcgagccatagagcctgaaatcatctttgttggctcagaaaataccttagcttcactcagctggactgcattgaaggcgaggctgccccttggatcaagcagaaaacaagagaaagaaagaacgttccctttggggatagtctggaaagttgggatttgcaaataaaggctctggaagc

SEQ ID NO: 432 - DNA, 1949 bp, Homo sapiens
gccaagttatgggtgcgttctgccagcgtcctagcagtgataaagaacaggaaaaagagaaaaaatcagtgatctgtgtcgagggcaatattgcaagtgggaagacgacatgcctggaattcttctccaacgcgacagacgtcgaggtgttaacggagcctgtgtccaagtggagaaatgtccgtggccacaatcctctgggcctgatgtaccacgatgcctctcgctggggtcttacgctacagacttatgtgcagctcaccatgctggacaggmatactcgtcctcaggtgtcatctgtacggttgatggagaggtcgattcacagcgcaagatacatttttgtagaaaacctgtatagaagtgggaagatgccagaagtggactatgtagttctgtcggaatggtttgactggatcttgaggaacatggacgtgtctgttgatttgatagtttaccttcggaccaatcctgagacttgttaccagaggttaaagaagagatgcagggaagaggagaaggtcattccgctggaatacctggaagcaawtcaccatctccatgaggagtggctcatcaaaggcagccttttccccatggcagcccctgttctggtgattgaggctgaccaccacatggagaggatgttagaactctttgaacaaaatcgggatcgaatattaactccagagaatcggaagcattgcccataggaggcaaaaggtctatggctcatgtctgaaaaatgcctgctgctgccaagttagctattgggagcaatctggaaaaacttgctcccaggagggctttgtgtctggccagcttgattttcctaatggtctcatctcctttgctagtgtctttgtcatgcgtctctggccctcgtgggtaaatgacaaacgggaccaatgggtttgccaagccctttgctgttcgcagcctcacattcccccggtgcctctcccatggctttgtgctgctgagtcgctctcatgaagcccttagggagagcacctgttgtgtgcctgacaccacgctggagctgtgtaccaatcgtctcagccttcattaggaggccgaggtaggagtcttatatcccaggtgaggaatttgaagctcagaaaggttgaggggctccccagaggtcacacagcctgtgtgcagtggagctggcaccattcagactttcagccgactcagcaactttcccttgccctgggctgcctcctcctgagagctgttccccaccgccctgcctcttccggttggaggctctcatgtctctttggggagagctggcagtgtgcggagctgataacattttcccaatattgagcagttcccaaggacagtcagcatttctagacttccacaaaattatgctgcatttggctggagcccggtgttcagtggtttccctgcccgaggtcgctgcagccccatctaccacatcttcatgtggacattgagattcacaygctggctcctgaagggtgctcagtctccttggtgattaaggtcctgcttgaactgctgccaactccatgtcagggaagtcgcttttggtgcctggctggtttgcccagagccaagctggggcaaggggcagccagccctggcttccaaggctcccgtactgtctgtgtccttgtataaggagctttgctcttggaattactgaaagtctgtggcccaagagagagacacaagtggccttaagtctttttgaagtgttatttcatccagggaaatgcctcgagccatagagcctgaaatcatctttgttggctcagaaaataccttagcttcactcagctggactgcattgaaggcgaggctgccccttggatcaagcagaaaacaagagaaagaaagaacgttccctttggggatagtctggaaagttgggatttgcaaataaaggctctggaagcattgctggtcctgaa

SEQ ID NO: 433 - DNA, 1171 bp, Homo sapiens
tcagagcgggagtcttcgttgcgccagcgactaaaaagagaattaaatatgggtgatgttgagaaaggcaagaagatttttattatgaagcgttcccagtgccacattgttgaaaagggaggcaagcataagactgggccaaatctccatggtctcttcgggyggaagacaggtcaggcccctggacactcttacayagccaccattaagaacaaagacatcatctggggagaggatacactgatggagtatttggagaatcccaagaagtacatccctggaacaaaaatgatctttgtcggcattaagaaggaagaggctgggcacgacttgatagcttatctcaaaaaagctactaatgagtaataattggccactgccttatttattacaaaacagaaatgtctcatgacttttttatgtgtaccatcctttaatagatctcatacaccagaattcagatcatgaatgactgacagaatattttgttgggcagtcctgatttaaaactaagactggcttgtggttaaatgaatatgttcagtttttgattttaatagtaactccaattcagtaaatgctatcactgtttaccccttctaaagatatgattagacttcgttagtaatgttcaacttttcacaaagatggtgagtgccatcttaaaacttactggagattggttttatatttagatttctataactggttatgtgaatatatttaaatactggggaaattcctacactgtcttagaaccaagcaagattcacctgtgttttgtgttcatttgcctcttaaaggcaagggttgaagataagtaagggagcaatgtctatagttttggccttaactataacaatctaattataattccctgtatttaaaatggttccttttacttattgaaaggcattttagtgtggtttatgtgtaatattaaagattattcaacacctctcacatcttatagatctataagrtcacatgcttttaaaatagtagcaagttaaacttcactcttgaattctttacaatctaagtcaaactaggttataatttaggattgtctttaaacagccattcagaaacataaaactgtagaactgtgtatttgtgattgggaatggtgcttttgccaacttaaaaggattaaagtaatggagatata

SEQ ID NO: 434 - DNA, 1079 bp, Homo sapiens
agtcttcttggatttttttcaatagcttatctataactctattctagtgtatttatcactccatcttattttataatcagagacagttgttcaagtaactcttgtaactctctttccactgagtctgatcattctggttttaaggacaggtaccatcctgtccccagcaccttccacagagcagcttgataaatactagttgacttgaaaagatgagccatggcacatcctttcatcacctcgggaggtgccgatgtcttgagtcgtgacaccggcgtatgctgacactgctgcctccagtagttcttttgtcctcttccctttgtcacccctacactttggaggtgaacttctctcctgagggctgtaaagactagtttgaaaagggagagccaagaaccaactgaattgtctcagaatggaaacactatattatttcagaggagttaatttcagaaggaaaatgggtcaaacttgaaaaaacaacatacatggctcctattggtaaaactggaacttgggactcagtgaaacatacaaccaggaaagaacagactggtgatgatgtagyggtcatccctgtgctgcagagaacgcttcactacgagtgtatcgttctggtgaaacagtcctgaccaccaatgggtggctactgcatagagttccctgcagggaactcatagaagatggtgaaaccccaggagcagctgctctttgggagcttgaggaagaaactggctacaaaggggacgctgctgaatgttctccagtggtctatatggacccaggtttgtcaaactgtaccacacacatcgtgacagtaatcattaacggagatgacgcagaaaatgtaaggcccaagccaaagccaggggatggagaatttgtggaagtcatttcgttacccaagaatgacctgctgcagggactcgatgctctcgtagctgaaaaacatcttacagtggatgccaaagtctattcccatgctctagcactgaaacatgcaaatgtgaagccatctgaagtgcccgtcctgaaattttaaggccaaagacgacactggccatttttgtaaatga

SEQ ID NO: 435 - DNA, 1874 bp, Homo sapiens
gctgcgggcctcccaggtgcttcttgcaggcatgaaaggactcggggctgaaattgccaagaatctcatcctggcaggagtgaaaggactgaccatgctggatcacaaacagatatctccagaakaacccggagctcagttcttgattcgtattgggtctgttggccgaaatagggctgaagcctctttggagcgagctcagaatcttaaccccatggtggatgtgaagttgsacactgaggatatagagaagaaaccagagtcatttttcactcaatttgatgctgtgtgttgacttgctgctccagggctgtcatagttaaggttgaccagatctgtcacaaaaatagcatcaagttmtttgcaggagatgtttttagctaccatggatacacatttgccaatctaggagaacatgagtttgtagaggagaaaactaaagttgctaaagttagccaaggagtagaagatgggcctgataccaagagagtaaaacttgattcttctgagacaacgatggtcaagaagaaggtggtcttctgccccgttaaagaagcgctggaggtggactggagcagtaagaaagcaaaggctgctctgaagcgcacgacctccgaccactttctccttcaagtgctcctaaagttccgcacagataaaggaagagatcccagttctgatacacacggggaagattccgagttgttgctccagatacgaaacgatgtgcttgactcactgggtattattcctgacccgcgctttatcacgtacttcttctctgagatggccccagtgtgtgcggtggttggagggattttggcacaggaaattgtgaaggccctgtctcagcaggaccctcctcacaacttcttcttcaatggcatgaaggggaatgggattctggagtggcttggccccaagtgaacccaagacttggcagccctggagatgccaattgcaacatgcctgcctgtattccctgtccccctccttcgtgaaggcatctccaggcaaggaaaactgaagtcatcggcccagtacaaaacatttcctgcgacgaaggaggtggtgccgtcatgctgcttcccatcacccgcagctgcttgacaaggggtgcagggcagctgtctttgttccagcactgttcagactgcctgctgtcccaggcctgccagctcccctgagtgataagcacttccaagcacccctctgccccttctctgtccttatgctgtcacggcctcgccagccctctagggtattatgggagatgcctgccaggaacgagcatgctctgttgcttaggagcctcttgccaccttcttggacttaactccccacctgatgtcttacagagaggagcgtgacttcaggtggagagtaggcccaggccccatgaggcaccagtggaagcacagctccaagttcagacaggtgcccttagagaggaaacccatgacaggcaaatgcatttcctctggagtttgagaccctgacgaacaacaggtggcatctggtgtgccgttcttgagttttcgtttaggattcgttgagttccagctgggttttgggagaaaggagatgctaccaagtcttggatgttagggcgagaccctgcaagttgagtattagtgggagagcttgtctttcaaggcaggttcctggggcttcagggctaggaggcaggagcttgcccttttaacacaaccccagtcacccatgcggcccaggccactcagaggctgttgcatttcagggctgtgttggtcctctgtttacctcctaaaccacagctgtttgtgtttcacatatgttctgaattttccttggttctttttaaaggaatgataataaagttacttgctttagga

SEQ ID NO: 436 - DNA, 1344 bp, Homo sapiens
caaacccagtgtaagttaycaggctaattcttgcatatagcagtaaacacatggagtttacagtgtaatgaaaaaggcaagcattaaacaggtgaattaaacagtgatgagtgctatgaaaaaaagttgaatgtgttataggaatatggagtggaagatctaggttcatcaggcagaggagaaatcagggaaggcttccttgaggaagtgacaaccaagctgagacctgctctgtcgcctgccaccgctgctcgggcccgagtggttcactgcaccgtgaagacagattccagacaccgggaactcacgcctccaatcccagacgctatgtccagcaaaggctccatggttctggcctacagtggtggcctgaacacctcctgcatcctcgtgtggctgaaggaacaaggctatgatgtcactgcctacctggccaatactggccagaaggaagacttcgaggaagccaggaagaaggcactgaagcttggagccaaaaaggtgttcattgaggatgtcagcagggagtttgtggaggagttcatctgggcggccatccagtccagcgcactgtatgaggaccactacctcctgggtacttctctcaccaggccctgcatcgcccacaaaaaagtggaaaccgtccagcgggwgggggccaagtatgaaggtccctggagggctccctggaggatgcccgagttctacaactggttcaagggccgcagtgacctgatggaatatgcaaagcaacacgggattcccatcctggtcactcccaagaacctgtggagcatsgacaagaacctcatgcacatcagctacaaggctggaatcctggagaaccccaagaaccaagtgcctccaggtctctacacaaagatccaggacccagccaaagcccccaacacccctgacattctcaagatccaattcaaaaaaggrgtccccgtgagggtgaccagcgtcaaggatggcaccacccaccagacctccttggagctcttcatgtacctgaacgaagttgcaggcaagcacggtgtgggcttattgccatcgtggagaacatcttcaccagacaaaggcccaagccctgagtgtgaatttgtccgcccctgcatcgccaagtcccaggagccggcagaagggaaagtgcaggtgccggtcctcaagggccaggtgtacatccttggctgggagtccccactgtctctctacaatgaggagctgatgagcgtgaacgtgcagggtgattatgagccgattgatgacaccgggttcatcaacatcaaytccctcagactgaaggaataccattgtctccagagtaagttcactgccaga

SEQ ID NO: 437 - DNA, 1861 bp, Homo sapiens
tgtgaggacaaagaccagggccaggcccagggcggagcctccgcggccccgacgcagggactcggcctaggcggaggacggggcggagcgcggccggcaccatcgagccgggaagatggcaccgcccacggagctgctggccaggccggagcgaggcagcgcgcccggctcccgcgccatggggcggctggtggctgtgggcttgctggggatcgcgctggcgctcctgggcgagaggcttctggcactcagaaatcgacttaaagcctccagagaagtagaatctgtagaccttccacactgccacctgattaaaggaattgaagctggctctgaagatattgacatacttcccaatggtctggctttttttagtgtgggtctaaaattcccaggactccacagctttgcaccagataagcctggaggaatactaatgatggatctaaaagaagaaaaaccaagggcacgggaattaagaatcagtcgtgggtttgatttggcctcattcaatccacatggcatcagcactttcatagacaacgatgacacagtttatctctttgttgtaaaccacccagaattcaagaatacagtggaaatttttaaatttgaagaagsagaaaattctctgttgcatctgaaaacagtcaaacatgagcttcttccaagtgtgaatgacatcacagctsttggaccggcacatttctatgccacaaatgaccactacttctctgatcctttcttaaagtatttagaaacatacttgaacttacactgggcaaatgttgtttactacagtccaaatgaagttaaagtggtagcagaaggatttgattcagcaaatgggatcaatatttcacctgatgataagtatatctatgttgctgacatattggctcatgaaattcatgttttggaaaaacacactaatatgaatttaactcagttgaaggtacttgagctggatacactggtggataatttatctattgatccttcctcgggggacatctgggtaggctgtcatcctaatggccagaagctcttcgtgtatgacccgaacaatcctccctcgtcagaggttctccgcatccagaacattctatstgagaagcctacagtgactacagtttatgccaacaatgggtctgttctccaaggaagttctgtagcctcagtgtatgatgggaagctgctcataggcactttataccacagagccttgtattgtgaactctaaattgtacttttggcatgaaagtgcgataacttaacaattaattttctatgaattgctaattctgagggaatttaaccagcaacattgacccagaaatgtatggcatgtgtagttaattttattccagtaaggaacggcccttttagttcttagagcacttttaacaaaaaaggaaaatgaacaggttctttaaaatgccaagcaagggacagaaaagaaagctgctttcgaataaagtgaatacattttgcacaaagtaagcctcacctttgccttccaactgccagaacatggattccactgaaatagagtgaattatatttccttaaaatgtgagtgacctcacttctggcactgtgactactatggctgtttagaactactgwtaacgtattttgatgttttgtacttacatctttgtttaccattaaaaagttggagttatattaaagactaactaaaatcccagttttgtctgtgtttaattctgaaggcatatggctaggagaaatgggaaagcagctgcttccttatggagtttggataggcaagcatggccatattaatttctcttgtggaaagctgaaagtgaatggactcttaatttgaaacaacaac

SEQ ID NO: 438 - DNA, 1825 bp, Homo sapiens
tgtgaggacaaagaccagggccaggcccagggcggagcctccgcggccccgacgcagggactcggcctaggcggaggacggggcggagcgcggccggcaccatcgagccgggaagatggcaccgcccacggagctgctggccaggccggagcgaggcagcgcgcccggctcccgcgccatggggcggctggtggctgtgggcttgctggggatcgcgctggcgctcctgggcgagaggcttctggcactcagaaatcgacttaaagcctccagagaagtagaatctgtagaccttccacactgccacctgattaaaggaattgaagctggctctgaagatattgacatacttcccaatggtctggctttttttagtgtgggtctaaaattcccaggactccacagctttgcaccagataagcctggaggaatactaatgatggatctaaaagaagaaaaaccaagggcacgggaattaagaatcagtcgtgggtttgatttggcctcattcaatccacatggcatcagcactttcatagacaacgaattcaagaatacagtggaaatttttaaatttgaagaagsagaaaattctctgttgcatctgaaaacagtcaaacatgagcttcttccaagtgtgaatgacatcacagctsttggaccggcacatttctatgccacaaatgaccactacttctctgatcctttcttaaagtatttagaaacatacttgaacttacactgggcaaatgttgtttactacagtccaaatgaagttaaagtggtagcagaaggatttgattcagcaaatgggatcaatatttcacctgatgataagtatatctatgttgctgacatattggctcatgaaattcatgttttggaaaaacacactaatatgaatttaactcagttgaaggtacttgagctggatacactggtggataatttatctattgatccttcctcgggggacatctgggtaggctgtcatcctaatggccagaagctcttcgtgtatgacccgaacaatcctccctcgtcagaggttctccgcatccagaacattctatstgagaagcctacagtgactacagtttatgccaacaatgggtctgttctccaaggaagttctgtagcctcagtgtatgatgggaagctgctcataggcactttataccacagagccttgtattgtgaactctaaattgtacttttggcatgaaagtgcgataacttaacaattaattttctatgaattgctaattctgagggaatttaaccagcaacattgacccagaaatgtatggcatgtgtagttaattttattccagtaaggaacggcccttttagttcttagagcacttttaacaaaaaaggaaaatgaacaggttctttaaaatgccaagcaagggacagaaaagaaagctgctttcgaataaagtgaatacattttgcacaaagtaagcctcacctttgccttccaactgccagaacatggattccactgaaatagagtgaattatatttccttaaaatgtgagtgacctcacttctggcactgtgactactatggctgtttagaactactgwtaacgtattttgatgttttgtacttacatctttgtttaccattaaaaagttggagttatattaaagactaactaaaatcccagttttgtctgtgtttaattctgaaggcatatggctaggagaaatgggaaagcagctgcttccttatggagtttggataggcaagcatggccatattaatttctcttgtggaaagctgaaagtgaatggactcttaatttgaaacaacaac

SEQ ID NO: 439 - DNA, 1309 bp, Homo sapiens
tccccatatgtaaccaaaaaaatgctatcctggattttatttctctttcacaggaatgggaaggaaaagtgtggagtccgtgtggatttctcttattttatctgtggcttgaatgtacatttctgagagagggagtcagatggtgaaagggagagatgttcttgctgagtttgtttatgttgtgcttcagaggatgtaagacaagcagcaaatcagcagagacaagttaatgttcaccaccacaaaagtgaaattaaataaactgattgggcagtcccttgaagatggagtctcattctgtcactcaagctggagtgcagtggcgtgatctcagctcattgcaacctctgtctcccgggttcaagcaattctcctgtctcagcttcctgagtagctgggactacagctggcactgcctcccaagcccgccgccatggccgcctacaaactggtgctgatccagcatggagagtgcatggaacctggagatccacttcagcagctggtacgactcygacctgagcccggcaggccaccaggaggtgaagcgcaggcgggcaggcgctgctagatgttggctatgagtttgacatctgcttcacctcagtgcagaagagagcgacccggaccctctggacagtgctagatgccattgatcagatgtggcccacctgtaatgaggacttggcgcctcaatgagcggcactatgggggtctgaccgatctcggtaaagcagaaactgctgcaaagcatggtgaggcccaggtgaagatctggaggtgctcctatgatgtcccaccaccctgctggagcctgaccatcctttctacagcaacatcagtaaggatcgtaggtatgcagacctcacagatgatcagctatcctcctgtgagagtctgaagracactattgccagckctctgcccttttggaataaagaaatagttccccagatcaaggaagggaaatgggtactgattgcagcccatggcaacagcctccggggcattgtcaagcatctggaaggtctctctgaagaggctatcatggagctgaacctgctgactggtattcccattgtctgtaaattggacaagagctcgaagcccatcaggtgcatggagttcctgggggatgaagggaccctgtgtaaagccatggaagctgtggctgcccagggcaaggccaagaagtgaaggccggcgggcggactactgtccccaggagcaccctccttgcctggtgtgtccctctgctcatccctcctgcacacgccacactgaccacatctgtaggcatcttgagctg

SEQ ID NO: 440 - DNA, 3000 bp, Homo sapiens
gggcggccatgtggacagagctgggagggccggaaccagaacccaagcgtgatcctgaaccggagcccgagcctgctgcagagtgtcagcatgctgcgcttcctggcaccccggctgcttagcctccagggcaggaccgcccgctactcctcggcagcagccctcccaagccccattctgaacccagacatcccctacaaccagctgttcatcaacaatgaatggcaagatgcagtcagcaagaagaccttcccgacggtcaaccctaccacyggggaggtcatygggcacgtggctgaaggtgaccgggctgatgtggatcgggccgtgaaagcagcccgggaagycttccgcctggggtccccatggcgccggatggatgcctctgagcggggccggctgctgaacckcctggcagacctagtggagcgggatcgagtctacttggcctcactcgagaccttggacaatgggaagcctttccaagagtcttacgccttggacttggatgaggtcatcaaggtgtatcggtactttgctggctgggctgacaagtggcatggcaagaccatccccatggatggccagcatttctgcttcacccggcatgagcccgttggtgtctgtggccagatcatcccgtggaacttccccttggtcatgcagggttggaaacttgccccggcactcgccacaggcaacactgtggttatgaaggtggcagagcagaccyccctctctgccctgtatttggcctccctcatcaaggaggcaggctttccccctggggtggtgaacatcatcacggggtatggcccaacagcaggtgcggccatcgcccagcacrtggatgttgacaaagttgccttcaccggttccaccgaggtgggccacctgatccagaaagcagctggcgattccaacctcaagagagtcaccctggagctgggtggtaagagccccagcatcgtgctggccgatgctgacatggagcatgccgtggagcagtgccacgaagccctgttcttcaacatgggccagtgctgctgtgctggctcccggaccttcgtggaagaatccatctacaatgagtttctcgagagaaccgtggagaaagcaaagcagaggaaagtggggaacccctttgagctggacacccagcaggggcctcaggtggacaaggagcagtttgaacgagtcctaggctacatccagcttggccagaaggagggcgcaaaactcctctgtggcggagagcgtttcggggagcgtggtttcttcatcaagcctactgtctttggtggcgtgcaggatgacatgagaattgccaaagaggagatctttgggcctgtgcagcccctgttcaagttcaagaagattgaggaggtggttgagagggccaacaacaccaggtatggcctggctgcggctgtgttcacccgggatctggacaaggccatgtacttcacccaggcactccaggccgggaccgtgtgggyaaacacctacaacatcgtcacctgccacacgccatttggagggtttaaggaatctggaaacgggagggagctgggtgaggatgggcttaaggcctacacagaggtaaagacggtcaccatcaaggttcctcagaagaactcgtaagagcagctgtcagggaggcccagtcacagtccagcaattccacaaccaccttgacsaatgcttgccaagctgttttaaagccaagaacaccctttctttgttccaaattaactcttagaagaaaccccacaaataaagcaattcaatcaaggctgttctatttaaatcagagatggggaccaggctcagagttctacctatctaacccccaaccacagcccccttggtggcccatgagttgcttccatgaaatcttaggagtctctggaggacagattaaaaaccagtgatctgtaatttgtagctcttcctgctgatccaaggactttcccatgggtgcgcttgatggtttagtggatcgactcaactcagaacacaagcttggaaagtgttaggggttttgaactaggtggatactaaatctcggccccactcttcattggcttaacctaaaaaccagaggtgcttttccttgtctgtgtgccagttgctggctgttttagttgcttgcccttcattttgctactgattttccttaatttgtgggaaggagtaggcaaagaatatgcttacatgattacacctgtaaagtaagcccaaacatcccaaatgtccatcaactgatgagtggattaataaaatgtttccatggaatattccttggattactcagccataaaaaggaatgaagtactgacacatgctgtgacatcagtgaaccctgaaaacatccttctcagtgaaacaagccagagagatgtacaaggctacagactgtatgattccatttatatgaaatatacatactaggcaaatccatggagatggaacatagattagtggttgccaggggatagaggagtaattgttagtgggcatgggatttgtttttgggaggttttgaaaatgttctggagttgaacaatagtaatggttgcatgatttggtaaaaatactaaaaactatggaattgtttaattatggtatatgaattaatttctttctttttttcttttttttttttttttttgacacggagtctcactctgtcgcccaggctggagtgcagtggtgtgatctcgtctcactgcaacctccgcctcccagattcaagcgattctcctgtctcagcctcctgagtagctgggattataggtacatgccatcacacctggctaatttttgtatttttagtagagatgaggtttcaccattttggccaggctgatcttgaactcctgacctcaggtgatccacccgcctcagcctcccaaagtgctgggattacaggtgggagccacaacacccggccatgaattaactccgttaaaaaataaacgtatacattctgtgagc

SEQ ID NO: 441 - DNA, 778 bp, Homo sapiens
aaagaacccagccaacccgcagagggtggggagggggcaagctgtgaggagagcggacccaagaaccatgtctacgcgtgagtcctttaaccccgaaagttacgaattggacaagagcttccggctaaccagattcactgaactgaagggcacaggctgcaaagtgccccaagatgtcctgcaaaaattgctgtaatctttataggagaaccacttccaagaagatgagcagtttctsggagccgttacgccaaggcttggcattggaatggatactcgtgtcattcctttgaggcacggtgggctttccttggttcaaactacagattacgtttaccggatcgtagacgacccttccatgatgggcaggatagcacgtgccagtgtcttcagtgacctctacgcaatgtgggtcacggaatgtgacaatatgctgatgctccttggagtcagtcmtaaaatgaccgacagggaaagggataaaatgatgtctctgattatccagggttttaaagacgcagctgaggaagcaggaacatctgtaatgggtggccaaaccatactaaacccctggattgccctgggaggagtcgctaccactgtctgccagcccaatgaatttatcayggccagccccaagttggaccagcaacaggggatggtgttccctcctgggatctgtgaggcagcagctgaaggacagataaatttgaagttggagaagacctacacatgcaccacatccctaacctgcagaggcctggagatacagtattag

SEQ ID NO: 442 - DNA, 1695 bp, Homo sapiens
aaaccagtctgtctctactaaaaatacaaaagttagatgggagtgatggtgggtgcctgtaatcgcagctattcaggatgctgaggcaggagaattgcttgaacctgggagacagaggttgcagtgagccaagatcacaccactgcactccagcctgggcatcagagcaagactccgtctcaaaaacaaacaaaccaggacgtgagacttctacctgctcactcagaatcatttccgcaccaaccatggccacgtttgtggagctcagtacaaaagccaagatgcccattgtgggcctgggcacttggaggtctcttctcggcaaagtgaaagaagcggtgaaggtggccattgatgcagaatatcgccacattgactgtgcctatttctatgagaatcaacatgaggtgggagaagccatccaagagaagatccaagagaaggctgtgatgcgggaggacctgttcatcgtcagcaaggtgcacatggcgcatttggtgtggcccactttctttgagagaccccttgtgaggaaagcctttgagaagaccctcaaggacctgaagctgagctatctggacgtctatcttattcactggccacagggattcaagagcttgaaaaagtggtatgcagatgtggtatttagcaagcatcaggatcctgaaaccttgttgaacagaaccaagtgtcctgatgcagattccagtaaacttttcattctgtatttacagactggggatgactttttccccaaagatgataaaggtaatatgatcagtggaaaaggaacgttcttggatgcctgggaggccatggaggagctggtggacgaggggctggtgaaagcccttggggtctcaaatttcaaccacttccagatcgagaggctcttgaacaaacctggactgaaatataaaccagtgactaaccagaactccctaggaacaatgcaaaacagagccggctttccccgtgatgaggattgtttgctgttgcaggttgagtgtcacccatacctcacgcaggagaaactgatccagtactgccactccaagggcatcaccgttacggcctacagccccctgggctctccggatagaccttgggccaarcctgargacccttccctgctggaggatcccaagattaaggagattgctgcaaagcacaaaaaaaccrcagcccaggttctgatccgtttccatatccagaggaatgtgacagtgatccccaagtctatgacaccagcacacattgttgagaacattcaggtctttgactttaaattgagtgatgaggagatggcaaccatactcagcttcaacagaaactggagggcctttgacttcaaggaattctctcatttggaggactttcccttygatgcagaatattgaggttgaatctcctggtgagattacacaggggattctctttcttcrctgaagtgtgactgtctccactcaagaactattttagccaagcttatctgagatcacagtgaactttgtcctgttgtagaccagaatggaggtgctgttttagacatgtatttctgtatgttcaactaggataagaatatcacagaaaagcatggcctgaataagcaaatgacaattttttccacttatctgatctgatcaaatgtctgttaagcaccagaaactctgccaacactgaggatgtaaagat

SEQ ID NO: 443 - DNA, 1491 bp, Homo sapiens
aaaccagtctgtctctactaaaaatacaaaagttagatgggagtgatggtgggtgcctgtaatcgcagctattcaggatgctgaggcaggagaattgcttgaacctgggagacagaggttgcagtgagccaagatcacaccactgcactccagcctgggcatcagagcaagactccgtctcaaaaacaaacaaaccaggacgtgagacttctacctgctcactcagaatcatttccgcaccaaccatggccacgtttgtggagctcagtacaaaagccaagatgcccattgtgggcctgggcacttggaggtctcttctcggcaaagtgaaagaagcggtgaaggtggccattgatgcagaatatcgccacattgactgtgcctatttctatgagaatcaacatgaggtgggagaagccatccaagagaagatccaagagaaggctgtgatgcgggaggacctgttcatcgtcagcaaggtgtggcccactttctttgagagaccccttgtgaggaaagcctttgagaagaccctcaaggacctgaagctgagctatctggacgtctatcttattcactggccacagggattcaagactggggatgactttttccccaaagatgataaaggtaatatgatcagtggaaaaggaacgttcttggatgcctgggaggccatggaggagctggtggacgaggggctggtgaaagcccttggggtctcaaatttcaaccacttccagatcgagaggctcttgaacaaacctggactgaaatataaaccagtgactaaccaggttgagtgtcacccatacctcacgcaggagaaactgatccagtactgccactccaagggcatcaccgttacggcctacagccccctgggctctccggatagaccttgggccaarcctgargacccttccctgctggaggatcccaagattaaggagattgctgcaaagcacaaaaaaaccrcagcccaggttctgatccgtttccatatccagaggaatgtgacagtgatccccaagtctatgacaccagcacacattgttgagaacattcaggtctttgactttaaattgagtgatgaggagatggcaaccatactcagcttcaacagaaactggagggcctttgacttcaaggaattctctcatttggaggactttcccttygatgcagaatattgaggttgaatctcctggtgagattacacaggggattctctttcttcrctgaagtgtgactgtctccactcaagaactattttagccaagcttatctgagatcacagtgaactttgtcctgttgtagaccagaatggaggtgctgttttagacatgtatttctgtatgttcaactaggataagaatatcacagaaaagcatggcctgaataagcaaatgacaattttttccacttatctgatctgatcaaatgtctgttaagcaccagaaactctgccaacactgaggatgtaaagat

SEQ ID NO: 444 - DNA, 1347 bp, Homo sapiens
agagacttgggttttgctccctaggagccctggaatagctttggccagaattccctatctcccattagaacctctcctttgcgtcctttgttaacctccaagtctacttggtgaaaacgcccacgaagaagtaacaaggactttgttcctagtgtgccaggtttgggcaccagtgctgtagtggctttctctgctgctccttgtgcatcagcagacagatgtggttcacataggaagaaagactaacgtaggcaaagatttgctctttcttcagcagccctagaaagacggcggcctgggtgattcaccactccttcctcacgtccttgattttatttgaactgagctccagatgctcctcccacccttttcctcttggaagccaaacccctttgtaatctgtataaggtccacaccccgggagctgagtgattgcagaaactggccttccatctctctcagacaccaagctgcagatccaggcttttctgggaaagtgaggccaccatggctctggagaagtctcttgtccggctccttctgcttgtcctgatactgctggtgctgggctgggtccagccttccctgggcaaggaatcccgggccaagaaattccagcggcagcatatggactcagacagttcccccagcagcagctccacctactgtaaccaaatgatgaggcgccggaatatgacacaggggckgtgcaaaccagtgaacacctttgtgcacgagcccctggtagatgtccagaatgtctgtttccaggaaaaggtcacctgcaagaacgggcagggcaactgctacaagagcaactccagcatgcacatcacagactgccgcctgacaaacggctccaggtaccccaactgtgcataccggaccagcccgaaggagagacacatcattgtggcctgtgaagggagcccatatgtgccagtccactttgatgcttctgtggaggactctacctaaggtcagagcagcgagataccccacctccctcaacctcatcctctccamagctgcctcttccctcttccttccctgctgtgraagaagtwactacagttagggctcctattcaacacacacatgcttcyctttcctgagtcccatycctgcgtgattttgggggtgaagagtgggttgtgwggtgggccccatgttaacccctccactctttctttcaataaaacgcagttgcaaacacctgatttctgaagcggttctgtctaggtactgtttctggcattgccttccagcaaggggtaagaactgtaaatctgattcactttggagaacggtgaatggagtaattaaatgccttcccttctgacttgg

SEQ ID NO: 445 - DNA, 1430 bp, Homo sapiens
agagacttgggttttgctccctaggagccctggaatagctttggccagaattccctatctcccattagaacctctcctttgcgtcctttgttaacctccaagtctacttggtgaaaacgcccacgaagaagtaacaaggactttgttcctagtgtgccaggtttgggcaccagtgctgtagtggctttctctgctgctccttgtgcatcagcagacagatgtggttcacataggaagaaagactaacgtaggcaaagatttgctctttcttcagcagccctagaaagacggcggcctgggtgattcaccactccttcctcacgtccttgattttatttgaactgagctccagatgctcctcccacccttttcctcttggaagccaaacccctttgtaatctgtataaggtccacaccccgggagctgagtgattgcagaaactggccttccatctctctcagacaccaagctgcagatccaggtcactttgtaggtcaccacctagaggggaggaagacctcgctttggagagtgggaataaaacgctcgtggaaaagggtacacgcttttctgggaaagtgaggccaccatggctctggagaagtctcttgtccggctccttctgcttgtcctgatactgctggtgctgggctgggtccagccttccctgggcaaggaatcccgggccaagaaattccagcggcagcatatggactcagacagttcccccagcagcagctccacctactgtaaccaaatgatgaggcgccggaatatgacacaggggckgtgcaaaccagtgaacacctttgtgcacgagcccctggtagatgtccagaatgtctgtttccaggaaaaggtcacctgcaagaacgggcagggcaactgctacaagagcaactccagcatgcacatcacagactgccgcctgacaaacggctccaggtaccccaactgtgcataccggaccagcccgaaggagagacacatcattgtggcctgtgaagggagcccatatgtgccagtccactttgatgcttctgtggaggactctacctaaggtcagagcagcgagataccccacctccctcaacctcatcctctccamagctgcctcttccctcttccttccctgctgtgraagaagtwactacagttagggctcctattcaacacacacatgcttcyctttcctgagtcccatycctgcgtgattttgggggtgaagagtgggttgtgwggtgggccccatgttaacccctccactctttctttcaataaaacgcagttgcaaacacctgatttctgaagcggttctgtctaggtactgtttctggcattgccttccagcaaggggtaagaactgtaaatctgattcactttggagaacggtgaatggagtaattaaatgccttcccttctgacttgg

SEQ ID NO: 446 - DNA, 928 bp, Homo sapiens
agatgaggcaggaagcactcattccatatcaggaagtgatcagttcctcaaaactggctcgaagggttagagaagaaaggcagacaacagcttctgagctttggactaatcacagcctctgttctcagcaggagccccaacactgagaccagaaaagatggtgctatgctttcctcttcttttactgctgctggttctatggggaccagtgtgtccacttcatgcttggcctaagcgtctcaccaaggctcactggtttgaaattcagcatatacagccaagtcctctccaatgcaacagggcaatgagtggcatcaacaattatacccagcactgtaagcatcaaaatacctttctgcatgactctttccagaaygtggctgctgtctgtgatttgctcagcattgtctgcaaaaatcgtcrgcacaactgccaccagagctcaaagcctgtcaacatgactgactgcagactcacttcaggaaagtatccccagtgccgctatagtgcygctgcccagtacaaattcttcattgttgcctgtgacccccctcagaagagcgatcccccctacaagttggttcctgtacacttagatagtattctstaaggcatccactgcatttcctttcatttgacatagcttctgttacaattgcatccacgttttcttttcttttgttgattttcttgttcccgtagaagaaagaagaaaggtgtttggagaattcgagtgcctaggatgccagaccagagttgagacaaaaagaaataagattattttctgctttgtagttctgtacttttcgagagaagggaatagggaagacagcaaagaaagattcagatttctaaccctgcaacttttgccaagctttattgccctgtgttcacagcaataaaaccacttcctgctgcattctaatga

SEQ ID NO: 447 - DNA, 1024 bp, Homo sapiens
ccttcctgtatacatgtgataatgatactgttttaaagaacaggtgtgaaagtctaagagtttaatccagactctgcacaagaagttaatctgccaaaccctaggattctccttctgaaagctcagaatatttcttccccttccctatacacacagggctcgaagggttagagaagaaaggcagacaacagcttctgagctttggactaatcacagccyctgttctcagcaggagccccaacactgagaccagatggtgctatgctttcctcttcttttactgctgctggttctatggggaccagtgtgtccacttcatgcttggcctaagcgtctcaccaaggctcactggtytgaaattcagcatatacagccaagtcctctccaatgcaacagggcaatgagtggcatcaacaattatacccagcactgtaagcatcaaaatacctttctgcatgactctttccagaatgtggctgctgtctgtgatttgctcagcattgtctgcaaaaatcgtcggcacaactgccaccagagctcaaagcctgtcaacatgactgactgcagactcacttcaggaaagtatccccagtgccgctatagtgctgctgcccagtacaaattcttcattgttgcctgtgacccccctcagaagagcgatcccccctacaagttggttcctgtacacttagatagtattctctaaggcatccactgcatttcctttcatttgacatagcttctgttacaattgcatccacgttttcttttcttttgttgattttcttgttcccgtagaagaaagaagaaaggtgtttggagaattcgagtgcctaggatgccagaccagagttgagacaaaaagaaataagattattttctgctttgtagttctgtacttttcgagagaagggaatagggaagacagcaaagaaagattcagatttctaaccctgcaacttttgccaagctttattgccctgtgttcacagcaataaaaccacttcctgctgcattctaatga

SEQ ID NO: 448 - DNA, 1061 bp, Homo sapiens
gttttcagtcatgttgtttctttaagttggtttagccttcctgtatacatgtgataatgatactgttttaaagaacaggtgtgaaagtctaagagtttaatccagactctgcacaagaagttaatctgccaaaccctaggattctccttctgaaagctcagaatatttcttccccttccctatacacacagggctcgaagggttagagaagaaaggcagacaacagcttctgagctttggactaatcacagcctctgttctcagcaggagccccaacactgagaccagaaaagatggtgctatgctttcctcttcttttactgctgctggttctatggggaccagtgtgtccacttcatgcttggcctaagcgtctcaccaaggctcactggtttgaaattcagcatatacagccaagtcctctccaatgcaacagggcaatgagtggcatcaacaattatacccagcactgtaagcatcaaaatacctttctgcatgactctttccagaaygtggctgctgtctgtgatttgctcagcattgtctgcaaaaatcgtcrgcacaactgccaccagagctcaaagcctgtcaacatgactgactgcagactcacttcaggaaagtatccccagtgccgctatagtgcygctgcccagtacaaattcttcattgttgcctgtgacccccctcagaagagcgatcccccctacaagttggttcctgtacacttagatagtattctstaaggcatccactgcatttcctttcatttgacatagcttctgttacaattgcatccacgttttcttttcttttgttgattttcttgttcccgtagaagaaagaagaaaggtgtttggagaattcgagtgcctaggatgccagaccagagttgagacaaaaagaaataagattattttctgctttgtagttctgtacttttcgagagaagggaatagggaagacagcaaagaaagattcagatttctaaccctgcaacttttgccaagctttattgccctgtgttcacagcaataaaaccacttcctgctgcattctaa

SEQ ID NO: 449 - DNA, 1575 bp, Homo sapiens
atgagtgggaattgggtgcacccaggccagatcctaatttgggctatctgggtccttgcagcccccaccaaagggccttctgctgaagggccacagaggaacaccaggctgggatggattcagggcaagcaagtcactgtgctgggaagccctgtgcctgtgaacgtgttcctcggagtcccctttgctgctcccccgctgggatccctgcratttacgaacccgcagcctgcatcgccctgggataacttgcgagaagccacctcctaccctaatttgtgcctccagaactcagagtggctgctcttagatcaacayatgctcaaggtgcattacccgaaattcggagtgtcagaagactgcctctacctgaacatctatgcgcctgcccacgccgatacaggctccaagctccccgtcttggtgtggttcccaggaggtgccttcaagactggctcagcctccatctttgatgggtccgccctggctgcctatgaggacgtgctggttgtggtcgtccagtaccggctaggaatatttggtttcttcaccacatgggatcagcatgctccggggaactgggccttcaaggaccaggtggctgctctgtcctgggtccagaagaacatcgagttcttcggtggggaccccagctctgtgaccatctttggcgagtccgcgggagccataagtgtttctagtcttatactgtctcccatggccaaaggcttattccacaaagccatcatggagagtggggtggccatcatcccttacctgraggcccatgattatgagaagagtgaggacctgcaggtggttgcacatttctgtggtaacaatgcgtcagactctgaggccctgctgaggtgcctgaggacaaaaccctccaaggagctgctgaccctcagccagaaaacaaagtctttcactcgagtggttgatggtgctttctttcctaatgagcctctagatctattgtctcagaaagcatttaaagcaattccttccatcatcggagtcaataaccacgagtgtggcttcctgctgcctatgaaggaggctcctgagatcctcagtggctccaacaagtcccttgccctccatctgatacaaaacatcctgcacatcccgcctcagtatttgcaccttgtggctaatgaatacttccatgacaagcactccctgactgaaatccgagacagtcttctggacttgcttggagatgtgttctttgtggtccctgcactgatcacagctcgatatcacagagaaggagccacggaggaggagaagttactgagccggaagatgatgaaatactgggctacctttgctcgaaccgggaatcctaatgggaacgacctgtctctgtggccagcttataatctgactgagcagtacctccagctggacttgaacatgagcctcggacagagactcaaagaaccgcgggtggatttttggaccagcaccatccccctgatcctgtctgcctccgacatgctccacagtcctctttcttccttaactttcctctctctcctccagcctttctttttcttttgtgctcct

SEQ ID NO: 450 - DNA, 1647 bp, Homo sapiens
  misc_feature (1)...(1647): n = A,T,C or G
cagcctgccgctgagctgcatcatggtgcggtctgtggcctgggcaggtttcatggtcctgctgatgatcccatggggctctgctgcaaaactggtctgctacttcaccaactgggcccagtacagacagggggaggctcrcttcctgcccaaggacttggaccccagcctttgcacccacctcatctacgccttcgctggcatgaccaaccaccagctgagcaccactgagtggaatgacgagactctctaccaggagttcaatggcctgaagaagatgaatcccaagctgaagaccctgttagccatcggaggctggaatttcngcactcagaagttcacagatatggtagccacggccaacaaccgtcagacctttgtcaactcggccatcaggtttctgcgcaaatacagctttgacggccttgaccttgactgggagtacccaggaagccaggggagccctgccgtagacaaggagcgcttcacaaccctggtacaggacttggccaatgccttccagcaggaagcccakacctcagggaaggaacgccttcttctgagtgcagcggttccagctgggcagacctatgtggatgctggatacgaggtggacaaaatcgcccagaacctggattttgtcaaccttatggcctacgacttccatggctcttgggagaaggtcacgggacataacagccccctctacaagaggcaagaagagagtggtgcagcagccagcctcaacgtggatgctgctgtgcaacagtggctgcagaaggggasccctgccagcaagctgatccttggcatgcctacctacggacgctccttcacactggcctcctcatcagacaccagagtgggggccccagccacagggtctggcactccaggccccttcaccaaggaaggagggatgctggcctactatgaagtctgctcctggaagggggccaccaaacagagaatccaggatcagaaggtgccctacatcttccgggayaaccagtgggtgggctttgatgatgtggagagcttcaaaaccaaggtcagctatctgaagcagaagggactgggcggggccatggtctgggcactggacttagatgactttgccggcttctcctgcaaccagggccgataccccctcatccagacgctacggcaggaactgagtcttccatacttgcsttcaggcaccccagagcttgaagttccaaaaccaggtcagccctctgaacctgagcatggccccagccctggacaagacacgttctgccagggcaaagctgatgggctctatcccaatcctcgggaacggtccagcttctacagctgtgcagsggggcggctgttccagcaaagctgcccgacaggcctggtgttcagcaactcctgcaaatgctgcacctggaattgagtcgctaaagcccctccagtcccagctttgaggctgggcccaggatcactctacagcctgcctcctgggttttccctgggggccgcaatctggctcctgcaggcctttctgtggtcttcctttatccaggctttctgctctcagccttgccttccttttttctgggtctcctgggctgcccctttcacttgcaaaataaatctttggtttgtgcccctcttccc

SEQ ID NO: 451 - DNA, 2350 bp, Homo sapiens
gggtcacgctaacgccgcggtttcctccgctcgattggttctactgtgggtctggactgatctccatgtcctgttgtggggcttttacagcctttggattgtgaaaactgctgagagagacttgcaatccagtcacataagtataataaagaaatattggtcctcatggaagaagagcaagatttaccagagcaaccagtgaaaaaagccaagatgcaggaatcaggagagcaaactataagtcaagtaagcaatccagatgtcagtgatcagaagcctgaaacatcaagccttgcttcaaaccttcccatgtcagaggaaattatgacatgcaccgattacatccctcgctcatccaatgattatacctcacaaatgtattctgcaaaaccttatgcacatattctctcagttcctgtttcggaaactgcttaccctggacagactcaataccagacactacagcagactcaaccctatgctgtctaccctcaggcaacccaaacgtatggactacctccttttggtgcattgtggccaggtatgaaacctgaaagtggtttaattcagactccatctccaagtcaacacagtgttcttacctgcactacagggttaaccacaagccagccaagcccagcacattattcttatcccattcaagcttcaagcacaaatgccagcctgatatctacttcttctacaattgccaatattccagcagcagcagtagccagcatctcaaaccaggattatcccacctatactattcttggtcagaatcagtaccaggcctgctaccccagctccagctttggagtcacaggtcagactaacagtgatgcagagagcaccacattagcagcaaccacataccagtcggagaagcctagtgtcatggcgcctgcacctgcagcacagagactttcctctggagacccttctacaagtccatctttgtcccagactacaccaagtaaagatactgatgatcagtccaggaaaaacatgactagcaagaaccggggcaagaggaaagctgatgccacttcttcccaagacagtgaattagaacgggtatttctgtgggacttggatgaaaccatcatcatcttccactcacttcttactggatcctatgcccagaaatatggaaaggacccaacagtagtgattggctcargtttaacaatggaagaaatgatttttgaagtggctgatactcatctatttttcaatgacttagaggagtgtgaccaggtacatgtggaagatgtggcttctgatgacaatggccaagacttgagcaactacagtttctcaacagatggtttcagtggctcaggaggtagtggcagccatggttcatctgtgggtgttcagggaggtgtggactggatgaggaaactagctttccgctaccggaaagtgagagaaatctatgataagcataaaagcaacgtgggtggtctcctcagtccccagaggaaggaagcactgcagagattaagagcagaaattgaagttttaacagattcctggttaggaactgcattaaagtccttacttctcatccagtccagaaagaattgtgtgaatgttctgatcactaccacccagctggttccagccctggccaaggttctcctatatggactaggagaaatatttcctattgagaacatctatagtgctaccaaaattggtaaggagagctgctttgagagaattgtgtcaaggtttggaaagaaagtcacatatgtagtgattggagatggacgagatgaagaaattgcagccaaacagcacaacatgcctttctggaggatcacaaaccatggagacctagtatcccttcaccaggctttagagcttgattttctctaagaactggaatgaggagccttccccttgagctccttttcactcctgaagggagctggagactggaaccaactgagaactttctctgtctgtctctctctgtgtctctgtctctatctctctctctttctctctttctctctctccctctctccctccctcccttcctctctccctccctctctgcctctctctctctctctctctctgtctttatccatggaatgctggcgagaacacaatcagaaccaacagctgcaatttttgctaagagtgagctgcagccccgtgttcatctccatacagaagcagggacagttggatagagagaacaatggactcactgcagctacagtgcttttaatttttctgtgttttgtttttgtttttttgttttcaaaaaatgaaaaagaaaaggaaattcctggggcagagttgcactcttagtccatgaccagattgagaa

SEQ ID NO: 452 - DNA, 1961 bp, Homo sapiens
accttatgcacatattctctcagttcctgtttcggaaactgcttaccctggacagactcaataccagacactacagcagactcaaccctatgctgtctaccctcaggcaacccaaacgtatggactacctccttttggtgcattgtggccaggtatgaaacctgaaagtggtttaattcagactccatctccaagtcaacacagtgttcttacctgcactacagggttaaccacaagccagccaagcccagcacattattcttatcccattcaagcttcaagcacaaatgccagcctgatatctacttcttctacaattgccaatattccagcagcagcagtagccagcatctcaaaccaggattatcccacctatactattcttggtcagaatcagtaccaggcctgctaccccagctccagctttggagtcacaggtcagactaacagtgatgcagagagcaccacattagcagcaaccacataccagtcggagaagcctagtgtcatggcgcctgcacctgcagcacagagactttcctctggagacccttctacaagtccatctttgtcccagactacaccaagtaaagatactgatgatcagtccaggaaaaacatgactagcaagaaccggggcaagaggaaagctgatgccacttcttcccaagacagtgaattagaacgggtatttctgtgggacttggatgaaaccatcatcatcttccactcacttcttactggatcctatgcccagaaatatggaaaggacccaacagtagtgattggctcargtttaacaatggaagaaatgatttttgaagtggctgatactcatctatttttcaatgacttagaggagtgtgaccaggtacatgtggaagatgtggcttctgatgacaatggccaagacttgagcaactacagtttctcaacagatggtttcagtggctcaggaggtagtggcagccatggttcatctgtgggtgttcagggaggtgtggactggatgaggaaactagctttccgctaccggaaagtgagagaaatctatgataagcataaaagcaacgtgggtggtctcctcagtccccagaggaaggaagcactgcagagattaagagcagaaattgaagttttaacagattcctggttaggaactgcattaaagtccttacttctcatccagtccagaaagaattgtgtgaatgttctgatcactaccacccagctggttccagccctggccaaggttctcctatatggactaggagaaatatttcctattgagaacatctatagtgctaccaaaattggtaaggagagctgctttgagagaattgtgtcaaggtttggaaagaaagtcacatatgtagtgattggagatggacgagatgaagaaattgcagccaaacagcacaacatgcctttctggaggatcacaaaccatggagacctagtatcccttcaccaggctttagagcttgattttctctaagaactggaatgaggagccttccccttgagctccttttcactcctgaagggagctggagactggaaccaactgagaactttctctgtctgtctctctctgtgtctctgtctctatctctctctctttctctctttctctctctccctctctccctccctcccttcctctctccctccctctctgcctctctctctctctctctctctgtctttatccatggaatgctggcgagaacacaatcagaaccaacagctgcaatttttgctaagagtgagctgcagccccgtgttcatctccatacagaagcagggacagttggatagagagaacaatggactcactgcagctacagtgcttttaatttttctgtgttttgtttttgtttttttgttttcaaaaaatgaaaaagaaaaggaaattcctggggcagagttgcactcttagtccatgaccagattgagaa

SEQ ID NO: 453 - DNA, 511 bp, Homo sapiens
ttcaagagtggtgtgcgtctaactgagttgctgaagcaaggmcagtattctcccatggctattgaagaacaagtggctgttatctatgtgggtgtaaggaggtatcttgataaattggagcccagcaaggttacaaagtttgagaatgctttcttgtctcgtgttgtcagccagcaccaggccctgttgggcactatcagggctgatggaaagatctcagaagaaccagatgcaaagctgaaagagattgttaacaaacttcttggctggatttgaagcttaaactcctgtggattcacatcaaataccagttcagttttgtcattgttctagcaaattagttccatttgtaaaagggttactctcatattcgttatgtacagaagtcacatgaaaagtaaaggttccataatggcaaaaaaaaaaaaactagaaaattaagatcaatgaaaccaagcccaacattagtagaggaagaatataatacatatcaaagcagaaaygaacaaaa

SEQ ID NO: 454 - DNA, 577 bp, Homo sapiens
tgctttgcggcgctgcggcagtccagatcaaaaatggcggcagttggtgtgttctcggtttctcggctgctgggtcggtcccgcccacagctggggcggcctatgtcgagtggcgcccatggagaagagggctcagctcgcatgtggaagaccctcaccttcttcgtcgcgctccccrgggtggcagtcagcatgctgaatgtgtacctgaagtcgcaccacggagagcacgagagacccgagttcatcgcctacccccatctccgcatcaggaccaagcygtttccctggggagatggtaaccatactctattccataaccctcatgtgaatccacytccaactggctacgaagatgaataaagagaatctggaccactacccgggcaccagggaccacagcactggtttggaccattactctgcacatggaccagaaaaagtatatgggaccttaagctcaccttctttacttgtatcaaatgatgactggtatactggtctcccatccctttgcttgtggcrggagatggcttaaataaataacttaaayttaaaaaaataaaataaaataatg

SEQ ID NO: 455 - DNA, 1378 bp, Homo sapiens
gagaagtgtgggctacccggccactgccctggagctgtggtgactgctgcgtttttctcccatgcacttgcacgtccaggactcctgggagaacttgggccacactccttccttgccctcttgagctcattcgtcaccctgttgggtgagcacagccctagctcaggccactgggcaagccacaccatccaaagaggaggtcctctgccccaggacccccacaccaccccagctccctgtttygctgaggcctggagcccccatggcctcactgagccgagccctacgtgtggctgctgcccaccctcgccagagccctacccggkgcatggggccatgcaacctgtccagcgcagctggccccacagccgagaagagtgtgccatatcagcggaccctgaaggagggacarggcacctcggtggtggcccaaggcccaagccggcccctgcccagcacggccaacgtggtggtcattggtggaggcagcttgggctgccagaccctgtaccacctggccaagctgggcatgagtggggcggtgctgctggagcgggagcggctgacctccgggaccacctggcacacggcaggcctgctgtggcagctgcggcccagtgacgtggaggtggagcttctggcccacactcggcgggtggtgagccgggagctggaggaggagacgggactacacacgggctggatccagaatgggggcctcttcatcgcgtccaaccggcagcgcctggacgagtacaagaggctcatgtcgctgggcaaggcgtatggtgtggaatcccatgtgctgagcccggcagagaccaagactctgtacccgctgatgaatgtggacgacytctacgggaccctgtatgtgccgcacgacggtaccatggaccccgctggcacctgtaccaccctcgccagggcagcttctgcccgaggagcacaggtcattgagaactgcccagtgaccggcattcgtgtgtggacggatgattttggggtrcggcgggtcgcgggtgtggagactcagcatggttccatccagacaccctgcgtggtcaactgtgcaggagtgtgggcaagtgctgtgggccggatggctggagtcaaggtcccgctggtggccatgcaccatgcctatgtcgtcaccgagcgcatcgaggggattcagaacatgcccaatgtccgtgatcatgatgcctcygtctacctccgcctccaaggggatgccttgtctgtgggtggctatgaggycaaccccatcttttgggaggaggcagtcaaatacagacccagggcagctggagggctttgcctcaaaacatccacagagaaggtctgcgcagtgtggagtgatgacctcagaagggca

SEQ ID NO: 456 - DNA, 3893 bp, Homo sapiens
gagaagtgtgggctacccggccactgccctggagctgtggtgactgctgcgtttttctcccatgcacttgcacgtccaggactcctgggagaacttgggccacactccttccttgccctcttgagctcattcgtcaccctgttgggtgagcacagccctagctcaggccactgggcaagccacaccatccaaagaggaggtcctctgccccaggacccccacaccaccccagctccctgtttygctgaggcctggagcccccatggcctcactgagccgagccctacgtgtggctgctgcccaccctcgccagagccctacccggkgcatggggccatgcaacctgtccagcgcagctggccccacagccgagaagagtgtgccatatcagcggaccctgaaggagggacarggcacctcggtggtggcccaaggcccaagccggcccctgcccagcacggccaacgtggtggtcattggtggaggcagcttgggctgccagaccctgtaccacctggccaagctgggcatgagtggggcggtgctgctggagcgggagcggctgacctccgggaccacctggcacacggcaggcctgctgtggcagctgcggcccagtgacgtggaggtggagcttctggcccacactcggcgggtggtgagccgggagctggaggaggagacgggactacacacgggctggatccagaatgggggcctcttcatcgcgtccaaccggcagcgcctggacgagtacaagaggctcatgtcgctgggcaaggcgtatggtgtggaatcccatgtgctgagcccggcagagaccaagactctgtacccgctgatgaatgtggacgacytctacgggaccctgtatgtgccgcacgacggtaccatggaccccgctggcacctgtaccaccctcgccagggcagcttctgcccgaggagcacaggtcattgagaactgcccagtgaccggcattcgtgtgtggacggatgattttggggtrcggcgggtcgcgggtgtggagactcagcatggttccatccagacaccctgcgtggtcaactgtgcaggagtgtgggcaagtgctgtgggccggatggctggagtcaaggtcccgctggtggccatgcaccatgcctatgtcgtcaccgagcgcatcgaggggattcagaacatgcccaatgtccgtgatcatgatgcctcygtctacctccgcctccaaggggatgccttgtctgtgggtggctatgaggycaaccccatcttttgggaggaggtgtcagacaagtttgccttcggcctctttgacctggactgggaggtgttcacccagcacattgaaggcgccatcaacagggtccccgtgctggakaagacaggaatcaagtccacggtctgcggccctgaatccttcacgcccgaccacaagcccctgatgggggaggcacctgagctcygagggttcttcctgggctgtggcttcaacagcgcaggaatgatgctgggtggtggctgtgggcaggagctggcccactggatcatccatgggcgcccggagaaggacatgcatggctatgacatcaggcgcttccatcactcgctcacggaccacccccgctggatccgagagcgaagccatgagtcctacgccaagaactactccgtcgtcttcccccacgatgagccgctggccgggcrcaacatgaggagagacccgctgcayraggaactccttggacaaggctgcgtgttccaggagcggcatggctgggagcgaccgggatggtttcatccccgaggcccagctccggtcctcgagtacgactactacggggcttacgggagccgcgcgcacgaggactacgcctaccgcaggctgctggcagacgagtacaccttcgccttcccgccccaccacgacacggtgcatcaagaaggagtgcctggcctgcagaggggccgcygctgtgtttgacatgtcctacttcgggaagttctacctggtggggctggatgcaaggaaggctgccgactggctcttctcygcagatgtcagccgacccccaggctccaccgtgtacacgtgcatgctcaaccaccrtgggggcaccgagagtgacctgactgtcagccgcctggcacccagccaccaggcctccccgctggcccccgcctttgaaggggacggttactacctggccrtgggcggggccgtggcccagcacaactggtcccacatcaccaccgtgctgcaggaccagaagtcccagtgccagctcatcgacagctccgaggacctgggtatgatcagtatccagggcccagccagccgagccattttgcaggaggtgctggacgcagacctgagcaacgaggccttcccgttctccacccacaagctactgagagccgcagggcacctggtccgagccatgcggctgtcctttgtsggggagctgggctgggagctgcacattccaaaggcgtcctgcgtgcctgtgtaccgggctgtgatggccgcgggtgccaagcacggcctcatcaacgcagggtaccgcgccatygactccctgagcattgagaaaggctaccggcactggcacgcggacctgcggccagacgacagccccctggaggcaggcctggccttcacctgcaagctcaagtcgccggtgcccttcctggggagggaggccctggagcagcagcgggccrcaggcctccgccggcgcctggtgtgcttcaccatggaggacaaagtacccatgtttggcctggaggccatctggaggaacggccaagtggtgggccatgtccggagggctgactttgggttcgccatcgacaagaccatcgcctacggttacatccatgaccccagcggtgggccggtctcgctggactttgtgaagagcggggactatgccctggagagaatgggggtgacctatggtgcccaggctcacctgaagtcgcccttcgaccccaacaacaagagggtgaagggaatctactgagggctcagaccacatgccccatcccatgctgtccatccattctcacaggtcccaaatggccctgggtcccaggaccctggacccagccagaacttgtgccctccctgtccttagcctaggcctagtcctgcgaaaacccccaaaccagatacggacagagaccaagatggcccatcctgtggtcactgactggaaggcagtctctaatccaccccaatcctcccagaaagcaaacctgtaagtgtcttgggctcagggaccatggcttgtagccctttccaagcttctaraaggtgcttagtaaatacttgataagccccacgtgaaaacagcgaagcaaataggcttcatcttttactccaggcttgactgatcggtggcgggcytccctggggcacttggctgaagagcatgaggctgtgtctgggtcaggaaagagaggtgatcgactggcattgtctgccacagcgcacatggaggcctgggaccaaggccattcttcaggatggtgcctctcggctctcaggtcggaacaggagctggaaagctcttcttaccttgctsgacctccctgttcttcaggtggcaaagcctcctgagagtcggcagcccgggaacacagaggagccgaagcagggagcgggcggggcctcagattggtgycctcctcacccacacagaagtgccagctcctgcctcagtttccccttgagcccctcgctcaccaggcccaggcaggagggacgtgctgctgggtaagagtctggtggagtccccctttctaggtgacctttgtctttgctgttgatttggacgcggttcctgcccatgccctcctccttgtctggcccttgcaggaggaccctctct

SEQ ID NO: 457 - DNA, 3889 bp, Homo sapiens
gagaagtgtgggctacccggccactgccctggagctgtggtgactgctgcgtttttctcccatgcacttgcacgtccaggactcctgggagaacttgggccacactccttccttgccctcttgagctcattcgtcaccctgttgggtgagcacagccctagctcaggccactgggcaagccacaccatccaaagaggaggtcctctgccccaggacccccacaccaccccagctccctgtttygctgaggcctggagcccccatggcctcactgagccgagccctacgtgtggctgctgcccaccctcgccagagccctacccggkgcatggggccatgcaacctgtccagcgcagctggccccacagccgagaagagtgtgccatatcagcggaccctgaaggagggacarggcacctcggtggtggcccaaggcccaagccggcccctgcccagcacggccaacgtggtggtcattggtggaggcagcttgggctgccagaccctgtaccacctggccaagctgggcatgagtggggcggtgctgctggagcgggagcggctgacctccgggaccacctggcacacggcaggcctgctgtggcagctgcggcccagtgacgtggaggtggagcttctggcccacactcggcgggtggtgagccgggagctggaggaggagacgggactacacacgggctggatccagaatgggggcctcttcatcgcgtccaaccggcagcgcctggacgagtacaagaggctcatgtcgctgggcaaggcgtatggtgtggaatcccatgtgctgagcccggcagagaccaagactctgtacccgctgatgaatgtggacgacytctacgggaccctgtatgtgccgcacgacggtaccatggaccccgctggcacctgtaccaccctcgccagggcagcttctgcccgaggagcacaggtcattgagaactgcccagtgaccggcattcgtgtgtggacggatgattttggggtrcggcgggtcgcgggtgtggagactcagcatggttccatccagacaccctgcgtggtcaactgtgcaggagtgtgggcaagtgctgtgggccggatggctggagtcaaggtcccgctggtggccatgcaccatgcctatgtcgtcaccgagcgcatcgaggggattcagaacatgcccaatgtccgtgatcatgatgcctcygtctacctccgcctccaaggggatgccttgtctgtgggtggctatgaggycaaccccatcttttgggaggaggtgtcagacaagtttgccttcggcctctttgacctggactgggaggtgttcacccagcacattgaaggcgccatcaacagggtccccgtgctggakaagacaggaatcaagtccacggtctgcggccctgaatccttcacgcccgaccacaagcccctgatgggggaggcacctgagctcygagggttcttcctgggctgtggcttcaacagcgcaggaatgatgctgggtggtggctgtgggcaggagctggcccactggatcatccatgggcgcccggagaaggacatgcatggctatgacatcaggcgcttccatcactcgctcacggaccacccccgctggatccgagagcgaagccatgagtcctacgccaagaactactccgtcgtcttcccccacgatgagccgctggccgggcrcaacatgaggagagacccgctgcayraggaactccttggacaaggctgcgtgttccaggagcggcatggctgggagcgaccgggatggtttcatccccgaggcccagctccggtcctcgagtacgactactacggggcttacgggagccgcgcgcacgaggactacgcctaccgcaggctgctggcagacgagtacaccttcgccttcccgccccaccacgacacgatcaagaaggagtgcctggcctgcagaggggccgcygctgtgtttgacatgtcctacttcgggaagttctacctggtggggctggatgcaaggaaggctgccgactggctcttctcygcagatgtcagccgacccccaggctccaccgtgtacacgtgcatgctcaaccaccrtgggggcaccgagagtgacctgactgtcagccgcctggcacccagccaccaggcctccccgctggcccccgcctttgaaggggacggttactacctggccrtgggcggggccgtggcccagcacaactggtcccacatcaccaccgtgctgcaggaccagaagtcccagtgccagctcatcgacagctccgaggacctgggtatgatcagtatccagggcccagccagccgagccattttgcaggaggtgctggacgcagacctgagcaacgaggccttcccgttctccacccacaagctactgagagccgcagggcacctggtccgagccatgcggctgtcctttgtsggggagctgggctgggagctgcacattccaaaggcgtcctgcgtgcctgtgtaccgggctgtgatggccgcgggtgccaagcacggcctcatcaacgcagggtaccgcgccatygactccctgagcattgagaaaggctaccggcactggcacgcggacctgcggccagacgacagccccctggaggcaggcctggccttcacctgcaagctcaagtcgccggtgcccttcctggggagggaggccctggagcagcagcgggccrcaggcctccgccggcgcctggtgtgcttcaccatggaggacaaagtacccatgtttggcctggaggccatctggaggaacggccaagtggtgggccatgtccggagggctgactttgggttcgccatcgacaagaccatcgcctacggttacatccatgaccccagcggtgggccggtctcgctggactttgtgaagagcggggactatgccctggagagaatgggggtgacctatggtgcccaggctcacctgaagtcgcccttcgaccccaacaacaagagggtgaagggaatctactgagggctcagaccacatgccccatcccatgctgtccatccattctcacaggtcccaaatggccctgggtcccaggaccctggacccagccagaacttgtgccctccctgtccttagcctaggcctagtcctgcgaaaacccccaaaccagatacggacagagaccaagatggcccatcctgtggtcactgactggaaggcagtctctaatccaccccaatcctcccagaaagcaaacctgtaagtgtcttgggctcagggaccatggcttgtagccctttccaagcttctaraaggtgcttagtaaatacttgataagccccacgtgaaaacagcgaagcaaataggcttcatcttttactccaggcttgactgatcggtggcgggcytccctggggcacttggctgaagagcatgaggctgtgtctgggtcaggaaagagaggtgatcgactggcattgtctgccacagcgcacatggaggcctgggaccaaggccattcttcaggatggtgcctctcggctctcaggtcggaacaggagctggaaagctcttcttaccttgctsgacctccctgttcttcaggtggcaaagcctcctgagagtcggcagcccgggaacacagaggagccgaagcagggagcgggcggggcctcagattggtgycctcctcacccacacagaagtgccagctcctgcctcagtttccccttgagcccctcgctcaccaggcccaggcaggagggacgtgctgctgggtaagagtctggtggagtccccctttctaggtgacctttgtctttgctgttgatttggacgcggttcctgcccatgccctcctccttgtctggcccttgcaggaggaccctctct

SEQ ID NO: 458 - DNA, 3889 bp, Homo sapiens; identical to SEQ ID NO: 457

SEQ ID NO: 459 - DNA, 1726 bp, Homo sapiens
gagaagtgtgggctacccggccactgccctggagctgtggtgactgctgcgtttttctcccatgcacttgcacgtccaggactcctgggagaacttgggccacactccttccttgccctcttgagctcattcgtcaccctgttgggtgagcacagccctagctcaggccactgggcaagccacaccatccaaagaggaggtcctctgccccaggacccccacaccaccccagctccctgtttygctgaggcctggagcccccatggcctcactgagccgagccctacgtgtggctgctgcccaccctcgccagagccctacccggkgcatggggccatgcaacctgtccagcgcagctggccccacagccgagaagagtgtgccatatcagcggaccctgaaggagggacarggcacctcggtggtggcccaaggcccaagccggcccctgcccagcacggccaacgtggtggtcattggtggaggcagcttgggctgccagaccctgtaccacctggccaagctgggcatgagtggggcggtgctgctggagcgggagcggctgacctccgggaccacctggcacacggcaggcctgctgtggcagctgcggcccagtgacgtggaggtggagcttctggcccacactcggcgggtggtgagccgggagctggaggaggagacgggactacacacgggctggatccagaatgggggcctcttcatcgcgtccaaccggcagcgcctggacgagtacaagaggctcatgtcgctgggcaaggcgtatggtgtggaatcccatgtgctgagcccggcagagaccaagactctgtacccgctgatgaatgtggacgacytctacgggaccctgtatgtgccgcacgacggtaccatggaccccgctggcacctgtaccaccctcgccagggcagcttctgcccgaggagcacaggtcattgagaactgcccagtgaccggcattcgtgtgtggacggatgattttggggtrcggcgggtcgcgggtgtggagactcagcatggttccatccagacaccctgcgtggtcaactgtgcaggagtgtgggcaagtgctgtgggccggatggctggagtcaaggtcccgctggtggccatgcaccatgcctatgtcgtcaccgagcgcatcgaggggattcagagtttcactttgttgcccacactggagtacagtggcacagtgtcagctcactgcaacctccgcctcccgggttcaagcaattctcgtgcctcagcctcccatgtagctgggattaaatgtgcycgtcaccacacccggctgatttttttttgtattttagtagagacrgagtttcaccatgttgccaaggctggtctcraactcctgagctcaggcaatccacccatctcggacttccaaagtgctaggattacaggcgtgagccaccatgcttagctgattatgtaaacattgttaatacctgagcaagtagtgtccaactttttgtgtttcttggagttattaacagtttttgtcccagctgctcagtttcttttgtaactgttatgtgtgtgtgtgtaacattatcttcrtgccccaaracccatacccgttatcaatcactccccatttcccaccctgtccccagacttaggcaatcccaaatctgatttctgcctcgatggagtttcctattctggacgtttagtataaatggaatcacatgat

SEQ ID NO: 460 - DNA, 1169 bp, Homo sapiens
catccctggcgccgaccagaacccgtggacatggtgaaccaggttatcaagtgcaaggctgcagttgcctgggaggctggaaagcctctctccgtagaggagatagaggtggcacccctaaaggctcgtgaagtttgaatcaagatcattgccactgcagtttgccataccaatgcctataccctgagcagagctgatcctgagggttgttttccagtgatcttgggacatgaaggtgctggaattgtgggaagtgttggtgagggagttgctaagctgaaggcgggtgataactgtcatcccattttacatcccacagtgtggagaatgcaaattttgtctaaatcctaaaactaaccttgccagaatataagagtcactcaagggaaaggattagtgccagatggtaccagcagatttacttgcaaaggaaagacaattttacattacatgggaaccagcacattttctgaatgcacagttgtggctgatatctctgttgctaaaatagattctttagcacctttggataaagtctgccttctaggttgtggcatttcagctggttatggtgctgctgtgaacactgtcaaggtggggcctggctctgtttgggccgtctttggcctgggaggagttggattgacagttatcgtgggcggtaaagtggctggtgcatcccggatcattggtgtggacatccatcaagataaatttccaagggctaaagagtttggagccactgaatgtatgaaccgtcaggatttwagtcaacccatccaggaagtgctcattgagcggactgatggaggagtggactactcctttgaatgtattaggaatgtcaaggtcgtgagagcagcacttgaggcatgtcagcagggctggggcgtcagtgtggtggttggagyagctgcttcaggtcaagaaattgccactcatccattccagctggtaacaggtcgcacatggaaaggcactgcctttggagggtgaaagagtgtagaaagtgtcccaaagttggtatctgaatatgtgtctaaaaagataaaagttgatgaatttgtgactcacaatctgtcttttgatgaaattaacaaagcctttgaactgttgcattctggaaaaagcattcgaactgttgtgaagatttaattcaaaagagaaaa

SEQ ID NO: 461 - DNA, 7693 bp, Homo sapiens
aaatttacttccccaaaacactggracattgggatggaattcactcaccccaaatcatcaccctggttaaggagactaaagaatcagaagacatttgtgctttggggagcagaggccctcagggtatagagaaggaagaagagagaggttcactgtagtcctgaagcagaaataagacctgtggctgaaggaagccttagcaattcactccttcctcttcctgagaactctctgtaggaagtctcacctagcagaggcttcacagtatttcagagaagccaaagattgtttgcctctttggaaactgttatccttccatcatgactgtgtcactcctgccactgttccaccatagagatggcgtcctttgcagcaaaccgtaagttataaggatgagggaagaagagtagagggccaaaaggattccattttgaggaaaaactacagtttgccttgccaggtagaagaatcaggcgcccagacaccatgtcacaaccctccagaactgacgttggcaggaagtagagacttygttgcctgtgtcccccatcctcaccatgtcttcgactcagggcaatggggaacactggaagtccctggagtcagtgggcatcagccgcaaagagctagcgatggccgaagccctgcagatggagtatgatgccctgtcccggctccggcatgacaaggaggagaacagagccaagcagaacgcagacccctctctcatcagctgggatgagcctggggtagacttttacagcaagccagcaggaaggcggaccgacctcaagctgttacgcggtctctctggctctgatcctacccttaactacaactcactmtccccacaggaagggccgcccaaccactctacctcccaagggccacagcctggctcagatccctggcccaaaggctccctgtctggagactatctctacatttttgatggttcagatgggggagtctcttcgtccccaggaccaggggacatagagggctcttgcaagaaactatccccacctcctctgcctccccgagcttctatctgggatacccctcccctgcctcccagaaaggggtccccctcatcctccaagatctcccagcccagtgacatcaacactttctctttggtcgaacaattgccrggcaaactgctagagcatcggatcctagaagaggaagaggtgctgggaggtgggggtcaggggcgcctactggggtctgtggactatgatggtatcaatgatgcaattactaggctcaacttgaaatcgacctatgatgcggagatgttgcgggatgccaccaggggctggaaggaggrccgagggccgctggacttcagcaaagacacctctggaaaacmcgtggccaggagcaagactatgccccctcaggtgcccccccgcacctatgcctcccgctatggcaaccgaaagaatgcgacgcctggcaagaaccgccggatttctgcagccccggtgggctcccggccccacactgttgccaatggccatgagttgtttgaggtctcagaagagagagatgaggaggttgctgcattttgccacatgctggatatccttcratctggctctgacatccaagactacttcctcactggctatgtctggagtgctgtcacccctagcccagagcacctcggggatgaggtcaacctgaaggtgactgtgttgtgtgacaggcttcaagaggcactcactttcacctgcaactgttcctccactgtagacttgcttatctaccagaccctgtgctacacccatgatgacctgaggaatgtggacgtgggtgactttgtgctaaagccctgcgggctggaggagttcctgcagaacaagcatgccttgggcagtcatgagtacatccartactgccgcaagtttgacattgacattcggctacagctgatggagcagaaggttgtgcgcagtgacctggcccggacggtgaatgatgaccagagcccctccaccttgaactacctcgtccatctccaagagaggcctgtcaagcagaccatcagcaggcaggccctgagtcttctgttcgacacttaccacaatgaggtggatgccttcctgctggctgatggagacttcccactgaaggctgacagggtggtccagtccgtcaaggccatctgcaacgccctggccgccgtggaaacccctgagatcaccagtgctctcaaccagctgcccccctgcccctcccgcatgcagcctaaaattcagaaggatcccagtgtcttggctgtgagggaaaaccgagagaaggtcgtggaagccctgaccgctgccatcttggacctggtggagctgtactgcaacacattcaacgcagacttccagacggcagtgcccgggagccgcaagcatgacctggtccaggaggcctgccatttcgccaggtccctggccttyactgtctatgccacccaccgcatccccatcatctgggctaccagctatgaagatttctacctctcctgctccctcagccatggcggcaaggagctgtgcagccccctgcagacccgaagagctcacttctccaagtacctcttccacctcatcgtctgggaccagcagatctgcttcccagtgcaggtgaaccggctgcctcgggagacactgctgtgtgccactctctatgctctgcccatccccccaccggggagctcctcagaggccaataagcagcggcgggtgcctgaagccctgggctgggtcactaccccactcttcaacttcaggcaggtcctgacctgtggccggaagcttctgggtttgtggccagcaacacaggaaaatcccagygcccgttggagtgcacctaatttccaccagccagacagtgtcatcctgcagattgacttccccacctcggcctttgacatcaagttcaccagcccccctggagacaagttcagcccccgctatgagtttggcagcctccgggaagaagaccagcgcaagcttaaagacatcatgcagaaagagtccttgtactggctcactgatgctgacaagaagcgcctgtgggagaagcgatattactgccactcggaggtgagctcgctccccctggtgctcgccagcgcccccagctgggagtgggcttgcctgcctgacatctatgttctcctgaagcagtggacccacatgaaccaccaggatgccctggggctcctgcatgccaccttcccggaccaggaggtgcgtcgtatggctgtgcagtggattggctcactctcagatgctgagctgctagactacctgccccagctggtacaggccctgaagtatgaatgctacctggacagcccgttggtgcgcttcctcctgaaacgagctgtgtctgacttgagagtgactcactacttcttctggttactgaaggacggcctcaaggactctcagttcagcatccgctaccagtatctgctggcagccttactgtgctgctgtggcaaggggctgagagaagagtttaaccgccagtgctggcttgtcaatgccctggccaaactggcccagcaggtccgggaggcagccccatctgcaaggcaggttagtgggggaatcctccgcacgggcctggaggaggtgaagcagttctttgccctcaatggctcgtgccgcttgccactcagccccagtctgctggttaagggaattgtgcccagggactgttcctacttcaactccaatgctgtccccctcaaactctccttccaaaatgtggatcccctgggtgagaacatccgtgtcatcttcaagtgtggggacgaccttcgccaggacatgctaacgctgcagatgattcgcatcatgagcaagatctgggtccaggaggggctggacatgcgcatggtcatcttccgctgcttctccaccggccggggcagagggatggtggagatgatccctaatgctgagaccctgcgtaagatccaggtggagcatggggtgaccggctcgttcaaggaccggcccctggcagactggctgcagaaacacaaccctggggaggacgagtatgagaaggctgtggagaactttatctactcctgcgctggctgctgcgtggccacgtacgtcttgggcatctgtgaccgacataaygacaacatcatgctgaagaccactggtcacatgttccacattgattttggccgcttcctgggccatgcccagatgtttggcaacatcaagcgggaccgtgccccctttgtcttcacctcggacatggcgtatgtcatcaacgggggtgacaagccttccagccgcttccatgattttgttgacctttgctgccaagcctacaacctcattcgcaagcacacccacctcttcctcaaccttctgggcctgatgttgtcctgtgggatccctgaactctcagacctggaggacctcaagtatgtrtacgatgccctgaggcctcaggatacagaggccaatgccactacctacttcactaggttgattgagtccagcctgggcagtgtagccacaaagctcaattttttcatccataatctggctcagatgaagttcacgggctcagatgaccggctgaccctctcctttgcctcccgaacacacactctcaagagctctggccgaatcagtgatgttttcctctgccgccatgagaagatcttccaccccaacaaaggctatatatatgtggtaaaggtgatgcgagagaacactcaygaggccacctacatccagcggacctttgaggagttccaggaattacacaataagttgcggctgctcttcccttcttcccacttgcccagcttccctagtcgcttcgtgatcggccgctcccggggagaggcggtggccgagcggcggagggaggagctaaacggttacatctggcacttgatccacgcaccyccygaggtggccgagtgtgatttggtgtacaccttcttccacccactgccccgggatgagaaggctatgggcaccagcccagctcctaagtcctcagatggcacatgggcccggcccgtcggaaaggtgggaggggaggtgaagctgtcyatctcctacaaaaacaataaactcttcatcatggtgatgcatattcggggcttgcaactgctccaggatggaaatgaccctgacccctatgtgaaaatttacctccttcctgaccctcagaaaaccactaagaggaaaaccaaagtggcccggaaaacctgcaatcctacctacaatgagatgttggtatatgatgggatccccaagggtgacctgcagcagcgggagctccagctgagcgtgctgagtgagcagggattctgggagaacgtcctcctcggtgaggtgaacatccgcctgcgagagctggacctggctcaggagaagaccggctggttcgccctgggatctcgaagtcatggcaccttgtgagcccagcagagccaccacccagcatcccaggctggtggcaggagctgggggagaggactctcccctgtgagactcctccttgkgaagggccagggccctgggcaggcctccagctcggtccaggtgattctggcctctgtggtaggaggcagggagagtaagacatgctctgctgtctcttcctctggagactgaacttgggttggttgtgatgagcagccccttggaggctgtgaggttgcagcaaagttttaagtttaccttgtgtcaagggagcaatgcttggtttggggagtgtgtggggtgggctgtatgaagtagcattttgggggtgggtgggtggatatcttaatttttatttttaaaaaatgaaatagtgatgttgtcctaactgggacaggaagccttgcgagaagggacgtacctatgccccagaaggcaagagaggaagactatttggactttttgtatgattaaggttcttattggacttttccctaggttttttttttttgttattgttgttgttgtttcgttttctagctataggaactatctggggaggggcccagtgggtcctcggccagagccctctctaaggacaggttggggagggttggggagggctgcctgtgctggactgaggcttgtgccactgggcctttctgattttgcctccaaaggagagcgctgtgatacctacatgtgtaaggaagggccttccgtattggggttctgccaaggacccgtattcagggacccatgctcttttggggggacttttcctcttgtcttccctactttattaggacttgccctgaataccattttctaccccttgcccctccattctcctggcccttctgggggtcagctggtctctatgaatatgctgggggtgcttccccataggtctctcccttcatttgtctctggtgggacaaaatactgactcagtccttagatgtagtttcacccaagagcatcttggccctgggaagaggtccctaggctgcagatgctactgactgcttgctaggtagcctctggaaagcattccccatccatcactccccacttctttctgctgtgctgcttccctcccaaactccatttctgtcaccctttttataagacttttcctcattctgtggggccataaacctatttagtctggagccaaagggatgccctatctgaaggaaaggggcatggggtgggggattccatcaaaactgttgttttttgccccatgatttttctttggtcagtaggaggctggattggagtggtgattattcccctggagctaagctcaggagcccgaagggagagactgagactgactcccttatctcttcatattctttattccctaccagatggatttttttttttttttttggagacggagtctcgccctgtcrccaggctggagtgtagtggcatgatctcgactcactgcaaaatctgcctcccgggttcaagcgattctcctacctcagcctcccgagtagctgggattacaggcatgtgccaccacgccaagctaatttttgtatttttagtagagacggggtttcaccatgttggccaggatggtctcgatctcttgacctcgtgatctgcctgccttggcctcccaaagtgctgggattacaggcgtgagccaccatgccccgccccagatggattttacatttgctcttttgtgtttcgctccaaagggttgtcttcctcgccaaaaggagggagggactttgaatttgatatgaatctttaaaaccagaattggctggatatttcccatgattgggaaaagagtgaaatgaggacattctgtaaactgtccctccctaattccaaggatcagaaactccccgttttgctgactcattccataactggagaaagaagctccattgaccgaagccacagggcagcatggaagtttaaattttctctaaaattaaaatgccaaggataaagctggctgcttccaggagggggaagaggagtggggagtgggcggtgaaacttttccagatgaacggaccataaatgtgttactggctttgtgcctgtagctcattttattatgacctatatgctcctgatttaaagagatctgtgtactgtttacttcccacttcccagaatcccttgtatctcctttctcgggaattgtattttctaataaatgacatttgagaaaaaaatga

SEQ ID NO: 462 - DNA, 7684 bp, Homo sapiens
aaatttacttccccaaaacactggracattgggatggaattcactcaccccaaatcatcaccctggttaaggagactaaagaatcagaagacatttgtgctttggggagcagaggccctcagggtatagagaaggaagaagagagaggttcactgtagtcctgaagcagaaataagacctgtggctgaaggaagccttagcaattcactccttcctcttcctgagaactctctgtaggaagtctcacctagcagaggcttcacagtatttcagagaagccaaagattgtttgcctctttggaaactgttatccttccatcatgactgtgtcactcctgccactgttccaccatagagatggcgtcctttgcagcaaaccgtaagttataaggatgagggaagaagagtagagggccaaaaggattccattttgaggaaaaactacagtttgccttgccaggtagaagaatcaggcgcccagacaccatgtcacaaccctccagaactgacgttggcaggaagtagagacttygttgcctgtgtcccccatcctcaccatgtcttcgactcagggcaatggggaacactggaagtccctggagtcagtgggcatcagccgcaaagagctagcgatggccgaagccctgcagatggagtatgatgccctgtcccggctccggcatgacaaggaggagaacagagccaagcagaacgcagacccctctctcatcagctgggatgagcctggggtagacttttacagcaagccagcaggaaggcggaccgacctcaagctgttacgcggtctctctggctctgatcctacccttaactacaactcactmtccccacaggaagggccgcccaaccactctacctcccaagggccacagcctggctcagatccctggcccaaaggctccctgtctggagactatctctacatttttgatggttcagatgggggagtctcttcgtccccaggaccaggggacatagagggctcttgcaagaaactatccccacctcctctgcctccccgagcttctatctgggatacccctcccctgcctcccagaaaggggtccccctcatcctccaagatctcccagcccagtgacatcaacactttctctttggtcgaacaattgccrggcaaactgctagagcatcggatcctagaagaggaagaggtgctgggaggtgggggtcaggggcgcctactggggtctgtggactatgatggtatcaatgatgcaattactaggctcaacttgaaatcgacctatgatgcggagatgttgcgggatgccaccaggggctggaaggaggrccgagggccgctggacttcagcaaagacacctctggaaaacmcgtggccaggagcaagactatgccccctcaggtgcccccccgcacctatgcctcccgctatggcaaccgaaagaatgcgacgcctggcaagaaccgccggatttctgcagccccggtgggctcccggccccacactgttgccaatggccatgagttgtttgaggtctcagaagagagagatgaggaggttgctgcattttgccacatgctggatatccttcratctggctctgacatccaagactacttcctcactggctatgtctggagtgctgtcacccctagcccagagcacctcggggatgaggtcaacctgaaggtgactgtgttgtgtgacaggcttcaagaggcactcactttcacctgcaactgttcctccactgtagacttgcttatctaccagaccctgtgctacacccatgatgacctgaggaatgtggacgtgggtgactttgtgctaaagccctgcgggctggaggagttcctgcagaacaagcatgccttgggcagtcatgagtacatccartactgccgcaagtttgacattgacattcggctacagctgatggagcagaaggttgtgcgcagtgacctggcccggacggtgaatgatgaccagagcccctccaccttgaactacctcgtccatctccaagagaggcctgtcaagcagaccatcagcaggcaggccctgagtcttctgttcgacacttaccacaatgaggtggatgccttcctgctggctgatggagacttcccactgaaggctgacagggtggtccagtccgtcaaggccatctgcaacgccctggccgccgtggaaacccctgagatcaccagtgctctcaaccagctgcccccctgcccctcccgcatgcagcctaaaattcagaaggatcccagtgtcttggctgtgagggaaaaccgagagaaggtcgtggaagccctgaccgctgccatcttggacctggtggagctgtactgcaacacattcaacgcagacttccagacggcagtgcccgggagccgcaagcatgacctggtccaggaggcctgccatttcgccaggtccctggccttyactgtctatgccacccaccgcatccccatcatctgggctaccagctatgaagatttctacctctcctgctccctcagccatggcggcaaggagctgtgcagccccctgcagacccgaagagctcacttctccaagtacctcttccacctcatcgtctgggaccagcagatctgcttcccagtgcaggtgaaccggctgcctcgggagacactgctgtgtgccactctctatgctctgcccatccccccaccggggagctcctcagaggccaataagcagcggcgggtgcctgaagccctgggctgggtcactaccccactcttcaacttcaggcaggtcctgacctgtggccggaagcttctgggtttgtggccagcaacacaggaaaatcccagygcccgttggagtgcacctaatttccaccagccagacagtgtcatcctgcagattgacttccccacctcggcctttgacatcaagttcaccagcccccctggagacaagttcagcccccgctatgagtttggcagcctccgggaagaagaccagcgcaagcttaaagacatcatgcagaaagagtccttgtactggctcactgatgctgacaagaagcgcctgtgggagaagcgatattactgccactcggaggtgagctcgctccccctggtgctcgccagcgcccccagctgggagtgggcttgcctgcctgacatctatgttctcctgaagcagtggacccacatgaaccaccaggatgccctggggctcctgcatgccaccttcccggaccaggaggtgcgtcgtatggctgtgcagtggattggctcactctcagatgctgagctgctagactacctgccccagctggtacaggccctgaagtatgaatgctacctggacagcccgttggtgcgcttcctcctgaaacgagctgtgtctgacttgagagtgactcactacttcttctggttactgaaggacggcctcaaggactctcagttcagcatccgctaccagtatctgctggcagccttactgtgctgctgtggcaaggggctgagagaagagtttaaccgccagtgctggcttgtcaatgccctggccaaactggcccagcaggtccgggaggcagccccatctgcaaggcagggaatcctccgcacgggcctggaggaggtgaagcagttctttgccctcaatggctcgtgccgcttgccactcagccccagtctgctggttaagggaattgtgcccagggactgttcctacttcaactccaatgctgtccccctcaaactctccttccaaaatgtggatcccctgggtgagaacatccgtgtcatcttcaagtgtggggacgaccttcgccaggacatgctaacgctgcagatgattcgcatcatgagcaagatctgggtccaggaggggctggacatgcgcatggtcatcttccgctgcttctccaccggccggggcagagggatggtggagatgatccctaatgctgagaccctgcgtaagatccaggtggagcatggggtgaccggctcgttcaaggaccggcccctggcagactggctgcagaaacacaaccctggggaggacgagtatgagaaggctgtggagaactttatctactcctgcgctggctgctgcgtggccacgtacgtcttgggcatctgtgaccgacataaygacaacatcatgctgaagaccactggtcacatgttccacattgattttggccgcttcctgggccatgcccagatgtttggcaacatcaagcgggaccgtgccccctttgtcttcacctcggacatggcgtatgtcatcaacgggggtgacaagccttccagccgcttccatgattttgttgacctttgctgccaagcctacaacctcattcgcaagcacacccacctcttcctcaaccttctgggcctgatgttgtcctgtgggatccctgaactctcagacctggaggacctcaagtatgtrtacgatgccctgaggcctcaggatacagaggccaatgccactacctacttcactaggttgattgagtccagcctgggcagtgtagccacaaagctcaattttttcatccataatctggctcagatgaagttcacgggctcagatgaccggctgaccctctcctttgcctcccgaacacacactctcaagagctctggccgaatcagtgatgttttcctctgccgccatgagaagatcttccaccccaacaaaggctatatatatgtggtaaaggtgatgcgagagaacactcaygaggccacctacatccagcggacctttgaggagttccaggaattacacaataagttgcggctgctcttcccttcttcccacttgcccagcttccctagtcgcttcgtgatcggccgctcccggggagaggcggtggccgagcggcggagggaggagctaaacggttacatctggcacttgatccacgcaccyccygaggtggccgagtgtgatttggtgtacaccttcttccacccactgccccgggatgagaaggctatgggcaccagcccagctcctaagtcctcagatggcacatgggcccggcccgtcggaaaggtgggaggggaggtgaagctgtcyatctcctacaaaaacaataaactcttcatcatggtgatgcatattcggggcttgcaactgctccaggatggaaatgaccctgacccctatgtgaaaatttacctccttcctgaccctcagaaaaccactaagaggaaaaccaaagtggcccggaaaacctgcaatcctacctacaatgagatgttggtatatgatgggatccccaagggtgacctgcagcagcgggagctccagctgagcgtgctgagtgagcagggattctgggagaacgtcctcctcggtgaggtgaacatccgcctgcgagagctggacctggctcaggagaagaccggctggttcgccctgggatctcgaagtcatggcaccttgtgagcccagcagagccaccacccagcatcccaggctggtggcaggagctgggggagaggactctcccctgtgagactcctccttgkgaagggccagggccctgggcaggcctccagctcggtccaggtgattctggcctctgtggtaggaggcagggagagtaagacatgctctgctgtctcttcctctggagactgaacttgggttggttgtgatgagcagccccttggaggctgtgaggttgcagcaaagttttaagtttaccttgtgtcaagggagcaatgcttggtttggggagtgtgtggggtgggctgtatgaagtagcattttgggggtgggtgggtggatatcttaatttttatttttaaaaaatgaaatagtgatgttgtcctaactgggacaggaagccttgcgagaagggacgtacctatgccccagaaggcaagagaggaagactatttggactttttgtatgattaaggttcttattggacttttccctaggttttttttttttgttattgttgttgttgtttcgttttctagctataggaactatctggggaggggcccagtgggtcctcggccagagccctctctaaggacaggttggggagggttggggagggctgcctgtgctggactgaggcttgtgccactgggcctttctgattttgcctccaaaggagagcgctgtgatacctacatgtgtaaggaagggccttccgtattggggttctgccaaggacccgtattcagggacccatgctcttttggggggacttttcctcttgtcttccctactttattaggacttgccctgaataccattttctaccccttgcccctccattctcctggcccttctgggggtcagctggtctctatgaatatgctgggggtgcttccccataggtctctcccttcatttgtctctggtgggacaaaatactgactcagtccttagatgtagtttcacccaagagcatcttggccctgggaagaggtccctaggctgcagatgctactgactgcttgctaggtagcctctggaaagcattccccatccatcactccccacttctttctgctgtgctgcttccctcccaaactccatttctgtcaccctttttataagacttttcctcattctgtggggccataaacctatttagtctggagccaaagggatgccctatctgaaggaaaggggcatggggtgggggattccatcaaaactgttgttttttgccccatgatttttctttggtcagtaggaggctggattggagtggtgattattcccctggagctaagctcaggagcccgaagggagagactgagactgactcccttatctcttcatattctttattccctaccagatggatttttttttttttttttggagacggagtctcgccctgtcrccaggctggagtgtagtggcatgatctcgactcactgcaaaatctgcctcccgggttcaagcgattctcctacctcagcctcccgagtagctgggattacaggcatgtgccaccacgccaagctaatttttgtatttttagtagagacggggtttcaccatgttggccaggatggtctcgatctcttgacctcgtgatctgcctgccttggcctcccaaagtgctgggattacaggcgtgagccaccatgccccgccccagatggattttacatttgctcttttgtgtttcgctccaaagggttgtcttcctcgccaaaaggagggagggactttgaatttgatatgaatctttaaaaccagaattggctggatatttcccatgattgggaaaagagtgaaatgaggacattctgtaaactgtccctccctaattccaaggatcagaaactccccgttttgctgactcattccataactggagaaagaagctccattgaccgaagccacagggcagcatggaagtttaaattttctctaaaattaaaatgccaaggataaagctggctgcttccaggagggggaagaggagtggggagtgggcggtgaaacttttccagatgaacggaccataaatgtgttactggctttgtgcctgtagctcattttattatgacctatatgctcctgatttaaagagatctgtgtactgtttacttcccacttcccagaatcccttgtatctcctttctcgggaattgtattttctaataaatgacatttgagaaaaaaatga

SEQ ID NO: 463 - DNA, 1415 bp, Homo sapiens
atggtatcagagaatagttggcaggtaaaaaaaattgcatatagccctgctctgtcgcctgccgcctctgcccgggcccgagtggttcactgcaccctgaagacagattccagacgccgggaactcgtgcctctaatcccagacgttatgtccagcaaaggctcagtggttctggcctacagtggcggtctggacacctcgtgyatcctcktgtggctgaaggaacaaggctatgacgtcactrcctacctggccaacattggccagaaggaagacttcgaggaagcaaggaagaaggcaccaaagcttgggaccaaaaaggtgttcactgagggtgtcagcagggagtttgtggaggagttcatctggccagccatccagtccagctcactgtatgaggacggctacctcctgggcacctctcacaccaggccctgcaccgcccgcaaacaaataaaggtcattgctccctggagcatgcccgaattctacaaccacttcaagggctgcagtgacctgacggaatacacaaagcaacacgggattcccatcccagtcactcccaagaacccgtggaacatggacgagaacctcatgcacatcagctacgaagctggaatcctagaggacccccaagaaccaagcgcctccaggtctctacmcgaagacccaggactggccaaagcccccaacacccctgacattctcgagatcgagttcaaaaaaggggtcttyttgaaggttaccaacgtcaaggatggcaccacccaccagacctccttggcgctcttcatgtacctgaatgaartcacgggaaagcactgcgtgggccgtattgacatcgtggagaactgcttcattggaatgaagtccyrasgtatctacgagaccccagcaggcaccatcctttaccaygctcatttagacatcgagaccttcaccatggactgggaagtgcgcaaaatcaaacaaggcctgggcttgaaatgtgctgagctggtgtatactggtttctggcacagccctgagtgtgaatttgtccgccactccatcgccaagtcccaggagcgagtggaaaggaaagtacaggtgtccctcttcaaggaccaggtgtacatcctcggctgggagtccccacggtctctctacaacgaggagctggtgagcatgaacgtgcatggtgattatgagccaattgatgccaccggtttcatcamcatcaattccctcaggctgaaggaatatcatcatctccagagcaaggtcactgccaattagaaccctgtacagggagaagctggggcttcctcaatttgcagatcccccaagtacaggcrctaattgttgtgataatttgcagttgtgacttgttctcccctgcaggcagcgtagtggggctgccaggcccccgcttt

SEQ ID NO: 464 - DNA, 369 bp, Homo sapiens
atggtcaaccccaccgtgtccttcaacatcrctgtcaatggtgagcccttgggctgtgtctccttcaagctgtttgcagacaagtttccaaagacagcagaaaactttcgtgctstgagcactggagagaaaggatttgattataaatgttcctcctttcacagaattattccaggggtggtgacttcacacgccataatggcactgtttttcatctgcactgccaagactgagtggttggatggcaagcccatggtctttggcaaggtgaaagatggcatgaatattgtggaggccatggagcacttygggtctgggaatggcaagaccatcaagaagatcaccatcgctgactgtacacaacttgac

SEQ ID NO: 465 - DNA, 550 bp, Homo sapiens
atactatcagccatggtcaaccccaccgtgtccttcaacatcrctgtcaatggtgagcccttgggctgtgtctccttcaagctgtttgcagacaagtttccaaagacagcagaaaactttcgtgctstgagcactggagagaaaggatttgattataaatgttcctcctttcacagaattattccagggtttatgtgtcagggtggtgacttcacacgccataatggcactggtggcaagtccatctacggggagaaatttgatgatgagaacttcatcctaaagcatacaggtcctggcatcttgtccatggcaaatgctggacccaacacaaatgattcccgtttttcatctgcactgccaagactgagtggttggatggcaagcccatggtctttggcaaggtgaaagatggcatgaatattgtggaggccatggagcacttygggtctgggaatggcaagaccatcaagaagatcaccatcgctgactgtacacaacttgactaagtttgacttgtgttttttttttgagactgagtttcrctctt

SEQ ID NO: 466 - DNA, 1784 bp, Homo sapiens
gtgcggctacgcagcgctgcgggacgcgttagtgctacaggcggatgcggtctctggccgcgggtccatggcagtcttcgaacgcttcacacgcggaaacagtgaggccccggcgctggacttgccggyccggacgctccaggctgggcgggtaaatggtagaggcgggcaaatgggggcggggcctaatagagactccagctaatgaggtgcaaacggccgagagagggcggggcggcgctaaagcgtaaggttagaatggaggttcatcctgcagccaacaggagaaaagagcctaagagtcaaagcccgagagccagcctaggtcagggatgragcccagcaaaggcggggccaatgtgtggatagggcacttggaggtctggtaaagaagcaaagggaacgaagccggccgcaggagtcggaggcccctaaagggatgtagccagtgacccggcgcttcctggatagggcgtggccggctcccsggcccgcctcctttcccgtccccaccacaggaatcttgttttctaaccggccgtgctggtggacactgcgcaattttgcacttggagcgcttaagaagttcgggttggrtacgcggaccgtcgaggcgcgcgtcctggaggaggcggcttgtctgctagacgaatttcaagccaccattgcttcggcctggccgggagagcggaagggcctggtgctgtatccartgttayctgttcttgtcttcgggaaccgctatcgctatggggacccggagttcctgaggctcctgaacctcttcagtgacaacttctgcatcattagttccagatggggcgagatgtacatttgcctgtccctcatggactggctcccgggcccgcaycaccgaatcttccgaaacttttcggagctgcgggtcatctctgagcaaattcaacgacactggcagatgcggcagccagcggagccccgcgatttcattgattgcttgaccagatggacgtcggtaatgacgacgcattttttttttggcgtcaccgaaaccacgagcaccaccctgtgctaygggctcctcattctgcttaagtacctagaggtggcagccaaggtgcaggagctggaccctgtggtagggtggaggcccgccccaagcctggactatcgcgtgtgcctgccctacgccaacgcagtgctgctcgagatccagtgcttcatcagcgtggtgcccctggggctgccgcgcaccctcaccctcgacacccacctgcacagccactgtctgcccaaaggtaacccaagttgcatgtatccccagggcacttttgtgattcccctgcttgtgactgcacaccgggaccccactcaattcaaagacccagactgcttcaaccctaccaacttcctggacaagggcaagttccagggcaatgatgctttcatgccctttgcctcaggtgcaggcagaggaggaaggggaccagcctggactggctctggggtacctggtgctcactgtgcacctgtgtacccggcaaagcagatgtgcctgggcacaggcctggcccactcgggtatcttcctattccttayggccaccttacagaggttctgcctgctccctgtggtacgccctggcaccatcaacctcacctgcagtgcactggcctgggcagtgtccccccagacttccagctccagccagtggcctgctgaggtcaggctccactatggtgggctcactggccctcaaacctccataccctcctcggtcaataaaggccctaaattgcagatgg

SEQ ID NO: 467 - DNA, 1939 bp, Homo sapiens
ggccgggagacgggcctgggagcggcggcggcggcccgagagctgcgccgggagagctgtgccgcgagcctccgcctcttttttggcaccgcacagtggatccctggaggccgagcgccacgccgcccgggtacccggcagatcgcgaggtggaacgggccgtcgctgcgggggacagcgttccgaggcagttggtcctctccgggatgccgtakgcatcagctgaccggcccagcccacgtgactacaggggcacttgatgggaatcatggcagcatccaggccattgtcccgcttctgggagtggggaaagaacatcgtctgcgtggggaggaactacgcggaccacgtcagggagatgcgcagcgcggtgttgagcgagcccgtgctgttcctgaagccgtccacggcctacgcgcccgagggctcgcccatcctcatgcccgcgtacactcgcaacctgcaccacgagctggagctgggcgtggtgatgggcaagcgctgccgcgcagtccccgaggcygcggccatggactacgtgggcggctatgccctgtgcctggatatgaccgcccgggacgtgcagracgagtgcaagaagaaggggctgccctggactctggcgaagagcttcacggcgtcctgcccggtcagcgcgttcgtgcccaaggagaagatccctgaccctcacaagctgaagctctggctcaaggtcaacggcgaactsagacaggagggtgagacatcctccatgattttttccatcccctacatcatcagctatgtttctaagatcataaccttggaagaaggagatattatcttgactgggacgccaaagggagttggaccggttaaagaaaacgatgagatcgaggctggcatacacgggctggtcagtatgacatttaaagtggaaaagccagaatattgagttatttsttaacaagtttcgagagagaagggagcaagacaagagcaagcaacggctattaaatgtcacaatcctttaattagaaaccatttattggccggacgcggtggctcacgcctgtaatcgcagcactttgggaggccgaggcgggcggctcacgacgtcaggagatccagaccatcttggctaacagggtgaaaccccgtctctactaaaaatacaaaaaattagccgggcgtggtggcgggcgcctgtagtcccagctactctggaggctgaggcaggagaatcaattgaacccgggaggcggagcttacagtgagctgagattgcgccactgtactcctgggcaacagcgagactccgtctcaaaaaaaaaaaaaaaaaaaagaaaccatttattttaaaaatgattagattgctatgcctcaactcatagaagatgaacccttcaagaaaacgtgaagtagaacgggtgggccagaaatgaaaacaggcaagtaaagtatttcttcggaaaacattttatcaaaccaaatgttaaaaagactttccttttgtaaaactggattagagaagacttttcartgggttatctctaggatgatcagtagttsagcacttaaaaactgcagagaaaactgaaagttatgttccagataactttccgttgtttaccaaattttcttagayttggtcatcatcaggaagcatttgtaaaaataaaaatctccacmaattactggcccatctcggacttgctgaatcaatttgataggattaatctccagtgaagctgtgtttacagggcattccaagtgattcttatcaggaartgtgaaaaacactcctgtacataatcggttaatttaaaattttacttaataagtgaacaaktaatgaagatttcacctgtttacttagggtatctacccagacccatcgatyctgagttcgggagatgattttgaaattactgttttccaaataaaggtgctcccttct

SEQ ID NO: 468 - DNA, 1821 bp, Homo sapiens
ctttttctagcggatttgcaatttgtgaagaaatgaactttcctgttyctacaaagtaaacgtctagagtcttcatagttaatgaaataattatgttggggagaaagtaagacgcttacatctgttgacccacttmtatctgcaccatgtttcttctctgacataactctcgtgttcatcaatctccaggaaacctgttctgattccattctttacattttccaaagaaggtgctcctgcagaccctgtaaatcctggttatcggcgatgtgatctaacaaatgctcacagcagtatttggcaacctgagaaccaggatgcccgttatacacagcaaagaatgaccacctttcaagtccacttggcaaagcaatcacagccgtatgtgcatcctccatttcaatacgycaaccttgcatgctgcgtagctcgtatcgcaactaattaccccacccccaggcattatgctcttccatctttgcttgtctaaagatggtcccattatgtcataatcctgtaggtctctattaaaagtcaaaaatcatcaacaaaaccaaaacaagtcaacaaccacaacaacaacaacaaaacaaggctgtggagagaaggcaatgcttatacactgttggtgggaatgtaaatggattcagccactgtggaaagcaaagaaattaaagcttttaatgtctcaaagaatgtaaaacagaactaccgttcgacccagaaatcccactactgagtatatatccaaaggaaaataaatcgttctcccaaaaagacatatacttttatgttcataacagtgctgtttactatagcacagtaattaacctgggtgcccatccgtggtggattggataaagaaaatgtggtacatatgcatgttggactactaaacaccatacaaaagaacaaaagcatgtcctttgcagcaatgtggatgcagctggaggccattatcccaaacaaattaacacaggaacagaaaaacaaatactgcatgttctcatttataagtgggagctaaacaytgagaactcatgaacataaatatggcaacaatagacactggggactcacagaatgcggatgaaggaaggaaagcaagagttgcaaacctaacttttgggtactacattctatatctgggggacagagcatttgcatccccaaccttagcatcgtgtgatataaccatgtcacatacctgtatatgtacctattgaatctaaaatgaaagttgaaattatttttaaaaactttatgctagtataattttaaagcatcctacatatactagcttttgaacatattattacartactcatatcattttattgtagagattagggaagctttgttttctgaccagtattagaaaagatttgagtaacaattacctgcaatctttaagcaaacttctttcacctggtataatgtgttccttaagaaacttaagaatttttcaaagactttttgtttcaaatattggttattattttaatactaaatgttattttaatatattaaacataaaaagaatataattgtttaaaaaatgctctctccagagcactaggagataaaatgatacatttacttatgtaacactttcttaatattcctttgcattttattactatcagtgagagtttttgatattggacaaagaaagcttaaggggttagaaaagttctctcaatatatatctcttgttggccaattctgcttccagccttttaatgagactgtccagaattattctcttaccgaacatcttttcctactctcagacctgccatcgttacatcttccacgaag

SEQ ID NO: 469 - DNA, 1029 bp, Homo sapiens
ccagcttttctggagctggagatgaactcggacctcaagcctcagctcagggaactgaatataacaacaaccaaggaaattgaaattgttgatagttggaaagttattataatctttgttcccattcctaaactgaaatctttccagaaaatccaagtctggctattacatgaattgagaagaagttcagacagacaaaaagaggaagttcagggcgacaaaattccttttaagatcatcaaggaaacccagcgtttgctggcagagccagttcctggcatcaaagcagaaccagatgaaagcaacgcccgttattttcatgtggtcattgctggggaatcaaaggattccccctttgagggagggacttttaaacgtgaactattacttgcagaagaatacccaatggcagcccctaaagtacgtttcatgaccaaaatttatcatccaaatgtagacaagttggaaagaataagttkagatattttgaaagataagtggtccccagccctgcagatccgcacagttctgctatcgatccaggccttgttaaatgctyccaatccagatgatccattagcaaatgatgtagtggagcagtggaagaccaacgaagcccaagccaytgaaacagctagagcatggactaggctatatgccatgaatagtatttaaattgatccaatcattaagtgtgcatcacttctcctgttctgccaagacttcttcctttttgcttgcatttaatggacatagtcttagaaacattacagaataaaaaaacccagacatcttcagttatttggtgattaaatgtacattagcaaatctatgtcttgtcctgattcactgtcataaagcatgagcagaggctagacgtatcatccggattgttgtgaaacgtttaaaagcagtggtccctccctgcttttattcatttcccccatcctggtttaagtataaagcactgtgaatgaaggtagttgtcaggttagctgcaagggtgtgggtgtttttctttattttttt

SEQ ID NO: 470 - DNA, 846 bp, Homo sapiens
gatgagaccagaggcygaactcaggttctgatggccgagctgccccacaggatcatcaaggaaacccagcgtttgctggcagagccagttcctggcatcaaagcagaaccagatgaaagcaacgcccgttattttcatgtggtcattgctggggaatcaaaggattccccctttgagggagggacttttaaacgtgaactattacttgcagaagaatacccaatggcagcccctaaagtacgtttcatgaccaaaatttatcatccaaatgtagacaagttggaaagaataagttkagatattttgaaagataagtggtccccagccctgcagatccgcacagttctgctatcgatccaggccttgttaaatgctyccaatccagatgatccattagcaaatgatgtagtggagcagtggaagaccaacgaagcccaagccaytgaaacagctagagcatggactaggctatatgccatgaatagtatttaaattgatccaatcattaagtgtgcatcacttctcctgttctgccaagacttcttcctttttgcttgcatttaatggacatagtcttagaaacattacagaataaaaaaacccagacatcttcagttatttggtgattaaatgtacattagcaaatctatgtcttgtcctgattcactgtcataaagcatgagcagaggctagacgtatcatccggattgttgtgaaacgtttaaaagcagtggtccctccctgcttttattcatttcccccatcctggtttaagtataaagcactgtgaatgaaggtagttgtcaggttagctgcaagggtgtgggtgtttttctttattttttt

SEQ ID NO: 471 - DNA, 1772 bp, Homo sapiens
tgggagtcgtattacaaaactgaggccgatgaagaagcaaagaagaacaagaagagaaccttgaagcaagtggagactataagtattcaggaagagatagtttgttttttttttgttgatgcctccagggctatgtttgaatctcagagtaaagatgagttgactccctttgacatgagcatccagtgtatccaaagtgtgtacatcagtaagatcataaacagtgtttgagatctcttggcagtgatgctctatagtgcagagaaagacaaagattcagtgaaatatttacatcttacaggagttggataagccaggtgcaaaataaattctagagcttgaccagtttaaggggcagcaggaacaaaaacgtttccaagacctgatgggccacagatctgatgactcactcagtgaagtgctgtgtatctgtgccaacctctttagtgatgtccagttcatgatgagtcataacaagatcatgctgttcaccaatgaagacaaccccatggcaatgacagtgcctaagccagctgagccaggaccaaagctggtgatctctgagatacaggtatcttccttgacttgaagcacctgaagaaacctgggggctttgacatatccttattctatagagatatcaccagcatagcagaggatgaggacctcagggttcactttgaggaatccagcaaactagaaggttcactccaaggagaccaggaagcaagcactaagcaggttaaagctgaagctcatcaaagatatagtgatctctgggcatttataatctggtccagagggctctcaagccttctccaataaagctctattgggaaacaaatgaaccagtgaaaaccaagacccagacatttaatacaaatacaggaagtttgcttctgcytagtgataccaagaggtctgagatctatgggagtctcagattataatggagaaaggggaaacagaagagttaaaacagtttgatgatccaggtttgatgctcatggggtgtaagcccttggtaatgctgaagaagcaccatcatctgaggccctccctgttcatgtgccctgaggagttgctggtgattgggagctcaaccctgtttagtgctctgcacataaagtgtctggacaaggaggttgtagcatcacgcagatacacaccccgcaggaacatctctctttattttgtggctttggtgccacaggaagaggagttggatgaccagaaatttctggtgactcctccaggattccagcttgtctttttactctttgctgatgataaaaggaagatgccctttactgaaagtcatggcaactccagagcaggtggacaagatgaaggctatcgttcagaagctccgcttcacatgcagaagtgacagctttgagaaccctgggctgcagcagcacttcaggaacctggaggccttggccttggatttgatggagactgaacaagcagtggacctgacattgcccaaggttgaagcaatgaataaaagattggactccctggtggttgagtttaaggagcttgtttacccaccagattacaatcctgaagggaaatttaccaagagaaaacaaaataatgaagattttggaagcraaagacccaagatgaagtattcagaagaggagctgaaggccaatatcagcaagggcatgctgggcaatttcactgtgcccatgctgaaagaggcatatgggctgaagaagcaggagctgctggaagttctctctgagcacttccaggcctga

SEQ ID NO: 472 - DNA, 2058 bp, Homo sapiens
gccaggaacactagccgttcacgtgttcggtcctccttagctgactcgccgccctcgctgccgcaccatggacgccccgaggcacgtggtcaacttcgggcctggtcccgccaagctgyctcactcagtgttgttagagataaaaaaggaattattagactacaaaggagttggcattagtgttcttgaaatgagtcacaggccatcagattttgccaagattattaacgatacagagaatcttgtgcgggaattgcyagccrttccagacagctrtaaggtgatttttgtgcaaggaagtggrtctggccagttcggtgctgtccccttaaacctgattggcttgaaagcaggaagatgtgcggactatgtggtgacagggacttggtcagctaaggccgcagaagaagccaagaagtttgggactataaatatcattcaccctaaacttgrgagttatacaaaaattccagatccaagcacctggaacctcaacccggatgcctcctatgtgtattattgcgcaaatgaggtggtgcatggtgtggagtttgactttataccctatgtcaaggkagcagtactggtttgtgacatgtcctcaaacttcctgtccaagccagtggatgtccaagtttggtgtgatttttgctggtgcccagacgaatgttggctttgctggggtcactgtggtgattgtctgtgatgacctgctggggtttgccctctgagagtgccccttggtcctagaatacgaggtacaggctggaaacagctccttgtacaacacgcctccatgtttcagcatctatgtcatgggcttggtcctggagtggattaaaaacaatggaggtgccgcggccatggagaagcttagctccatcaaatctcaaatgatttatgagattattgataattctcaaggattctacgtatgtctgtgggaggcatccgggcctctctgtataatgctgtcactattgaagatgttcagaagctggccgccttcatgaaaaattttttggagatgcatcagctatgaacacatcctaaccaggatatactctgttcttgaacaacatacaaagtttaaagtaacttgggtatggctacaaaaagttaacaaacacagtattttcctcaaatgaacatgtttattgtagattcttcttttttgaaagaacaacagcaaaacatctacagctctgtaaagctggtgggaactaatgttcaccttaattctgacttgaactggaagcattttaagaaatcttctcattgcttttctaacaaattcccgcttgtttagcctttgctgctactttttctagttagatttccaacttgcctgtggacttcatactgcaagttgcaattaattatttctagagtcatgggaacacacagcatagagggtaggtggggccctctaggtgctgaatctaaacatctgtggggtctcctgtgttcagaggctgttgattcaaggtcaacattgaccactggaggagtggtttaagagtaccaggcaaagggcaaactgaagattgatcattatactgttattacaagagaagtgtcatactttatatatgtttatattagcaaggtctgtttttaataccatatactttatatttctatacttttatatttctaataatacggttatcattgatacatgtagacacttttagaatttattaaatccttgaccttgtgcattatagcattccattagcaacagttgcaccccctccccagtcttcctcttcctctttttaagctgttttatgaaaaacatctcgaagttcttgattcatttttaccgttctttccataggtagaagagaaagttgattggttggttgtttttcaattatgccattaaactaaacatttctgttaaattaccttatcctttgttctcctgactgttttctttgtaatgtttgacgatgagagtgatactttgctcaaaagtctttcccctattgtttatctattgtcagtattttatgttgaatatgtgaagaacattaaagtcctaaaacatct

SEQ ID NO: 473 - DNA, 1212 bp, Homo sapiens
gccrttccagacagctrtaaggtgatttttgtgcaaggaagtggrtctggccagttcggtgctgtccccttaaacctgattggcttgaaagcaggaagatgtgcggactatgtggtgacagggacttggtcagctaaggccgcagaagaagccaagaagtttgggactataaatatcattcaccctaaacttgrgagttatacaaaaattccagatccaagcacctggaacctcaacccggatgcctcctatgtgtattattgcgcaaatgaggtggtgcatggtgtggagtttgactttataccctatgtcaaggkagcagtactggtttgtgacatgtcctcaaacttcctgtccaagccagtggatgtccaaagtgccccttggtcctagaatacgaggtacaggctggaaacagctccttgtacaacacgcctccatgtttcatggattaaaaacaatggaggtgccgcggccatggagaagcttagctccatcaaatctcaaatgatttatgagattattgataattctcaaggattctacgtatgtccggtggagccccaaaatagaagcaagatgaatattccattctgcatttgcaatgccaaaggagatgatgctttagaaaaaagactttttgataaagctcttgaacttaatatgttgcccttgaaagggtataggtctgtgggaggcatccgggcctctctgtataatgctgtcactattgaagatgttcagaagctggccgccttcatgaaaaattttttggagatgcatcagctatgaacacatcctaaccaggatatactctgttcttgaacaacatacaaagtttaaagtaacttgggtatggctacaaaaagttaacaaacacagtattttcctcaaatgaacatgtttattgtagattcttcttttttgaaagaacaacagcaaaacatctacagctctgtaaagctggtgggaactaatgttcaccttaattctgacttgaactggaagcattttaagaaatcttctcattgcttttctaacaaattcccgcttgtttagcctttgctgctactttttctagttagatttccaacttgcctgtggacttcatactgcaagttgcaattaattatttctagagtcatgggaacacacagcatagagggtaggtggggccctctaggtgctgaatctaaacatctgtggggtctc

SEQ ID NO: 474 - DNA, 2194 bp, Homo sapiens
gccaggaacactagccgttcacgtgttcggtcctccttagctgactcgccgccctcgctgccgcaccatggacgccccgaggcacgtggtcaacttcgggcctggtcccgccaagctgyctcactcagtgttgttagagataaaaaaggaattattagactacaaaggagttggcattagtgttcttgaaatgagtcacaggccatcagattttgccaagattattaacgatacagagaatcttgtgcgggaattgcyagccrttccagacagctrtaaggtgatttttgtgcaaggaagtggrtctggccagttcggtgctgtccccttaaacctgattggcttgaaagcaggaagatgtgcggactatgtggtgacagggacttggtcagctaaggccgcagaagaagccaagaagtttgggactataaatatcattcaccctaaacttgrgagttatacaaaaattccagatccaagcacctggaacctcaacccggatgcctcctatgtgtattattgcgcaaatgaggtggtgcatggtgtggagtttgactttataccctatgtcaaggkagcagtactggtttgtgacatgtcctcaaacttcctgtccaagccagtggatgtccaagtttggtgtgatttttgctggtgcccagacgaatgttggctttgctggggtcactgtggtgattgtctgtgatgacctgctggggtttgccctctgagagtgccccttggtcctagaatacgaggtacaggctggaaacagctccttgtacaacacgcctccatgtttcagcatctatgtcatgggcttggtcctggagtggattaaaaacaatggaggtgccgcggccatggagaagcttagctccatcaaatctcaaatgatttatgagattattgataattctcaaggattctacgtatgtccggtggagccccaaaatagaagcaagatgaatattccattctgcatttgcaatgccaaaggagatgatgctttagaaaaaagactttttgataaagctcttgaacttaatatgttgcccttgaaagggtataggtctgtgggaggcatccgggcctctctgtataatgctgtcactattgaagatgttcagaagctggccgccttcatgaaaaattttttggagatgcatcagctatgaacacatcctaaccaggatatactctgttcttgaacaacatacaaagtttaaagtaacttgggtatggctacaaaaagttaacaaacacagtattttcctcaaatgaacatgtttattgtagattcttcttttttgaaagaacaacagcaaaacatctacagctctgtaaagctggtgggaactaatgttcaccttaattctgacttgaactggaagcattttaagaaatcttctcattgcttttctaacaaattcccgcttgtttagcctttgctgctactttttctagttagatttccaacttgcctgtggacttcatactgcaagttgcaattaattatttctagagtcatgggaacacacagcatagagggtaggtggggccctctaggtgctgaatctaaacatctgtggggtctcctgtgttcagaggctgttgattcaaggtcaacattgaccactggaggagtggtttaagagtaccaggcaaagggcaaactgaagattgatcattatactgttattacaagagaagtgtcatactttatatatgtttatattagcaaggtctgtttttaataccatatactttatatttctatacttttatatttctaataatacggttatcattgatacatgtagacacttttagaatttattaaatccttgaccttgtgcattatagcattccattagcaacagttgcaccccctccccagtcttcctcttcctctttttaagctgttttatgaaaaacatctcgaagttcttgattcatttttaccgttctttccataggtagaagagaaagttgattggttggttgtttttcaattatgccattaaactaaacatttctgttaaattaccttatcctttgttctcctgactgttttctttgtaatgtttgacgatgagagtgatactttgctcaaaagtctttcccctattgtttatctattgtcagtattttatgttgaatatgtgaagaacattaaagtcctaaaacatct

SEQ ID NO: 475 - DNA, 1872 bp, Homo sapiens
atgctgctcttctccctgtcctactgcaaccgctcctacctgtctctcggcactggtggacccctgcaggaggcctatgatgcagtgctcaccatcagccaggagtckggccccatagacaaggcctttgctgctgcccggcctgatggagaggcggctgcccaccttgagccagagcaggtaggtgtgctccttgtgcagaccccgaatgccttgagtrggggtccggggcaggggtgcacgcggtcaggactcagtgaacttgggtctcctggggatgcccgtttcttggtgttaagaagacagcagtgcctggaggtggtgacggatgtggatgctgatggactcttggcaacttgggaacgttgcgactggggaccagcagatgcatcaggcccaggggttccagacccgagcccgaggcagagggcctgtgtgaagacagtgttcagtgccctcctgacccagctgggactgacagtgagacagaaatggaaacggggagaggaaagtttgggcatccaccagctgcagctggtgtggggcccccaccggatcctgctgacagcccaggagctcaccttcatccatccacccctgaacagacagaggctgcatgtggatggtgaatggagaagtgtggcggatggtgggagcctgagatgctttgtgctcaaggtcactgaccatgagctgctatggacagctcctgagctgctgccggggcctgggcgccctgggcggygcaccctcacaggggacatcttcagcactggcatcatcctgcaggaggtgctgactcgggcccactctactgctcctcgggacttccagtggaagaatcataatgatgatgataatgataagcaggcagtgtcgttcacacctgtggggaacyggcacgccagtgtctgcgtggcaaggctggaggaaagagctgcgctgtcaaggtttcaagatcattggtgggcattgttggcaacagagcagcggcagttgttgcggggcctgagggtgggggagagtctgccaggaccccaggcccgccccatggtgttggttgccgaaatcatcaggagggtggcatctccccctcctctgtgccggccgctgaagtgctggracgaggctccagaggacagacctagcatggaccagatctacagccagttcaaaagcatcaaccaaggcaagaggaccagtgttgctgactccatgctgtggttgctggagaaatattcccagaacctggaggacctgattcaggagcagactgaggaactggagctgaagagagagaagacagaaaggctgctctgtcagatgattcccccgtctgtggctgaagctcggaaaatgggggcaactgtggaaccagggtattttgaccaggttaccatatacttcagtgacattgtgggtttcaccatcatctcagccctgagtgaacccattgaggcggtgggcttgctcaacgatctctacatgctgtttgatgctgttctgggcagccatgacctgtataaggtggagaccaytggggacgcctacatggtggtgtgggggctgcctcagtgcaatggcagtcagcatgcrgccgagatcaataacatggctctggatatccttggctctgtgggtgacttccrgaagaggcatgcacccaacgtgcccatttgcatcagggctggcctgcattcagggccctgtgcagcaggggtcgtgggtctcacgatgccttggtattgcctctctggggacactgtcaacacggcttcccagatggagtccacagggctgcatgagtatctcacacttctatcctgcccggggagagactctttcaataacctgtgcggcctggctgtttaa

SEQ ID NO: 476 - DNA, 2595 bp, Homo sapiens
atgctgctcttctccctgtcctactgcaaccgctcctacctgtctctcggcactggtggacccctgcaggaggcctatgatgcagtgctcaccatcagccaggagtckggccccatagacaaggcctttgctgctgcccggcctgatggagaggcggctgcccaccttgagccagagcaggtaggtgtgctccttgtgcagaccccgaatgccttgagtrggggtccggggcaggggtgcacgcggtcaggactcagtgaacttgggtctcctggggatgcccgtttcttggtgttaagaagacagcagtgcctggaggtggtgacggatgtggatgctgatggactcttggcaacttgggaacgttgcgactggggaccagcagatgcatcaggcccaggggttccagacccgagcccgaggcagagggcctgtgtgaagacagtgttcagtgccctcctgacccagctgggactgacagtgagacagaaatggaaacggggagaggaaagtttgggcatccaccagctgcagctggtgtggggcccccaccggatcctgctgacagcccaggagctcaccttcatccatccacccctgaacagacagaggctgcatgtggatggtgaatggagaagtgtggcggatggtgggagcctgagatgctttgtgctcaaggtcactgaccatgagctgctatggacagctcctgagctgctgccggggcctgggcgccctgggcggygcaccctcacaggggacatcttcagcactggcatcatcctgcaggaggtgctgactcgggcccactctactgctcctcgggacttccagtggaagaatcataatgatgatgataatgataagcaggcagtgtcgttcacacctgtggggaacyggcacgccagtgtctgcgtggcaaggctggaggaaagagctgcgctgtcaaggtttcaagatcattggtgggcattgttggcaacagagcagcggcagttgttgcggggcctgagggtgggggagagtctgccaggaccccaggcccgccccatggtgttggttgccgaaatcatcaggagggtggcatctccccctcctctgtgccggccgctgaagtgctggracgaggctccagaggacagacctagcatggaccagatctacagccagttcaaaagcatcaaccaaggcaagaggaccagtgttgctgactccatgctgtggttgctggagaaatattcccagaacctggaggacctgattcaggagcagactgaggaactggagctgaagagagagaagacagaaaggctgctctgtcagatgattcccccgtctgtggctgaagctcggaaaatgggggcaactgtggaaccagggtattttgaccaggttaccatatacttcagtgacattgtgggtttcaccatcatctcagccctgagtgaacccattgaggcggtgggcttgctcaacgatctctacatgctgtttgatgctgttctgggcagccatgacctgtataaggtggagaccaytggggacgcctacatggtggtgtgggggctgcctcagtgcaatggcagtcagcatgcrgccgagatcaataacatggctctggatatccttggctctgtgggtgacttccrgaagaggcatgcacccaacgtgcccatttgcatcagggctggcctgcattcagacctgctggagctcactgggtacattcgagtttcagggccctgtgcagcaggggtcgtgggtctcacgatgccttggtattgcctctctggggacactgtcaacacggcttcccagatggagtccacagggctgcatgagtatctcacacttctatcctgcccggggagagactctttcaataaccttcctgacaccaccatgaagacatccccagcgtttttggcccttactggcagcaggagctaccatgatggcttggctagagcagctaagatgttgaagccccaggtcctctgcctctggctgtcatacagaattcatgtcagccaaagcactgtccagatactgctcagccttgatgaaagctaccaaattgatatcagaggggaagggcatcgaagagacctactgggtggggggaaggcaggcttccccaggcccctccccgcacctgtggacatcagacctggctctggctgctcactcartggttccttctggggcttcacagcaccacggattgcaaagctccagcaacccttgaaacctggtcctccagcatccccagtcagacagcccaacaccatgccaagctcctggcgtctccrcacctacccctatccattagcaagtctggagcctccagagcctctggggaggcagaacaggggtgaggacagcaccttccagctctccaccacctccacaatcagtcatcaagtcctgtgcggcctgccacgatggtctccgacttcggtccacaacaagggcaccaggcttcatgctgctctcttgcctctattcccacccctaatctacctgcaacgcagaccttgcgacgtcacttttcgacttakcaagtgtgcactactgatgaccaagggcctttgc

SEQ ID NO: 477 - DNA, 2305 bp, Homo sapiens
gctggcagccgagcgggtgtttatgttgggtcgccgggtctctggcagcctgacagactacctgatgagccagggcaccggctgcgtgcccgaggacgggctcaccacgcagcagctcttcgccagagccgacagcctcacctacaacgagttcctgattctcccaggattcatagacttcatagctgatgaggcggacctcacctcagcccttacctggaagatcacgctgaagacgccgctgatctcctcctccatggacactgtgacagagggcaacatggccatcacgatggctctggtgggaggtattggtttcattcaccacaactgcaccccagagttccaggccaaggaggtgcggaaggtcaagaagtttgaacatggcttcatcacggaccccatggtgctgagcccctcgcaccctgtgggtgatgtgctggaggccacgatgcggcatggcttctctggtatccccatcactgagacaggcaccatgggcagcaagccggtgggcatcgtcacttcccgagacatcgactttcttgctgagaaggaccacaccaccctcctcagtgaggtgatgatgccaaggattgagctggtggtggctccagcaggagtgatgttgaaagaggcaaatgagatcctgcagcaaagcaagaaagtgaagctgcctatcgtcaatgacgatgatgagctggtggccatcattgccctcaccgacctgaagaaccgagactaccctgtggcctccaaggattcccatgagcagctgctgtgtggggcagctgtgggcacctgtgaggatgacaaataccgcctggacctgctcacccaggcgggtgtcgacgtcatagtcttggacttgtccgaagggaacttgctgtatcaactgccatggtgtattacgtcaaacagaagtactcccacctccaggtgattggrgggaacgtggtgacagcagcccaggccaagaacctgattgatgctggtgtggacgggctgtgtgtgggcataggctgcggctccctctgcatcacccaggaagtgatggcatgtggttgcccccagggcactgtgtgtacaaggtggctgagtatgcccggcactttggtgtgcccatcatagccgatggtggcatcctgactgtggggcacatcaaggtgccggcccttggtgcctccatagtgatgatgggctccctgctggctgccacctcggaggcccccagcgaatagttctcagatggggtgcggctcaagaaatactggggcacaggcttgctggatgccatggagaagagcagcagcagccaggcacgatacttcagtgaggaggataaggtgaagatcacacagggtgtctcgggctccatccaggacaaagggtccattcagaagtttgtgccctacctcatagtgggcatccagcatggctgccaggatatcagggcccgcagcctgtctgtcctttggtccatgatgtactcaggagagctcaagtttgagaagcgtaccatgtcggcccagattgagggtggcgtccatggcctgcactcttaggagaagcggctgtactgacagcagtggaggccgaggtggtggagggggcaccccccagtgtccaccttcgggcatagcctccctccatcactgagtggtccacagatttgcactacgggttccccagctcctttccagggagagaggaggcgaagttgtgaggggtctgtgacccctcgctgggcatcccctgcagagtcaggactgctccctgggccaggctgccctgggaggcccccagagcccagccagctgggctttcaggccctacgcctgcttcaggtcttgctgcagcctgctgcagcctggcccccaccccaggggcaggcagcccctcctggcttctcctgtagggcacttccctgcccccagtcccccaggaaatggtgctctcctggccctgcctctggcctactgccccctcagccatgtggcacttctgagctcctgacctaggctaaggggaggtctctgcccccttccccggccctgggctacccttgggtcctgctcctcaggccactcccctgtccctggccctggggagaaggctgctctggtcatggctgcctgcccctcattcctgactcaccaccgtccccaggtgtaccattcctgccctctcctcagctgtagttgaaggctttaactttgcacactttgggatcatagttgcgtcattgtgtattaaataatcagaataaatcaagcaggtctcaatgccaataataataataata

SEQ ID NO: 478 - DNA, 3222 bp, Homo sapiens
cttcccccacccgcttccggccgcggctcggttctmccgcctccgcctccgccgcggctcgtggttgtcccgccatggcactgtcgcgggggctgccccgggagctggctgaggcggtggccgrgggccgggtgctggtggtgggggcgggcggcatcggctgcgagctcctcaagaatctcgtgctcaccggtttctcccacatcgacctgattgatctggatactattgatgtaagcaacctcaacagacagtttttgtttcaaaagaaacatgttggaagatcaaaggcacaggttgccaaggaaagtgtactgcagttttacccgaaagctaatatcgttgcctaccatgacagcatcatgaaccctgactataatgtggaatttttccgacrgtttatactggttatgaatgctttagataacagagctgcccgaaaccatgttaatagaatgtgcctggcagctgatgttcctcttattgaaagtggaacagctgggtatcttggacaagtaactactatcaaaaagggtgtgaccgagtgttatgagtktcatcctaagccgacccagagaacctttcctggctgtacaattcgtaacacaccttcagaacctatacattgcatcgtttgggcaaagtacttgttcaaccagttgtttggggaagaagatgctgatcaagaagtatctcctgacagagctgaccctgaagctgcctgggaaccaacggaagccgaagccagagctagagcatctaatgaagatggtgacattaaacgtatttctactaaggaatgggctaaatcaactggatatgatccagttaaactttttaccaagctttttaaagatgacatcaggtatctgttgacaatggacaaactatggcggaaaaggaaacctccagttccgttggactgggctgaagtacaaagtcaaggagaagaaacgaatgcatcagatcaacagaatgaaccccagttaggcckgaaagaccagcaggttctagatgtaaagagctatgcacgtcttttttcaaagagcatcgagactttgagagttcatttagcagaaaagggggatggagctgagctcatatgggataaggatgacccatctgcaatggattttgtcacctctgctgcaaacctcaggatgcatattttcagtatgaatatgaagagtagatttgatatcaaatcaatggcagggaacattattcctgctattgctactactaatgcagtaattgctgggttgatagtattggaaggattgaagattttatcaggaaaaatagaccagtgcagaacaatttttttgaataaacaaccaaacccaagaaagaagcttcttgtgccttgtgcactggatcctcccaaccccaattgttatgtatgtgccagcaagccagaggtgactgtgcggctgaatgtccataaagtgactgttctcaccttacaagacaagatagtgaaagaaaaatttgctatggtagcaccagatgtccaaattgaagatgggaaaggaacaatcctaatatcttccgaagagggagagacggaagctaataatcacaagaagttgtcagaatttggaattagaaatggcagccggcttcaagcagatgacttcctccaggactatactttattgatcaacatccttcatagtgaagacctaggaaaggacgttgaatttgaagttgttggtgatgccccggaaaaagtggggcccaaacaagctgaagatgctgccaaaagcataaccaatggcagtgatgatggagctcarccctccacctccacagctcaagagcaagatgacgttctcatagttgattcrgatgaagaagattcttcaaataatgccgacgtcagtgaagaagagagaagccgcaagaggaaattagatgagaaagagaatctcagtgcaaagaggtcacgtatagaacagaaggaagagcttgatgatgtcatagcattagattgaacagaaatgcctctaaacagaaccctcttactatttagtttatctgggcagaaccagattgttatgtcctttgttccaaagggaaaaaattgacagcagtgacttgaaaatgattctgctccctttgaaagcattcattttgctagaactgttagacacattgcagtatgctgtattgaaagtaggaatatagttttaaaaaccctttgaacaaagtgtgtgcataaccagtcatgagataaaacaacacaatgcatgttgcctttttaatgtaaatacccktaggtatcattaatagtttcaaaatattgtggtttagtaaagttgatacctggttataaatattatgcctttatttttggctagaagaagaattatttttagcctagatctaaccattttcatactcttaactgattgaaacagattcaaagaagtatcgagtgctatgcattgaaacttgtttttaaatgttagatggcactatgtatattaatgtaaaacaatgttaatttactcaagttttcagtttgtaccgcctggtatgtctgtgtaagaagccaatttttgtgtattgttacagtttcaggttatttatattcgatgttttgtaaaactcaaataacgactatacttatggacmaaataaatggcatctgcattcttgttacacatgcctgcacagttcctgtttctgctgccttatatctactgcaggaatgtcaaattcttttcattaaaaaaagaactcgcctcccaaagtgctgggattacaggcgtgagccactgcgcctggcctaatggcagtgtttttaaaatttggattgtcagcagttggcctttgttgagaaaatgtgtgactttgcccaagcccagtaacttggagccttgaatttgagatgctggaaagggagtccttcctcctttctgcagtgtttgtctgggttgtcccctagtttaccaaagtccattttgaatgtaccatccccagcccaactccagcctacagatagtgccagaccgccagtaggtggagtagcactgtcttcctggtcccggacctcagagggctttgcctgttagggtactcttatcactcagagatgggccttgagttttcagagaacagaaasccattaagctgtttcccctattgtattcatgtgccctttgtgtttctggcaataatttattttatatttcaactaaattttaaatttctaat

SEQ ID NO: 479 - DNA, 2749 bp, Homo sapiens
cttcccccacccgcttccggccgcggctcggttctmccgcctccgcctccgccgcggctcgtggttgtcccgccatggcactgtcgcgggggctgccccgggagctggctgaggcggtggccgrgggccgggtgctggtggtgggggcgggcggcatcggctgcgagctcctcaagaatctcgtgctcaccggtttctcccacatcgacctgattgatctggatactattgatgtaagcaacctcaacagacagtttttgtttcaaaagaaacatgttggaagatcaaaggcacaggttgccaaggaaagtgtactgcagttttacccgaaagctaatatcgttgcctaccatgacagcatcatgaaccctgactataatgtggaatttttccgacrgtttatactggttatgaatgctttagataacagagctgcccgaaaccatgttaatagaatgtgcctggcagctgatgttcctcttattgaaagtggaacagctgggtatcttggacaagtaactactatcaaaaagggtgtgaccgagtgttatgagtktcatcctaagccgacccagagaacctttcctggctgtacaattcgtaacacaccttcagaacctatacattgcatcgtttgggcaaagtacttgttcaaccagttgtttggggaagaagatgctgatcaagaagtatctcctgacagagctgaccctgaagctgcctgggaaccaacggaagccgaagccagagctagagcatctaatgaagatggtgacattaaacgtatttctactaaggaatgggctaaatcaactggatatgatccagttaaactttttaccaagctttttaaagatgacatcaggtatctgttgacaatggacaaactatggcggaaaaggaaacctccagttccgttggactgggctgaagtacaaagtcaaggagaagaaacgaatgcatcagatcaacagaatgaaccccagttaggcckgaaagaccagcaggttctagatgtaaagagctatgcacgtcttttttcaaagagcatcgagactttgagagttcatttagcagaaaagggggatggagctgagctcatatgggataaggatgacccatctgcaatggattttgtcacctctgctgcaaacctcaggatgcatattttcagtatgaatatgaagagtagatttgatatcaaatcaatggcagggaacattattcctgctattgctactactaatgcagtaattgctgggttgatagtattggaaggattgaagattttatcaggaaaaatagaccagtgcagaacaatttttttgaataaacaaccaaacccaagaaagaagcttcttgtgccttgtgcactggatcctcccaaccccaattgttatgtatgtgccagcaagccagaggtgactgtgcggctgaatgtccataaagtgactgttctcaccttacaagacaagatagtgaaagaaaaatttgctatggtagcaccagatgtccaaattgaagatgggaaaggaacaatcctaatatcttccgaagagggagagacggaagctaataatcacaagaagttgtcagaatttggaattagaaatggcagccggcttcaagcagatgacttcctccaggactatactttattgatcaacatccttcatagtgaagacctaggaaaggacgttgaatttgaagttgttggtgatgccccggaaaaagtggggcccaaacaagctgaagatgctgccaaaagcataaccaatggcagtgatgatggagctcarccctccacctccacagctcaagagcaagatgacgttctcatagttgattcrgatgaagaagattcttcaaataatgccgacgtcagtgaagaagagagaagccgcaagaggaaattagatgagaaagagaatctcagtgcaaagaggtcacgtatagaacagaaggaagagcttgatgatgtcatagcattagattgaacagaaatgcctctaaacagaaccctcttactatttagtttatctgggcagaaccagattgttatgtcctttgttccaaagggaaaaaattgacagcagtgacttgaaaatgattctgctccctttgaaagcattcattttgctagaactgttagacacattgcagtatgctgtattgaaagtaggaatatagttttaaaaaccctttgaacaaagtgtgtgcataaccagtcatgagataaaacaacacaatgcatgttgcctttttaatgtaaatacccktaggtatcattaatagtttcaaaatattgtggtttagtaaagttgatacctggttataaatattatgcctttatttttggctagaagaagaattatttttagcctagatctaaccattttcatactcttaactgattgaaacagattcaaagaagtatcgagtgctatgcattgaaacttgtttttaaatgttagatggcactatgtatattaatgtaaaacaatgttaatttactcaagttttcagtttgtaccgcctggtatgtctgtgtaagaagccaatttttgtgtattgttacagtttcaggttatttatattcgatgttttgtaaaactcaaataacgactatacttatggacmaaataaatggcatctgcattcttgttacacatgcctgcacagttcctgtttctgctgccttatatctactgcaggaatgtcaaattcttttcattaaaaaaagaactcg

SEQ ID NO: 480 - DNA, 1531 bp, Homo sapiens
ggaaggagtcgctgagctgaatctttgtggagtggagtggggcgagagtcctccgagtagtctggaaaattagacttctgagccttaattcatacttataagcagctagtaaattgtaaaatatagtgaagcaatgtagtgtagtaactaaaaccccaagctttggagccagattgggcctttaaccctaaagttgccgtttattttgactggcgagtcatttacttatagatttatttatttttatttttatttttttcttgagactccatctcaaaaaaaaaaaattgttatattttcccggcagttttcttctgaacctttttgctaattgtcggaataacttgtagaaaatgagactttggaaagcaagggttctcaaactcgttttgaaaacagcaaaggattccaggcttggtctcaactccaaatggttgtctttgaagcttggtgatgctggaaaccccagaagtcttgctataagattcatccttaccarttacaacaagttgtccatccagagttggtttagtttgcgccgagtcgagatcatttccaacaattcaatccaagcagtctttaacccaactggcgtatatgctccctctggttactccyaccgctgccaacgcgtgggcagcctgcagcaggaccaggccctcttgctgcccagcgacacggatgatgggtcgagcctgtgggaggtcacttttattgatttccagatccaaggttttgccatcaaggggggacgatttaccaaagcccaagactgcgcctcctccttctcgccagcttttctgatcggcctggcaatgtccctgatcctgctgctggtgttggcctatgccctgcacatgctcatctacctgcggtatctggaccaacaatatgatctcatcgcctctcctgcccacttctcgcagctgaaagctcgagacacagccgaagagaaggagctgctgaggagccagggggctgaatgctataaactgagaagccaacagatcagcaaaatctatgtttagcagcacaggctggcccccaccatgtccacagtgggctccgaaagttgtctctgttctgtgctatttgacttgtgaattacagattttcaccaaatggcttgattacaaaaaaaaagaaaaaacacaaaaaggaaatagataatgaattctttttgaaccatccactggcctacttaggtagacttggggcaatcaaaaaaggcatctcagggatcccacagagacaaatatgactgttagttgcctcaaagtaccctgaaagcaaaggggtatttcaagtacggaaaaagagagagagagaagaagraggaggaggaggaggaggaggagaaggagaaggaggagcaggaggaagaggaggaggaggaggaaagggagggagggagggagagggagagagagagaaagattggcaacacagagaagggaaaacacacttggtcctccttgcctgtgccagtttggatgtgacaattatagaaataataaaccaagattatctg

SEQ ID NO: 481 - DNA, 4883 bp, Homo sapiens
cgtgtgggaggccggaagttgcggcttcattactcgccatttcaaaatgctgccgaggccctaggatctgtgactgccacccctccccccacccgggctcggcgggggagcgactcatggagctgccgtaagttttaccaacagactgcagtttcttcactaccaaaatgacatcattttccacctctrctcagtgttcaacatctgacagtgcttgcaggatctctcctggacaaatcaatcaggtacgaccaaaactgccgcttttgaagattttgcatgcagcaggtgcgcaaggtgaaatgttcactgttaaagaggtcatgcactatttaggtcagtacataatggtgaagcaactttatgatcagcaggagcagcatatggtatattgtggtggagatcttttgggagaactactgggacgtcagagcttctccgtgaaagacccaagccctctctatgatatgctaagaaagaatcttgtcactttagccactgctactacagatgctgctcagactctcgctctcgcacaggatcacagtatggatattccaagtcaagaccaactgaagcaaagtgcagaggaaagttccacttccagaaaaagaactacagaagacgatatccccacactgcctacctcagagcataaatgcatacattctagagaagatgaagacttaattgaaaatttagcccaagatgaaacatctaggctggaccttggatttgaggagtgggatgtagctggcctgccttggtggtttttaggaaacttgagaagcaactatacacctagaagtaatggctcaactgatttacagacaaatcaggatgtgggtactgccattgtttcagatactacagatgacttgtggtttttgaatgagtcagtatcagagcagttaggtgttggaataaaagttgaagctgctgatactgaacaaacaagtgaagaagtagggaaagtaagtgacaaaaaggtgattgaagtgggaaamaatgatgacctggaggactctaagtccttaagtgatgataccgatgtagaggttacctctgaggatgagtggcagtgtactgaatgcaagaaatttaactctccaagcaagaggtactgttttcgttgttgggccttgaggaaggattggtattcagattgttcaaagttaacccattctctctccacgtctgatatcactgccatacctgaaaaggaaaatgaaggaaatgatgtccctgattgtcgaagaaccatttcggctcctgtcgttagacctaaagatgcgtatataaagaaagaaaactccaaactttttgatccctgcaactcagtggaattcttggatttggctcacagttctgaaagccaagagaccatctcaagcatgggagaacagttagataacctttctgaacagagaacagatacagaaaacatggaggattgccagaatctcttgaagccatgtagcttatgtgagaaaagaccacgagacgggaacattattcatggaaggacgggccatcttgtcacttgttttcactgtgccagaagactaaagaaggstggggcttcatgccctatttgcaagaaagagattcagctggttattaaggtttttatagcataatggtagtacgaacwtaaaaatgcatttattcmgttcacttaccacattatttgaaaatcaatcctttatttaattttatttccaacctgtcagagaatgttcttaggcatcaaaatccaaggtagctgtaagaaaaatactggagctaacaatgaagaacagaagtaatctgattagtcaaattattaagtgccatggattactttatgcagcagtcaggtacatagttaggtgaacccaaaagaaaaactcttgaaaacaagagatttcttccatgcacatttacaatattgaggtataattaacatgataaagtgtttccttctaacgagttgtagaaatctgagtaaccacccaaaaaagcaatagaatgtttctgtcaccccaaaacactcccttctgcccctcttcagacagtccttcagctatttcatggctctcaccctagttttttttttttttgcacttttttttttccgggggtataggggaggtgtggggcgacagggtctgtcttgttctgtctcccaggctgaagtgcagtgcagtggtatgatcatggctcactgcagccttggtttcctgggcataagtggtcttcccacttcagcctcctgagtagctgagactatagactagcataaccacactggctaattttttgtggagatgaagtctcactatgttgcccaggctggtctcgaactcctgggctcaaacaatcctcccgcctcagccttccaaattgctgggattatagtcatgaggcacctagtctggcccttttgcaagactttaatctgaaatctaaatttttaaaatttaagtacttacaaaggatatactatccaacatattgcatattatatatgtgctttaaagttttttttttttttgagagacggtctcactttgtcatccaagctggagtgcagtggtgcaaacacggmccacctcctgggctcaagtgatcctccagcctcagcttccctcacaggcattcactatcactcccagctaattaaaataatttgtagacggtgtctcgttatgttgcccaggctggctggtctcgaactcctgacctcaggtcatccacccacctcagcctcgcaaagtgctgagattacaggcatgagccacagcgcccagcttaaactattttcttggtctgtttttgattttcttttttccttgccactgcggtacagattttttttactcactgccactaaactaaagcaaggcatagtttatatgtgaagtgttcagagtttactgctataaggaaacttccaaatactgacattyaccttttagctgtagttattgggaccatgtgytctggttttctggagactgccaaattgctcccatttttctgcatcccacctggtttctttctgcatgtcccctttcactttcaaacctcttcatttggatgttaaattatatggtcacctagttataggtaagccttgttcgagttgatatcttgattgtgaggaaggatctgtgtcattggagcttgtttctgctgcaacgtgctgtagactatgaataatgaaatcacaccacattaccatcagatttcttgttttagttgtcaaattaatatttatgattgttatcttgggcgaaaagttcagagcagagatgacaaatcattagaacaacgatgaatttcagtattacggctaaaaagttcttctgtctgaatattaactcactctccttccagtgtacttcacagtaattggtatgcttttttatttaatgcttaaatcaaactttataaaaatcttagaccagatctttaatatggtatgccatttccccagtctaccaatggaatagtatgggtttctaatcctaggcttgtacaatggattggagttgagccatgccagcctccacactgccactaacttctgtaatgtaagattgagtcactgccaagcatttgaaatatgcagttgtgttttaattataatttatgtatagttagatgtatgtagtgcattgtgtggtattayttggtttgtaagaatttatttttaagggtcaaggtcatttgtaacattttgtgtgtgtcaattcaatgcaatgttggctgccttttgaagtctttgatatattggtgaatattcttctgatctataatacaaagctatgtaatgttacctcttgactcgcttttgaaaggaagacaattgttaactagatatttgagttttttcccctcagaattatgtgaatttctgatatatggctttagatactgtgaatctgttttccatttagtcagttatctgcttaaattgttcagaactatatcctaacgagcaattagttctgatggttctcccagtcatgagtgtgcatgtgtgcaagcatgttttgatcctgatgctacctttgctaaaaatggccatagattaggaactagctatgtttttagaatcaaagatgaaccggtaagctgtctcatgtaccaaacgtgaaatttacagtgtttacaaatgtctggaattttgcactgccatagggaatgttaaggttacttggctggaatttatcagacttgtgagtaaacaagttgaagtttagcagatgagggggaatattgaggcccctaaggctaaacaaaataatcagtatctgagatagtggctaatgtggctccccaggcctaatttgggaacagtttttcctgattgctttgagaagtactttcttttgacagaaattttcattctgcttgccattgctatattctccctttataggagccattggatttctttccttttgtgggaaatgtcccattagcattttcagatcttttgatgtgcactaatgccattattggtaatgccgttattggtgaatacagcatagttaaataaactgttacagtaaatctacacttggatttgctgcacctctaccaatagccttttgaatgactgaaagtgttaacagagaaagaggcatgtctgcagaaagagatagctaatattttttggtactttatctgaaatccaagatgctgcttcccctgcaggttgttttccttcttacgatcctcattgaatcccctctgggagcacaggacagttagtagaactctccatttctttttttttttttttagacggagtctctctctgtcgccccggctggagtgcagtggcgcgatctcggctcactgcaacctccgcctcccgggttcaccccatt

SEQ ID NO: 482 - DNA, 3969 bp, Homo sapiens
cgtgtgggaggccggaagttgcggcttcattactcgccatttcaaaatgctgccgaggccctaggatctgtgactgccacccctccccccacccgggctcggcgggggagcgactcatggagctgccgtaagttttaccaacagactgcagtttcttcactaccaaaatgacatcattttccacctctrctcagtgttcaacatctgacagtgcttgcaggatctctcctggacaaatcaatcaggtacgaccaaaactgccgcttttgaagattttgcatgcagcaggtgcgcaaggtgaaatgttcactgttaaagaggtcatgcactatttaggtcagtacataatggtgaagcaactttatgatcagcaggagcagcatatggtatattgtggtggagatcttttgggagaactactgggacgtcagagcttctccgtgaaagacccaagccctctctatgatatgctaagaaagaatcttgtcactttagccactgctactacagatgctgctcagactctcgctctcgcacaggatcacagtatggatattccaagtcaagaccaactgaagcaaagtgcagaggaaagttccacttccagaaaaagaactacagaagacgatatccccacactgcctacctcagagcataaatgcatacattctagagaagatgaagacttaattgaaaatttagcccaagatgaaacatctaggctggaccttggatttgaggagtgggatgtagctggcctgccttggtggtttttaggaaacttgagaagcaactatacacctagaagtaatggctcaactgatttacagacaaatcaggatgtgggtactgccattgtttcagatactacagatgacttgtggtttttgaatgagtcagtatcagagcagttaggtgttggaataaaagttgaagctgctgatactgaacaaacaagtgaagaagtagggaaagtaagtgacaaaaaggtgattgaagtgggaaamaatgatgacctggaggactctaagtccttaagtgatgataccgatgtagaggttacctctgaggatgagtggcagtgtactgaatgcaagaaatttaactctccaagcaagaggtactgttttcgttgttgggccttgaggaaggattggtattcagattgttcaaagttaacccattctctctccacgtctgatatcactgccatacctgaaaaggaaaatgaaggaaatgatgtccctgattgtcgaagaaccatttcggctcctgtcgttagacctaaagatgcgtatataaagaaagaaaactccaaactttttgatccctgcaactcagtggaattcttggatttggctcacagttctgaaagccaagagaccatctcaagcatgggagaacagttagataacctttctgaacagagaacagatacagaaaacatggaggattgccagaatctcttgaagccatgtagcttatgtgagaaaagaccacgagacgggaacattattcatggaaggacgggccatcttgtcacttgttttcactgtgccagaagactaaagaaggstggggcttcatgccctatttgcaagaaagagattcagctggttattaaggtttttatagcataatggtagtacgaacwtaaaaatgcatttattcmgttcacttaccacattatttgaaaatcaatcctttatttaattttatttccaacctgtcagagaatgttcttaggcatcaaaatccaaggtagctgtaagaaaaatactggagctaacaatgaagaacagaagtaatctgattagtcaaattattaagtgccatggattactttatgcagcagtcaggtacatagttaggtgaacccaaaagaaaaactcttgaaaacaagagatttcttccatgcacatttacaatattgaggtataattaacatgataaagtgtttccttctaacgagttgtagaaatctgagtaaccacccaaaaaagcaatagaatgtttctgtcaccccaaaacactcccttctgcccctcttcagacagtccttcagctatttcatggctctcaccctagttttttttttttttgcacttttttttttccgggggtataggggaggtgtggggcgacagggtctgtcttgttctgtctcccaggctgaagtgcagtgcagtggtatgatcatggctcactgcagccttggtttcctgggcataagtggtcttcccacttcagcctcctgagtagctgagactatagactagcataaccacactggctaattttttgtggagatgaagtctcactatgttgcccaggctggtctcgaactcctgggctcaaacaatcctcccgcctcagccttccaaattgctgggattatagtcatgaggcacctagtctggcccttttgcaagactttaatctgaaatctaaatttttaaaatttaagtacttacaaaggatatactatccaacatattgcatattatatatgtgctttaaagttttttttttttttgagagacggtctcactttgtcatccaagctggagtgcagtggtgcaaacacggmccacctcctgggctcaagtgatcctccagcctcagcttccctcacaggcattcactatcactcccagctaattaaaataatttgtagacggtgtctcgttatgttgcccaggctggtctcgaactcctgggtttaagtgattcccccgcctcagcctcccaaagtgttgggcttacagccttgagccactatgcttggctcaaagatatttttatgaaagccctgggactatagatttagctgattaaatttatagaaaaagtcctgtcatataaactggcaaagtctgttcttaatttaattagccaaatcagacttaacttccgtcagaacatgtcttggttttaattcagataaacacacaaacatacttctctggcacagccttcagaagcatcagtttttgttttgttttgttttgttttttgagacagggtcttgctctgtcgcccaggctggagtgcactggcacaatcacagttcactgcagcctcgacctcccagatccaagcaatcctcccacctaagcctcccaagtagctgggtctataggcgcgtgccaccaccatgcccagctgaattttgtattttttgtacagacagcattttgccatgttgcccaggctggtcccaaacttctagcctcaagcaaccctcctgcctcagcctctcaaagtgctaggattgcagtcctgagctactgccccctaccctctttgcgtcttaggagtcatttagattttttttgatccttttgtttagtgcctctggagctgcttacaccaaggcaatacgccttgatatactggatggttgagaggcagcctctttttttttttttttttttttttttttttggaggatagggagtatggctgttgtgaaaagggaggtaaagagaaatggtagatctgaagaggcctcatcagagcacatattttaggacaacacatatggaaattggacatctttaagttggtttccatagagctatgcatgtatccttacccccatgggaaaatgttggtgtgttctcaagggtatgcatgtgtcattttgaagaccaaggccctagaattgtcaaacttaaggatcataaaaatcatgagggttgcttgttaaaaatgtccaaacgtgcagagactgatctttgagatctggaccaggaatttgcatttgaacaagtgttcctggaatctctatgcaagttttatacagaacatacttttggaatccttgccctagacaggggtgtccaatcttttggcttccctggtccacaatggaagaagaattgtcttggaccacacataaaatacactaacactaacaatagctgatgagctaaaaaaaaaaaaaaaaaaaatcgtggaccgggc

SEQ ID NO: 483 - DNA, 1617 bp, Homo sapiens
ctcgtgttgccgctgggtacgtttgctgccagtgctgatccagccggaggcgaagagaagcactttgggggcaaaagaatcttctgatggcatgctaacaattgtagatggcaactgtgttggaaactaggggatcccatctgagttggtcaaagtctgccaaaaagaaaaaagaaaaccaatatttaagagaagagaaaaatgaagacgggacattttgaaatagtcaccatgctgctggcaaccatgattctagtggacattttccaggtgaaggctgaagtgttagacatggcagataatgcatttgatgatgaatacctgaaatgtacggacaggatggaaattaaatacgttccccaactgctaaaggaggaaaaagcaagccaccagcaattagatactgtgtgggaaaatgcaaaagccaaatgggcagcccgaaagactcaaatctttctccctatgaattttaaggataaccatggaatagccctgatggcatatayttccgaagctcaagagcaaactcccttttaccatctgttcagtgaagctgtgaagatggctggccaatctcgagaagattatatctatggcttccagttcaaagctttccacttttacctcacaagagccctgcagttgctgagaaaaccttgtgaggccagttccaaaactgtggtatatagaacaagccagggcacttcatttacatttggagggctaaaccaagccaggtttggccattttaccttggcatattcagccaaacctcaggctgctaatgaccagctcactgtgttatccatctacacatgccttggagttgacattgaaaattttcttgataaagaaagtgaaagaattactttaatacctctgaatgaggtttttcaagtgtcacaggagggggctggcaataaccttatccttcaaagcataaacaagacctgcagccattatgagtgtgcatttctaggtggactaaaaaccgaaaactgtattgagaacctagaatattttcaacccatctatgtctacaaccctggtgagaaaaaccagaagcttgaagaccatagtgagaaaaactggaagcttgaagaccatggtgagaaaaaccagaagcttgaagaccatggtgtgaaaatccttgaacccacccaaatacctgaagataaaagtcaaggaaatatcaacaatcctactccaggtccagttcctgttccaggtcccaaaagccatccttctgcatcctygggcaaactgctgcttccacagtttgggatggtcatcattttaatcagtgtttctgctataaatctctttgttgctctgtagtttgatgcattgtttatctttcttattctttacttgaaataactatagrgatmcacaggagatcaaaaggaatgatgtattttttacgtgttggccaaagtcactggataaaatgagaattgtatatttgttattcattttgcaaattcagaaagttggtccagatatatgtcacagaacttttcacttgtatactactcttacaatggaaaaaaatcccgaaaactgtatacttctgattaaattcaataaaagattttgattagatatttcagaatt

SEQ ID NO: 484 - DNA, 1497 bp, Homo sapiens
ccggaggtctcgacgctcgctcgtgctgctcgtgttgccgctgggtacgtttgctgccagtgctgatccagccggaggcgaagagaagcactttgggggcaaaagaagagaaaaatgaagacgggacattttgaaatagtcaccatgctgctggcaaccatgattctagtggacattttccaggtgaaggctgaagtgttagacatggcagataatgcatttgatgatgaatacctgaaatgtacggacaggatggaaattaaatacgttccccaactgctaaaggaggaaaaagcaagccaccagcaattagatactgtgtgggaaaatgcaaaagccaaatgggcagcccgaaagactcaaatctttctccctatgaattttaaggataaccatggaatagccctgatggcatatayttccgaagctcaagagcaaactcccttttaccatctgttcagtgaagctgtgaagatggctggccaatctcgagaagattatatctatggcttccagttcaaagctttccacttttacctcacaagagccctgcagttgctgagaaaaccttgtgaggccagttccaaaactgtggtatatagaacaagccagggcacttcatttacatttggagggctaaaccaagccaggtttggccattttaccttggcatattcagccaaacctcaggctgctaatgaccagctcactgtgttatccatctacacatgccttggagttgacattgaaaattttcttgataaagaaagtgaaagaattactttaatacctctgaatgaggtttttcaagtgtcacaggagggggctggcaataaccttatccttcaaagcataaacaagacctgcagccattatgagtgtgcatttctaggtggactaaaaaccgaaaactgtattgagaacctagaatattttcaacccatctatgtctacaaccctggtgagaaaaaccagaagcttgaagaccatagtgagaaaaactggaagcttgaagaccatggtgagaaaaaccagaagcttgaagaccatggtgtgaaaatccttgaacccacccaaatacctgctccaggtccagttcctgttccaggtcccaaaagccatccttctgcatcctygggcaaactgctgcttccacagtttgggatggtcatcattttaatcagtgtttctgctataaatctctttgttgctctgtagtttgatgcattgtttatctttcttattctttacttgaaataactatagrgatmcacaggagatcaaaaggaatgatgtattttttacgtgttggccaaagtcactggataaaatgagaattgtatatttgttattcattttgcaaattcagaaagttggtccagatatatgtcacagaacttttcacttgtatactactcttacaatggaaaaaaatcccgaaaactgtatacttctgattaaattcaataaaagattttgattagatatttcagaatt

SEQ ID NO: 485 - DNA, 1500 bp, Homo sapiens
gctctcactgtcaacaacatcccatcctgaagacttgcttaccacaactgagagtggggagtcagtttgaggcctagcatcacttaaacttcctccaaaggcacaaaagccagaaaaatgaagacgggacattttgaaatagtcaccatgctgctggcaaccatgattctagtggacattttccaggtgaaggctgaagtgttagacatggcagataatgcatttgatgatgaatacctgaaatgtacggacaggatggaaattaaatacgttccccaactgctaaaggaggaaaaagcaagccaccagcaattagatactgtgtgggaaaatgcaaaagccaaatgggcagcccgaaagactcaaatctttctccctatgaattttaaggataaccatggaatagccctgatggcatatayttccgaagctcaagagcaaactcccttttaccatctgttcagtgaagctgtgaagatggctggccaatctcgagaagattatatctatggcttccagttcaaagctttccacttttacctcacaagagccctgcagttgctgagaaaaccttgtgaggccagttccaaaactgtggtatatagaacaagccagggcacttcatttacatttggagggctaaaccaagccaggtttggccattttaccttggcatattcagccaaacctcaggctgctaatgaccagctcactgtgttatccatctacacatgccttggagttgacattgaaaattttcttgataaagaaagtgaaagaattactttaatacctctgaatgaggtttttcaagtgtcacaggagggggctggcaataaccttatccttcaaagcataaacaagacctgcagccattatgagtgtgcatttctaggtggactaaaaaccgaaaactgtattgagaacctagaatattttcaacccatctatgtctacaaccctggtgagaaaaaccagaagcttgaagaccatagtgagaaaaactggaagcttgaagaccatggtgagaaaaaccagaagcttgaagaccatggtgtgaaaatccttgaacccacccaaatacctgctccaggtccagttcctgttccaggtcccaaaagccatccttctgcatcctygggcaaactgctgcttccacagtttgggatggtcatcattttaatcagtgtttctgctataaatctctttgttgctctgtagtttgatgcattgtttatctttcttattctttacttgaaataactatagrgatmcacaggagatcaaaaggaatgatgtattttttacgtgttggccaaagtcactggataaaatgagaattgtatatttgttattcattttgcaaattcagaaagttggtccagatatatgtcacagaacttttcacttgtatactactcttacaatggaaaaaaatcccgaaaactgtatacttctgattaaattcaataaaagattttgattagatatttcagaatt

SEQ ID NO: 486 - DNA, 1538 bp, Homo sapiens
gctctcactgtcaacaacatcccatcctgaagacttgcttaccacaactgagagtggggagtcagtttgaggcctagcatcacttaaacttcctccaaaggcacaaaagccagaagagaaaaatgaagacgggacattttgaaatagtcaccatgctgctggcaaccatgattctagtggacattttccaggtgaaggctgaagtgttagacatggcagataatgcatttgatgatgaatacctgaaatgtacggacaggatggaaattaaatacgttccccaactgctaaaggaggaaaaagcaagccaccagcaattagatactgtgtgggaaaatgcaaaagccaaatgggcagcccgaaagactcaaatctttctccctatgaattttaaggataaccatggaatagccctgatggcatatayttccgaagctcaagagcaaactcccttttaccatctgttcagtgaagctgtgaagatggctggccaatctcgagaagattatatctatggcttccagttcaaagctttccacttttacctcacaagagccctgcagttgctgagaaaaccttgtgaggccagttccaaaactgtggtatatagaacaagccagggcacttcatttacatttggagggctaaaccaagccaggtttggccattttaccttggcatattcagccaaacctcaggctgctaatgaccagctcactgtgttatccatctacacatgccttggagttgacattgaaaattttcttgataaagaaagtgaaagaattactttaatacctctgaatgaggtttttcaagtgtcacaggagggggctggcaataaccttatccttcaaagcataaacaagacctgcagccattatgagtgtgcatttctaggtggactaaaaaccgaaaactgtattgagaacctagaatattttcaacccatctatgtctacaaccctggtgagaaaaaccagaagcttgaagaccatagtgagaaaaactggaagcttgaagaccatggtgagaaaaaccagaagcttgaagaccatggtgtgaaaatccttgaacccacccaaatacctgaagataaaagtcaaggaaatatcaacaatcctactccaggtccagttcctgttccaggtcccaaaagccatccttctgcatcctygggcaaactgctgcttccacagtttgggatggtcatcattttaatcagtgtttctgctataaatctctttgttgctctgtagtttgatgcattgtttatctttcttattctttacttgaaataactatagrgatmcacaggagatcaaaaggaatgatgtattttttacgtgttggccaaagtcactggataaaatgagaattgtatatttgttattcattttgcaaattcagaaagttggtccagatatatgtcacagaacttttcacttgtatactactcttacaatggaaaaaaatcccgaaaactgtatacttctgattaaattcaataaaagattttgattagatatttcagaatt

SEQ ID NO: 487 - DNA, 1650 bp, Homo sapiens
ctcgtgttgccgctgggtacgtttgctgccagtgctgatccagccggaggcgaagagaagcactttgggggcaaaagaatcttctgatggcatgctaacaattgtagatggcaactgtgttggaaactaggggatcccatctgagttggtcaaagtctgccaaaaagaaaaaagaaaaccaatatttaagagaagagaaaaatgaagacgggacattttgaaatagtcaccatgctgctggcaaccatgattctagtggacattttccaggtgaaggctgaagtgttagacatggcagataatgcatttgatgatgaatacctgaaatgtacggacaggatggaaattaaatacgttccccaactgctaaaggaggaaaaagcaagccaccagcaattagatactgtgtgggaaaatgcaaaagccaaatgggcagcccgaaagactcaaatctttctccctatgaattttaaggataaccatggaatagccctgatggcatatayttccgaagctcaagagcaaactcccttttaccatctgttcagtgaagctgtgaagatggctggccaatctcgagaagattatatctatggcttccagttcaaagctttccacttttacctcacaagagccctgcagttgctgagaaaaccttgtgaggccagttccaaaactgtggtatatagaacaagccagggcacttcatttacatttggagggctaaaccaagccaggtttggccattttaccttggcatattcagccaaacctcaggctgctaatgaccagctcactgtgttatccatctacacatgccttggagttgacattgaaaattttcttgataaagaaagtgaaagaattactttaatacctctgaatgaggtttttcaagtgtcacaggagggggctggcaataaccttatccttcaaagcataaacaagacctgcagccattatgagtgtgcatttctaggtggactaaaaaccgaaaactgtattgagaacctagaatattttcaacccatctatgtctacaaccctggtgagaaaaaccagaagcttgaagaccatagtgagaaaaactggaagcttgaagaccatggtgagaaaaaccagaagcttgaagaccatggtgtgaaaatccttgaacccacccaaatacctggaatgaaaattccagaaccttttccactacctgaagataaaagtcaaggaaatatcaacaatcctactccaggtccagttcctgttccaggtcccaaaagccatccttctgcatcctygggcaaactgctgcttccacagtttgggatggtcatcattttaatcagtgtttctgctataaatctctttgttgctctgtagtttgatgcattgtttatctttcttattctttacttgaaataactatagrgatmcacaggagatcaaaaggaatgatgtattttttacgtgttggccaaagtcactggataaaatgagaattgtatatttgttattcattttgcaaattcagaaagttggtccagatatatgtcacagaacttttcacttgtatactactcttacaatggaaaaaaatcccgaaaactgtatacttctgattaaattcaataaaagattttgattagatatttcagaatt

SEQ ID NO: 488 - DNA, 1584 bp, Homo sapiens
ctcgtgttgccgctgggtacgtttgctgccagtgctgatccagccggaggcgaagagaagcactttgggggcaaaagaatcttctgatggcatgctaacaattgtagatggcaactgtgttggaaactaggggatcccatctgagttggtcaaagtctgccaaaaagaaaaaagaaaaccaatatttaagagaagagaaaaatgaagacgggacattttgaaatagtcaccatgctgctggcaaccatgattctagtggacattttccaggtgaaggctgaagtgttagacatggcagataatgcatttgatgatgaatacctgaaatgtacggacaggatggaaattaaatacgttccccaactgctaaaggaggaaaaagcaagccaccagcaattagatactgtgtgggaaaatgcaaaagccaaatgggcagcccgaaagactcaaatctttctccctatgaattttaaggataaccatggaatagccctgatggcatatayttccgaagctcaagagcaaactcccttttaccatctgttcagtgaagctgtgaagatggctggccaatctcgagaagattatatctatggcttccagttcaaagctttccacttttacctcacaagagccctgcagttgctgagaaaaccttgtgaggccagttccaaaactgtggtatatagaacaagccagggcacttcatttacatttggagggctaaaccaagccaggtttggccattttaccttggcatattcagccaaacctcaggctgctaatgaccagctcactgtgttatccatctacacatgccttggagttgacattgaaaattttcttgataaagaaagtgaaagaattactttaatacctctgaatgaggtttttcaagtgtcacaggagggggctggcaataaccttatccttcaaagcataaacaagacctgcagccattatgagtgtgcatttctaggtggactaaaaaccgaaaactgtattgagaacctagaatattttcaacccatctatgtctacaaccctggtgagaaaaaccagaagcttgaagaccatagtgagaaaaactggaagcttgaagaccatggtgagaaaaaccagaagcttgaagaccatggtgtgaaaatccttgaacccacccaaatacctgctccaggtccagttcctgttccaggtcccaaaagccatccttctgcatcctygggcaaactgctgcttccacagtttgggatggtcatcattttaatcagtgtttctgctataaatctctttgttgctctgtagtttgatgcattgtttatctttcttattctttacttgaaataactatagrgatmcacaggagatcaaaaggaatgatgtattttttacgtgttggccaaagtcactggataaaatgagaattgtatatttgttattcattttgcaaattcagaaagttggtccagatatatgtcacagaacttttcacttgtatactactcttacaatggaaaaaaatcccgaaaactgtatacttctgattaaattcaataaaagattttgattagatatttcagaatt

SEQ ID NO: 489 - DNA, 697 bp, Homo sapiens
gctctcactgtcaacaacatcccatcctgaagacttgcttaccacaactgagagtggggagtcagtttgaggcctagcatcacttaaacttcctccaaaggcacaaaagccagaagagaaaaatgaagacgggacattttgaaatagtcaccatgctgctggcaaccatgattctagtggacattttccaggtgagaaaaactggaagcttgaagaccatggtgagaaaaaccagaagcttgaagaccatggtgtgaaaatccttgaacccacccaaatacctgctccaggtccagttcctgttccaggtcccaaaagccatccttctgcatcctygggcaaactgctgcttccacagtttgggatggtcatcattttaatcagtgtttctgctataaatctctttgttgctctgtagtttgatgcattgtttatctttcttattctttacttgaaataactatagrgatmcacaggagatcaaaaggaatgatgtattttttacgtgttggccaaagtcactggataaaatgagaattgtatatttgttattcattttgcaaattcagaaagttggtccagatatatgtcacagaacttttcacttgtatactactcttacaatggaaaaaaatcccgaaaactgtatacttctgattaaattcaataaaagattttgattagatatttcagaatt

SEQ ID NO: 490 - DNA, 2102 bp, Homo sapiens
tgcccagctgctaggacagtttgcagagcagtggcgtgcggagcggcggcggaccacctccaggggctaagtgatggatcttgtactccgtgttgcagattactatttttttacaccatacgtgtatccagccacatggccagaagatgacatcttccgacaagctattagtcttctgattgtaacaaatgttggtgcttacatcctttatttcttctgtgcaacactgagctattattttgtcttcgatcatgcattaatgaaacatccacaatttttaaagaatcaagtccgtcgagagattaagtttactgtccaggcattgccatggataagtattcttactgttgcactgttcttgctggagataagaggttacagcaaattacatgatgacctaggagagtttccatatggattgtttgaacttgtcrttagtataatatctttcctctttttcactgacatgttcatctactggattcacagaggccttcatcatagactggtatataagcgcctacataaacctcaccatatttggaagattcctactccatttgcaagtcatgcttttcaccctattgatggctttcttcagagtctaccttaccatatatacccttttatctttccattacacaaggtggtttatttaagtctgtacatcttggttaatatctggacaatttccattcatgacggtgattttcgtgtcccccaaatcttacagccatttattaatggctcagctcatcatacagaccaccatatgttctttgactataattatggacaatatttcactttgtgggataggattggcggctcattcaaaaatccttcatcctttgaggggaagggaccgctcagttatgtgaaggagatgacagagggaaagcrcagcagccattcaggaaatggctgtaagaatgaaaaattattcaatggagagtttacaaagactgaatagattattgcccagttattcttaagtaaggacaaagaaggaaatatcatcgtatttcttttttttaataaggaaaaaataatmtccatacagtcaagatacatagtaaatggtatcatttggaaatcagcatcgtgggcactgctgaggaatgatcctagtggtaggtcagaagaagatgctgtgaacaccaggactttaatcttatgcttaaaatgccagatgttgttcgggggacaacttgtatctttctagcagcagatctgtagtttgtatagcctcaacaacaattttaaataagatggagaataaattattgaggggactaggctatatgcatttgccttcatccacccatgtttattaagaatcattgtgcttaataataccaagactaagcaccataaccaagaaatactaatgtaaagattgtttcttgtttcaggaatggttaattcttcaacgttggtatgataatgataacttgttttgacttgaataaagtactacatcagtgtggaaaaaaattctgatacattagcagctatgtaaatgacctaattgatagcaggtgtaataagactatcgtcttcctacacataggaggctcattctctggacacactatcacctattacattttactgattaacaaataaattggaatttaaaaatatcgatatcaccatgatttaatccagatctgggattatgtagctaaacattgtgatgattattatttaaaaccattatttaataagagtaaraatatgtgaatctggatatatttaaaaaaagaaatttgatgcccagataatatattaggcactactgattttttagttaaattgatgcactacacttttgatgtttgaagttacaaacctgtaatttttttgtaaaggaaataattgccaaatacctaggcccattgctgacgattagttctaaaatcttattcctcctcttctcccctcacttttccctacttcctctgcaaaaagatttaacaaatacattcataaggaaatgtgtgttgtaacaaatatattgcaaaaacatagtttgtaaaggcattctataagctatttatgtaaaatcaataaaagttgatcataattaaactgtatca

SEQ ID NO: 491 - DNA, 772 bp, Homo sapiens
tgcccagctgctaggacagtttgcagagcagtggcgtgcggagcggcggcggaccacctccaggggctaagtgatggatcttgtactccgtgttgcagattactatttttttacaccatacgtgtatccagccacatggccagaagatgacatcttccgacaagctattagtcttctgattgtaacaaatgttggtgcttacatcctttatttcttctgtgcaacactgagctattattttgtcttcgatcatgcattaatgaaacatccacaatttttaaagaatcaagtccgtcgagagattaagtttactgtccaggcattgccatggataagtattcttactgttgcactgttcttgctggagataagaggttacagcaaattacatgatgacctaggagagtttccatatggattgtttgaacttgtcrttagtataatatctttcctctttttcactgacatgttcatctactggattcacagaggccttcatcatagactggtatataaggtaaagtcatttgtggtgaaaagagaaaaaaggttacacatttcagcaatgtatgattataaattctgttctctatttccaagaatttcctctacccatattaaatgtctaagtagccataatcataacaggtacagggtgcattttgttcatattcttctttatgggtctaaggggctgtcttaaaattcgtctgttccggtaacaggtacacatggacttacagagggaacaatagacattagagactccaga

SEQ ID NO: 492 - DNA, 2250 bp, Homo sapiens
gggccggggggcgatggaataaaagaagatggagagacttcagcgcctgggactcgggtgggcgaggcggaaggtgtcctcgcagcacggcttttctccgcgccgcggttggttagcgagtgccctctgggtgctaggcgttgggcggatggtaggatcgcggtagcatacggatccgagtcctgcgccgagtgagaggagaggctggcaggggctaagtgatggatcttgtactccgtgttgcagattactatttttttacaccatacgtgtatccagccacatggccagaagatgacatcttccgacaagctattagtcttctgattgtaacaaatgttggtgcttacatcctttatttcttctgtgcaacactgagctattattttgtcttcgatcatgcattaatgaaacatccacaatttttaaagaatcaagtccgtcgagagattaagtttactgtccaggcattgccatggataagtattcttactgttgcactgttcttgctggagataagaggttacagcaaattacatgatgacctaggagagtttccatatggattgtttgaacttgtcrttagtataatatctttcctctttttcactgacatgttcatctactggattcacagaggccttcatcatagactggtatataagcgcctacataaacctcaccatatttggaagattcctactccatttgcaagtcatgcttttcaccctattgatggctttcttcagagtctaccttaccatatatacccttttatctttccattacacaaggtggtttatttaagtctgtacatcttggttaatatctggacaatttccattcatgacggtgattttcgtgtcccccaaatcttacagccatttattaatggctcagctcatcatacagaccaccatatgttctttgactataattatggacaatatttcactttgtgggataggattggcggctcattcaaaaatccttcatcctttgaggggaagggaccgctcagttatgtgaaggagatgacagagggaaagcrcagcagccattcaggaaatggctgtaagaatgaaaaattattcaatggagagtttacaaagactgaatagattattgcccagttattcttaagtaaggacaaagaaggaaatatcatcgtatttcttttttttaataaggaaaaaataatmtccatacagtcaagatacatagtaaatggtatcatttggaaatcagcatcgtgggcactgctgaggaatgatcctagtggtaggtcagaagaagatgctgtgaacaccaggactttaatcttatgcttaaaatgccagatgttgttcgggggacaacttgtatctttctagcagcagatctgtagtttgtatagcctcaacaacaattttaaataagatggagaataaattattgaggggactaggctatatgcatttgccttcatccacccatgtttattaagaatcattgtgcttaataataccaagactaagcaccataaccaagaaatactaatgtaaagattgtttcttgtttcaggaatggttaattcttcaacgttggtatgataatgataacttgttttgacttgaataaagtactacatcagtgtggaaaaaaattctgatacattagcagctatgtaaatgacctaattgatagcaggtgtaataagactatcgtcttcctacacataggaggctcattctctggacacactatcacctattacattttactgattaacaaataaattggaatttaaaaatatcgatatcaccatgatttaatccagatctgggattatgtagctaaacattgtgatgattattatttaaaaccattatttaataagagtaaraatatgtgaatctggatatatttaaaaaaagaaatttgatgcccagataatatattaggcactactgattttttagttaaattgatgcactacacttttgatgtttgaagttacaaacctgtaatttttttgtaaaggaaataattgccaaatacctaggcccattgctgacgattagttctaaaatcttattcctcctcttctcccctcacttttccctacttcctctgcaaaaagatttaacaaatacattcataaggaaatgtgtgttgtaacaaatatattgcaaaaacatagtttgtaaaggcattctataagctatttatgtaaaatcaataaaagttgatcataattaaactgtatca

SEQ ID NO: 493 - DNA, 1633 bp, Homo sapiens
tgcccagctgctaggacagtttgcagagcagtggcgtgcggagcggcggcggaccacctccaggggctaagtgatggatcttgtactccgtgttgcagattactatttttttacaccatacgtgtatccagccacatggccagaagatgacatcttccgacaagctattagtcttctgattgtaacaaatgttggtgcttacatcctttatttcttctgtgcaacactgagctattattttgtcttcgatcatgcattaatgaaacatccacaatttttaaagaatcaagtccgtcgagagattaagtttactgtccaggcattgccatggataagtattcttactgttgcactgttcttgctggagataagaggttacagcaaattacatgatgacctaggagagtttccatatggtaagtaaataacacgagtgtcaggaagagagtagtctaagcacaggttagtttccttaaaaaaacaagtctgcccttttttttttcatcttttaaaataattacaaattattcagttgttttttaatgttctattttcatgtgttcaygtcttgccacatgtgcatttctttagtttttctatcaatctgaaagtctgctgtagatgagattgtgtctggcggaagattggagtgatcagagatgggtccttgcatttgttttctattaattattgaattcaaccttctaaaaaaaacttgagtagcttatgtcattgctgaaagttaaaaacagatttttaaaatgcattattctgcttcttagaaactgtaactcttctggcatacaaccacccacttttctgtgcctgtatacttcattgtttacattacacaaatgaagtcctgaggtgcatagtggtttgggctctgaattttgtttctcttagcaacttacatggttgtattttcatgtcaaaaaaatcttgagattatgtaatatattagtcatagtactgtgcggatattcataagttatgtaaatgatacctaattgttagaccttcagattgttactcttttttgtattataaacagccctgtagtgagtaaacttttgtgaaattctgaaactttttcaagatacatttctaggatctagtatgtaaaaagcaagaatcatagtatttattgaaggctgatatgtgtcagtgacagttctcagctcttcacaagaatcagtccattgttttcctacaattctatgagataggtactatcactgtgctccttttataggtgagtcaatgaggtgtacagagagtttcagtaacgagttggtggtagatctgagacttggactcaggcttgcaggcaccagcacccccacactttaagtaagaagttagttattgccgggcgcggtggctcaatcctgtaatcccagcactttgggagaccgaggtaggaggatcacgaggtcaggagtatgagaccatcctggccaacatggtgaaaccccatctctactaaaatacaaaaaattagcggggtgtggtggtgcacacctgtagtcccagctactcaggagggtgaggcaggagaatcccttgaacctgggaggcagagattgcgccactgcactccagcctgggygacagagcgagactccgtctc

SEQ ID NO: 494 - DNA, 1249 bp, Homo sapiens
aggggacgcgcgcagatgacgtgcggctcgtggggcagctcggcagcatggcgtccgtgacgctgagcgaggcggagaaggtgtacatcgtgcatggcgtccaggaagacctccgtgtggatggccgtggctgtgaggactaccgatgtgtcgaagtggaaactgatgtggtgtccaacactagtgggtccgccagggtcaagctgggtcacacagacatcttggtgggagtgaaagcagaaatggggacgccgaagctggagaaaccaaatgaaggctacttggagttctttgttgactgttcagccagtgctacccctgaatttgaaggtagaggaggtgatgaccttggcaccgagatcgctaacaccctctatcggatatttaacaataaaagcagtgtcgacttaaagaccctctgcattagtcctcgggagcactgctgggttctctatgtggatgtgctgcttctggaatgtggtggaaatttgtttgatgccatttccattgctgtaaaggctgctctcttcaayacaaggataccaagggttcragttttggaggatgaagaggggtcgaaggacattgaattgtcagatgacccttatgactgcatacgactaagtgtggagaatgtcccctgcattgtcactctgtgcaagattggctatcggcatgtggtggatgctactcttcaggaggaggcctgctcgctggccagcttgctggtgtcggtgaccagcaagggagttgtgacgtgcatgaggaaagtggggaagggcascctggacccagagagcatcttcgagatgatggagactggcaagcgtgtgggcaaggtactgcatgcctccttgcagagtgttstgcacaaggaagaaagcctggggcccaagagacagaaagttggattcctgggatgatttgcacatcaactgctcaactgtggattgttttttacttttccttttaaaccggggaactgaaactcctaaatcttaaaacaccctggggaaggagctgattcacgaaggagagcgtttcaaccgtggcatttgctctctgcattccagttagcaaatgggtgactatctacaggcaccatgacagtgttcccaacaaggcagaaatcagcctggtctctccttccctgctcctggttgactgcccgtgacatgacaaaacattggcagtggtggcgcagagatgcaactcgagtgtgaataaagtttagaagcatttgcttttg

SEQ ID NO: 495 - DNA, 1472 bp, Homo sapiens
aggggacgcgcgcagatgacgtgcggctcgtggggcagctcggcagcatggcgtccgtgacgctgagcgaggcggagaaggtgtacatcgtgcatggcgtccaggaagacctccgtgtggatggccgtggctgtgaggactaccgatgtgtcgaagtggaaactgatgtggtgtccaacactagtgggtccgccagggtcaagctgggtcacacagacatcttggtgggagtgaaagcagaaatggggacgccgaagctggagaaaccaaatgaaggctacttggagttctttgttgactgttcagccagtgctacccctgaatttgaaggtagaggaggtgatgaccttggcaccgagatcgctaacaccctctatcggatatttaacaataaaagcagtgtcgacttaaagaccctctgcattagtcctcgggagcactgctgggttctctatgtggatgtgctgcttctggaatgtggtggaaatttgtttgatgccatttccattgctgtaaaggctgctctcttcaayacaaggataccaagggttcragttttggaggatgaagaggggtcgaaggacattgaattgtcagatgacccttatgactgcatacgactaagtgtggagaatgtcccctgcattgtcactctgtgcaagattggctatcggcatgtggtggatgctactcttcaggaggaggcctgctcgctggccagcttgctggtgtcggtgaccagcaagggagttgtgacgtgcatgaggaaagtggggaagggcascctggacccagagagcatcttcgagatgatggagactggcaagcgtgtgggcaaggtactgcatgcctccttgcagagtgttstgcacaaggaagaaagcctggggcccaagagacagaaagttggattcctgggatgatttgcacatcaactgctcaactgtggattgttttttacttttccttttaaaccggggaactgaaactcctaaatcttaaaacaccctggggaaggagctgattcacgaaggagagcgtttcaaccgtggcatttgctctctgcattccagttagcaaatggggtaaggcgttaggaatttatcaccaaatggaaagaacataatgtgagctgaagcccttgggactgcttccagaggtcctggtgtgggcgttcctcccagcaaggccaggtccatccctgtggagagaagcagctgcctagacttgggcttaatgggggagcttctgccctgttgagagcatagcctgggttttcatcttttatgtttcttcagtgactatctacaggcaccatgacagtgttcccaacaaggcagaaatcagcctggtctctccttccctgctcctggttgactgcccgtgacatgacaaaacattggcagtggtggcgcagagatgcaactcgagtgtgaataaagtttagaagcatttgcttttgatggttgatt

SEQ ID NO: 496 - DNA, 1423 bp, Homo sapiens
gaattaccaagctgtctccccagctgtatttccaaaatgtcgctttctaacaagctgatgctggacaagctggacgtgaaagggaagccggtcgttatgagagtcgacttcaattttcctatgaagaacaaccaggtaacaaacaactggaggattaaggctgctgtcccaagcatcaaattctgcttggacaatggatccaagtcagtagtccttataagccacctaggttggcctgatggtgtccctatgcctgacaagtactcctcagagccagttgctgtagaactcaaatctctgctgggcaaggatgttctgttcttgaaggactgtgtaggcccagaagtggagaaagcctgtaccaacccagctgctgggtctgtcatcctgcgggagaacctccgctttcatgtggaggaagagggaagggaaaagatgcttctgggaacaaggctaaygctgatccagccaaattagaagctttccaagcttcacttcccaagctaggggawgtctatgtcaatgatrcttttggcactgctcacagagcccacagctccatggcagaagtcaatctgccacagaaggctggtggttttttgatgaagaaggagctgaactactttgccgaggccttggagagcccagagcsacccttcctggccatcctgggcagaactaaagttgcagacaagatccagctgatcaagaayatgctgggcaaagtcaatgagatgattattggtagtggaatggcttgtaccttccttaaggtgctcagcaacatggagrytggcacttctctgtttgatgaagagggagccaagactgtcaaagacctaatgtccaaagctgagaagaatggtgtgaagattatcttgcctgttgwctttgtcactgctggcaagtttgatgagaataccaagactggccaagccactgtggcttctggcatacctgctggctggctgggcttggactgtggccctgaaagcagcaagaagtatgctgrggctgtcactcaggctaagcagattgtgtggaatggtcctgtggggggtttttgaatgggaagcttttgcccggggaaccaaagccctcatggatgaggtggtggagacactgccacttgctgtgtaraatggaacatggaggataaagtcagccaggtgagcactgggggtggtgccggtttagagctcctagaaggtaaagtccatcctggggttgatactcttggcaatatttagtactttcctgccttttagttcctgtgcacagcccctaagtcaacttagcattttctgcatctccacttggcattagctaaaactttccatgtcaagattcagctagtggccaagagatgcagtgccrggaacccttaaatggttacacagaatctcagctcatctctactgca

SEQ ID NO: 497 - DNA, 2225 bp, Homo sapiens
agcggcggcctcagctgccggcggtggctggctgagctccccagcggcccgcgggccggggcgggggcgggccgggggcgttcccgcgggccaccgcccgtgatgtcacaatcgcggcgggccgcggcgctccggggtcggcggtgggcggcgggccgcgagccggcgatcgaagcgggcagctcgcgcctgagtcatggacttcccctggcccctcctctaccactcccactccctcgccggacccccccgccggggctagcgtctgccgcggctccgagggggtggggctgctgggaatggctgtgcccccttcggcccctcagcmgcgcgcgtcctttcacctgaggaggcacacgccttgcccgcagtgctcatggggcatggaggagaaggcggcggccagcgccagctgccgggagccgccgggccccccgagggccgccgccgtcgcgtacttcggcatttccgtggacccggacgacatccttcccggggccctgcgcctcatccaggagctgcggccgcattggaaacccgagcaagttcggaccaagcgcttcacggatggcatcaccaacaagctggtggcctgctatgtggaggaggacatgcaggactgcgtgctggtccgggtgtatggggagcggacggagctgctggtggaccgggagaatgaggtcagaaacttccagctgctgcgagcacacagctgtgcccccaaactctactgcaccttccagaatgggctgtgctatgagtacatgcagggtgtggccctggagcctgagcacatccgtgagccccggcttttcaggttaatcgccttagaaatggcaaagattcatactatccacgccaasggcagcctgcccaagcccatcctctggcacaagatgcacaattatttcacgcttgtgaagaacgagatcaaccccagcctttctgcagatgtccctaaggtagaggtgttggaacrggagctggcctggctgaaggagcatctgtcccagctggagtcccctgtggtgttttgtcacaatgacctgctctgcaagaatatcatctatgacagcatcaaaggtcacgtgcggttcattgactatgaatatgctggctacaactaccaagcttttgacattggcaaccatttcaatgagtttgcaggcgtgaatgaggtggattactgcctgtacccggcgcgggagacccagctgcagtggctgcactactacctgcaggcacaaaaggggatggccgtgacccccagggaggtgcaaaggctctacgtgcaagtcaacaagtttgccctgggtcctagctgtgtgtcttccacaatgactgcatccctccagtgctgtagagtcggaaacaggcatggggasattgccaggctgaccctctctggtctgtttccaggcgtctcacttcttctgggctctctgggccctcatccagaaccagtactccaccatcgactttgatttcctcaggtacgcagtgatccgattcaaccagtacttcaaggtgaagcctcaagcgtcagccttggagatgccaaagtgaccagccaccccatccctcccctacccatctgtctggccagacctgttctccagagctcaattctgcactctgggatccacacccttggacagggtgggagaggggacacatgggtgtccagggagaaggctctgtccctgccgccagaccccagtggttgccactgaagacctcattctcctgtctggaggggctgataggacccccttccgggggtccccttcaccccaccaggcttgggaggaagtgcctgcagccaggtcctgaaccataaccacccctgggaaacacatcattcccagcctcaggccctgctggaattggggctgccttatatgtgtgtttaccccttcctggcctggggaaggaggcggggagggctcctttctacctccagtgccctgagcctccagtccgtctccccctgcatgccccatgtgggaggtgctgagctccaaaccagcatcacaccaactctgacacatggatgtacctatcttggtgatgggtgggggccaagaattgagcatgacatcttccccacctccacctccctttctaccctcacagctcctggggccttcctggctctggcccagaaagtgattcatttgtaaattatcatggttttctttctgcattaaaatgctcatttccgg

SEQ ID NO: 498 - DNA, 2688 bp, Homo sapiens
agcggcggcctcagctgccggcggtggctggctgagctccccagcggcccgcgggccggggcgggggcgggccgggggcgttcccgcgggccaccgcccgtgatgtcacaatcgcggcgggccgcggcgctccggggtcggcggtgggcggcgggccgcgagccggcgatcgaagcgggcagctcgcgcctgagtcatggacttcccctggcccctcctctaccactcccactccctcgccggacccccccgccggggctagcgtctgccgcggctccgagggggtggggctgctgggaatggctgtgcccccttcggcccctcagcmgcgcgcgtcctttcacctgaggaggcacacgccttgcccgcagtgctcatggggcatggaggagaaggcggcggccagcgccagctgccgggagccgccgggccccccgagggccgccgccgtcgcgtacttcggcatttccgtggacccggacgacatccttcccggggccctgcgcctcatccaggagctgcggccgcattggaaacccgagcaagttcggaccaagcgcttcacggatggcatcaccaacaagctggtggcctgctatgtggaggaggacatgcaggactgcgtgctggtccgggtgtatggggagcggacggagctgctggtggaccgggagaatgaggtcagaaacttccagctgctgcgagcacacagctgtgcccccaaactctactgcaccttccagaatgggctgtgctatgagtacatgcagggtgtggccctggagcctgagcacatccgtgagccccggcttttcaggttaatcgccttagaaatggcaaagattcatactatccacgccaasggcagcctgcccaagcccatcctctggcacaagatgcacaattatttcacgcttgtgaagaacgagatcaaccccagcctttctgcagatgtccctaaggtagaggtgttggaacrggagctggcctggctgaaggagcatctgtcccagctggagtcccctgtggtgttttgtcacaatgacctgctctgcaagaatatcatctatgacagcatcaaaggtcacgtgcggttcattgactatgaatatgctggctacaactaccaagcttttgacattggcaaccatttcaatgagtttgcaggcgtgaatgaggtggattactgcctgtacccggcgcgggagacccagctgcagtggctgcactactacctgcaggcacaaaaggggatggccgtgacccccagggaggtgcaaaggctctacgtgcaagtcaacaagtttgccctgggtcctagctgtgtgtcttccacaatgactgcatccctccagtgctgtagagtcggaaacaggcatggggasattgccaggctgaccctctctggtctgtttccaggcgtctcacttcttctgggctctctgggccctcatccagaaccagtactccaccatcgactttgatttcctcaggtacgcagtgatccgattcaaccagtacttcaaggtgaagcctcaagcgtcagccttggagatgccaaagtgaccagccaccccatccctcccctacccatctgtctggccagacctgttctccagagctcaattctgcactctgggatccacacccttggacagggtgggagaggggacacatgggtgtccagggagaaggctctgtccctgccgccagaccccagtggttgccactgaagacctcattctcctgtctggaggggctgataggacccccttccgggggtccccttcaccccaccaggcttgggaggaagtgcctgcagccaggtcctgaaccataaccacccctgggaaacacatcattcccagcctcaggccctgctggaattggggctgccttatatgtgtgtttaccccttcctggcctggggaaggaggcggggagggctcctttctacctccagtgccctgagcctccagtccgtctccccctgcatgccccatgtgggaggtgctgagctccaaaccagcatcacaccaactctgacacatggatgtacctatcttggtgatgggtgggggccaagaattgagcatgacatcttccccagcagccacctcctctgagatccctcaccttctccaaaccagatccaatcaaacctcagcccgaggaaacatgctccccaacgtgctctcctgtgcttctgttttgtccccctgctggggggacaggagagggagtggtgaggccctgggcctccagagcctggctctgctttgtgctgtggcttagccggaggggacgtggccaagggtgaggtggccaaaaccagaaccagcagtctcctgccttgttccctccctggccctcaggccctccttccagggatgtctctccagctctactttatgtcctgaagctgacccgaggtcttcctatctggaatgactagagggagccaagaggatggggtgggggccagggccccccagggcctatcgtgggagagcctgggcaggatcccatcagaaaggtgctgactaaactggttgcccggacactcaacagcctccacctccctttctaccctcacagctcctggggccttcctggctctggcccagaaagtgattcatttgtaaattatcatggttttctttctgcattaaaatgctcatttccgga

SEQ ID NO: 499 - DNA, 2119 bp, Homo sapiens
agcggcggcctcagctgccggcggtggctggctgagctccccagcggcccgcgggccggggcgggggcgggccgggggcgttcccgcgggccaccgcccgtgatgtcacaatcgcggcgggccgcggcgctccggggtcggcggtgggcggcgggccgcgagccggcgatcgaagcgggcagctcgcgcctgagtcatggacttcccctggcccctcctctaccactcccactccctcgccggacccccccgccggggctagcgtctgccgcggctccgagggggtggggctgctgggaatggctgtgcccccttcggcccctcagcmgcgcgcgtcctttcacctgaggaggcacacgccttgcccgcagtgctcatggggcatggaggagaaggcggcggccagcgccagctgccgggagccgccgggccccccgagggccgccgccgtcgcgtacttcggcatttccgtggacccggacgacatccttcccggggccctgcgcctcatccaggagctgcggccgcattggaaacccgagcaagttcggaccaagcgcttcacggatggcatcaccaacaagctggtggcctgctatgtggaggaggacatgcaggactgcgtgctggtccgggtgtatggggagcggacggagctgctggtggaccgggagaatgaggtcagaaacttccagctgctgcgagcacacagctgtgcccccaaactctactgcaccttccagaatgggctgtgctatgagtacatgcagggtgtggccctggagcctgagcacatccgtgagccccggcttttcaggttaatcgccttagaaatggcaaagattcatactatccacgccaasggcagcctgcccaagcccatcctctggcacaagatgcacaattatttcacgcttgtgaagaacgagatcaaccccagcctttctgcagatgtccctaaggtagaggtgttggaacrggagctggcctggctgaaggagcatctgtcccagctggagtcccctgtggtgttttgtcacaatgacctgctctgcaagaatatcatctatgacagcatcaaaggtcacgtgcggttcattgactatgaatatgctggctacaactaccaagcttttgacattggcaaccatttcaatgagtttgcaggcgtgaatgaggtggattactgcctgtacccggcgcgggagacccagctgcagtggctgcactactacctgcaggcacaaaaggggatggccgtgacccccagggaggtgcaaaggctctacgtgcaagtcaacaagtttgccctggcgtctcacttcttctgggctctctgggccctcatccagaaccagtactccaccatcgactttgatttcctcaggtacgcagtgatccgattcaaccagtacttcaaggtgaagcctcaagcgtcagccttggagatgccaaagtgaccagccaccccatccctcccctacccatctgtctggccagacctgttctccagagctcaattctgcactctgggatccacacccttggacagggtgggagaggggacacatgggtgtccagggagaaggctctgtccctgccgccagaccccagtggttgccactgaagacctcattctcctgtctggaggggctgataggacccccttccgggggtccccttcaccccaccaggcttgggaggaagtgcctgcagccaggtcctgaaccataaccacccctgggaaacacatcattcccagcctcaggccctgctggaattggggctgccttatatgtgtgtttaccccttcctggcctggggaaggaggcggggagggctcctttctacctccagtgccctgagcctccagtccgtctccccctgcatgccccatgtgggaggtgctgagctccaaaccagcatcacaccaactctgacacatggatgtacctatcttggtgatgggtgggggccaagaattgagcatgacatcttccccacctccacctccctttctaccctcacagctcctggggccttcctggctctggcccagaaagtgattcatttgtaaattatcatggttttctttctgcattaaaatgctcatttccgg

SEQ ID NO: 500 - DNA, 5684 bp, Homo sapiens
gcccgcggtgcccgcccgcgagtctcgctgcctccctcccggggctgcgggcccggcggccgggctggctgggccgcgcttgggttcccgcgccggctcccgcacccgcaatggggaactcacaccacaagaggaaggcccccagcggtccccgggtccgcagcttctggcggttcgggcggtcggcgaagcggccggcaggctctgccaaggctgagaatgacaaacatctaagtgtagggcctggccaggggccagggtctgcagtggatgagcaccaggacaacgtcttctttcccagtgggcgacccycccacctggaagagctgcacactcaggcccaggaggggctccgctccctacaacaccaagagaaacagaaactgaacaagggtggctgggaccatggagacacccagagtatccagtcctcccggacggggccggatgaagacaacatctccttctgcagtcagaccacaycctacgtggctgagagctccacagcagaggacgcgctctccatccgctcggagatgatccagcgcaaaggctccaccttccgaccccatgactcatttcccaaatctggaaagtcagggcggcgtcggcgggagcggcggagcactgtgctgggactcccgcagcatgtgcagaaggagcttggcctgaggaatgagcgtgaggcaccaggcacgccccgggctcctggtgcacgggatgccgtacgcatccccacagtggacggccgcccccgaggcacctcagggatgggggcccgggtgtccctgcaggcgctggaggcggaggcrgaggctggcgctgagacagaggccrtgctgcagcgccacattgaccgtgtctaccgggatgacacctttgttggccggtccacgggtacccgggccccaccattgacccggcccatgtccctagcagtgcctggattgacaggaggggcagggcctgcagagcccctgagcccggccatgtccatctccccccaggccacctacctgtcgaagttgattccacatgctgtgctgccgcctacagtggacgtggtggccctaggccgctgcagcctgcgcacactaagccgctgcagcctgcactcggccagcccagcctcagtccgctcgctggggcgcttctcctccgtctccagcccacagccccgcagccgccacccatcctcctccagtgacacctggagccactctcaatcctccgacaccattgtgtctgacggttccaccctctcctctaagggtggctctgagggccagccggagagctctacggctagcaatagcgtggtaccccctccccagggaggcagtgggaggggctctcccagtgggggcagcactgctgaggcctcagacacactcagcattcggagcagtgggcagttgtctggccggagtgtgtccctgcgtaagctgaagcggcctccaccccctccccgccggacccactccctccatcagcggggcttagcagtgcctgatgggccattagggttgccccctaagcctgagcgtaagcagcagccccagctgcctcggccacccaccactggtggctcagaaggggcgggggcagcaccctgtccacccaacccagccaacagctgggtacctggcttgtctccgggtggttcccggcgccccccacggtccccagaacggacactttcgccctccagtggatactcgagccaaagtggtactcccaccctccctcccaagggcctggcaggtccccctgcttccccaggcaaggcccagccccctaaaccagagcgtgtcacgtctcttcgctcccctggggcctccgtctcctcttccctcacgtctttatgttcctcctcctctgacccagccccctcagaccgctctgggccacagatattgacccccctgggtgacaggtttgtcatacctcctcaccccaaggtgcctgcccccttctccccacctccctccaagcccaggagccctaacccagctgcccctgctctagccgcccctgctgtggttcctgggcctgtttctaccactgacgccagtcctcagtcccctcccactccccagacaaccttgactccactgcaggagtctcctgtcatctccaaagaccagtcacccccaccttccccacccccatcttatcatccacccccaccacccactaagaagccagaggtggttgtggaggcaccatctgcctcagagactgctgaggagcccctccaagatcccaactggccccctcccccaccccctgcccctgaggagcaggacctgtccatggctgacttccccccaccagaggaggcttttttctctgtggccagccctgagcctgcaggcccttcaggctccccagagcttgtcagctccccggctgcttcgtcctcctcagctactgctttgcagattcagcycccgggtagcccagaccctcctccagctccgccagccccagctcctgctagttccgccccagggcatgtggccaagctccctcagaaggaaccggtgggctgtagcaagggtggtgggcctcccagggaggacgtaggtgcgcccctggtcacgccctcgctcctgcagatggtgcggctgcgctccgtgggtgctccaggaggggctcccaccccagcactggggccatcggccccccagaaaccactgcgaagggccctgtcagggcgggccagcccagtgcctgccccctcctcagggctccatgctgcggtccgactcaaggcctgcagcctggccgccagtgaaggcctctcaagtgctcagcccaacggaccgcctgaggcagagccacggcctccccagtcccctgcctcaacggccagtttcatcttctccaagggctctaggaagctgcagctggagcggcccgtgtcccctgagacccaggctgacctccagcggaatctggtggcagaactccggagcatctcagagcagcggccaccccaggccccaaagaagtcacctaaggctcccccacctgtggcccgcaagccgtctgtgggagtccccccacccgcctcccccagttaccctcgagctgagccccttactgctcctcccaccaatgggctccctcacacccaggacaggactaagagggagctggcggagaatggaggtgtcctgcagctggtgggcccagagragaagatgggcctcccgggctcaggtacagtgggcagtgctaggggtgtccagcccagtgctgcgggcactgtcagtaaatcaaagcgactcacagaaagagctggcctgaccaccaggcacctcactggcactgctgacccatcccagaaacacaatctcagggacccgagcagctccaaggacgagaggatacagcagacacaacctaatagagagggcrcctgcagccttaacctccacggccttcgatacttatgcaagcctggtgttgctcctgtcctcagagtcatcctgcgctcatgccttttcccgaatgggttcacctctggcagttrccgcttcagtcttggccttagcctcatcttgaattctgccaggtgctccatgctggggacaagtaggagactgccagggcccaaagaaatggctgcctttcagcacaggtggttccactgggggcagctaacgctgagtgacaaggatgggaagccacaggtgcattttactcaagtcttctctagtcaatgaggggcacccagtgcttctagggcaggctgggtggtggtcccctaggtatcagcctctcttactgtactmtccgggaatgttaacctttctattttcagcctgtgccacctgtctaggcaagctggcttmcccattggcccctgtgggtccacagcagcgtggctgccccccagggccaccgcttctttcttgatcctctttccttaacagtgacttgggcttgagtctggcaaggaaccttgcttttagcttcaccaccaaggagagaggttgacatgacctccccgccccctcaccaaggctgggaacagaggggatgtggtgagagccaggttcctctggccctctccagggtgttttccactagtcactactgtcttctccttgtagctaatcaatcaatattcttcccttgcctgtgggcagtggagagtgctgctgggtgtacgctgcacctgcccactgagttggggaaagaggataatcagtgagcactgttctgctcagagctcctgatctaccccaccccctaggatccaggactgggtcaaagctgcatgaaaccaggccctggcagcaacctggsaatggctggaggtgggagagaacctgacttctctttccctctccctcctccaacattactggaactctatcctgttaggatcttctgagcttgtttccctgctgggtgggacagaggacaaaggagaagggagggtctagaagaggcagcccttctttgtcctctggggtaaatgagcttgacctagagtaaatggagagaccaaaagcctctgatttttaatttccataaaatgttagaagtatatatatacatatatatatttctttaaatttttgagtctttgatatgtctaaaaatccattcccyctgccctgaagcctgagtgagacacatgaagaaaactgtgtttcatttaaagatgttaattaaatgattgaaacttggctgtggctactgcttcttaatgtgggggggacagggcagtggtctgggcccacatttagaagggaaaatgttttgcctgctgcacacattggacccaagtatgggcctcttctgcctagtactgccaaagggactgttaaggtgtcttgtccatcttctaccccccaccccccattacagggtaaaggaaccccagactaggtgaggggccagcagctgcctcacacttgtgttctctcctgagatggtccagctcacatccagacacccttgttcagacattttatttgaatttatgacagtgatggggatttgactgagatgccttatggagaagtaccccaccctytatgaagacaraatcactctctgccattcattctgcctgatgctaacaacacgcagctgatttagggagtgtcccagcctagctggatcaagggaaattccaggagccctggggcaggccctggcccccagtgccaagcctcagagtaagcagacattgggaaagttgccaaccacttggtagaccactaggttctctgttttcccttccctttccttttcaaatcccacagtttcctgttggggagaagctgtaattagcctagtccaggtaccagatcccagctaggggcgcagctgcttggataactccaagaaaacctgggcaccagtatttttccaattataaggactgtggcataaattttyaaatgagttatattgaaaccagatttctccagctgccaagggaaraaggtagggctggactccctgctgtggcccagcccttgttaggggttggtctctcactgcagccagacaggatgatcctgggttctggggagggtaagctgccccttgccgagttctgcaccgaataaagagtccaaacccgctgcttccgtgtcctgagagatgggtaaatgggtgatggatggagcagactgaagagacagcagatgactcag

SEQ ID NO: 501 - DNA, 5568 bp, Homo sapiens
ggaacgtctcgagtggcgcccgcagtcatggtggtgttcgttggccgccgcctcccggcgctcctagggctgtttaagaagaagggctctgccaaggctgagaatgacaaacatctaagtgtagggcctggccaggggccagggtctgcagtggatgagcaccaggacaacgtcttctttcccagtgggcgacccycccacctggaagagctgcacactcaggcccaggaggggctccgctccctacaacaccaagagaaacagaaactgaacaagggtggctgggaccatggagacacccagagtatccagtcctcccggacggggccggatgaagacaacatctccttctgcagtcagaccacaycctacgtggctgagagctccacagcagaggacgcgctctccatccgctcggagatgatccagcgcaaaggctccaccttccgaccccatgactcatttcccaaatctggaaagtcagggcggcgtcggcgggagcggcggagcactgtgctgggactcccgcagcatgtgcagaaggagcttggcctgaggaatgagcgtgaggcaccaggcacgccccgggctcctggtgcacgggatgccgtacgcatccccacagtggacggccgcccccgaggcacctcagggatgggggcccgggtgtccctgcaggcgctggaggcggaggcrgaggctggcgctgagacagaggccrtgctgcagcgccacattgaccgtgtctaccgggatgacacctttgttggccggtccacgggtacccgggccccaccattgacccggcccatgtccctagcagtgcctggattgacaggaggggcagggcctgcagagcccctgagcccggccatgtccatctccccccaggccacctacctgtcgaagttgattccacatgctgtgctgccgcctacagtggacgtggtggccctaggccgctgcagcctgcgcacactaagccgctgcagcctgcactcggccagcccagcctcagtccgctcgctggggcgcttctcctccgtctccagcccacagccccgcagccgccacccatcctcctccagtgacacctggagccactctcaatcctccgacaccattgtgtctgacggttccaccctctcctctaagggtggctctgagggccagccggagagctctacggctagcaatagcgtggtaccccctccccagggaggcagtgggaggggctctcccagtgggggcagcactgctgaggcctcagacacactcagcattcggagcagtgggcagttgtctggccggagtgtgtccctgcgtaagctgaagcggcctccaccccctccccgccggacccactccctccatcagcggggcttagcagtgcctgatgggccattagggttgccccctaagcctgagcgtaagcagcagccccagctgcctcggccacccaccactggtggctcagaaggggcgggggcagcaccctgtccacccaacccagccaacagctgggtacctggcttgtctccgggtggttcccggcgccccccacggtccccagaacggacactttcgccctccagtggatactcgagccaaagtggtactcccaccctccctcccaagggcctggcaggtccccctgcttccccaggcaaggcccagccccctaaaccagagcgtgtcacgtctcttcgctcccctggggcctccgtctcctcttccctcacgtctttatgttcctcctcctctgacccagccccctcagaccgctctgggccacagatattgacccccctgggtgacaggtttgtcatacctcctcaccccaaggtgcctgcccccttctccccacctccctccaagcccaggagccctaacccagctgcccctgctctagccgcccctgctgtggttcctgggcctgtttctaccactgacgccagtcctcagtcccctcccactccccagacaaccttgactccactgcaggagtctcctgtcatctccaaagaccagtcacccccaccttccccacccccatcttatcatccacccccaccacccactaagaagccagaggtggttgtggaggcaccatctgcctcagagactgctgaggagcccctccaagatcccaactggccccctcccccaccccctgcccctgaggagcaggacctgtccatggctgacttccccccaccagaggaggcttttttctctgtggccagccctgagcctgcaggcccttcaggctccccagagcttgtcagctccccggctgcttcgtcctcctcagctactgctttgcagattcagcycccgggtagcccagaccctcctccagctccgccagccccagctcctgctagttccgccccagggcatgtggccaagctccctcagaaggaaccggtgggctgtagcaagggtggtgggcctcccagggaggacgtaggtgcgcccctggtcacgccctcgctcctgcagatggtgcggctgcgctccgtgggtgctccaggaggggctcccaccccagcactggggccatcggccccccagaaaccactgcgaagggccctgtcagggcgggccagcccagtgcctgccccctcctcagggctccatgctgcggtccgactcaaggcctgcagcctggccgccagtgaaggcctctcaagtgctcagcccaacggaccgcctgaggcagagccacggcctccccagtcccctgcctcaacggccagtttcatcttctccaagggctctaggaagctgcagctggagcggcccgtgtcccctgagacccaggctgacctccagcggaatctggtggcagaactccggagcatctcagagcagcggccaccccaggccccaaagaagtcacctaaggctcccccacctgtggcccgcaagccgtctgtgggagtccccccacccgcctcccccagttaccctcgagctgagccccttactgctcctcccaccaatgggctccctcacacccaggacaggactaagagggagctggcggagaatggaggtgtcctgcagctggtgggcccagagragaagatgggcctcccgggctcaggtacagtgggcagtgctaggggtgtccagcccagtgctgcgggcactgtcagtaaatcaaagcgactcacagaaagagctggcctgaccaccaggcacctcactggcactgctgacccatcccagaaacacaatctcagggacccgagcagctccaaggacgagaggatacagcagacacaacctaatagagagggcrcctgcagccttaacctccacggccttcgatacttatgcaagcctggtgttgctcctgtcctcagagtcatcctgcgctcatgccttttcccgaatgggttcacctctggcagttrccgcttcagtcttggccttagcctcatcttgaattctgccaggtgctccatgctggggacaagtaggagactgccagggcccaaagaaatggctgcctttcagcacaggtggttccactgggggcagctaacgctgagtgacaaggatgggaagccacaggtgcattttactcaagtcttctctagtcaatgaggggcacccagtgcttctagggcaggctgggtggtggtcccctaggtatcagcctctcttactgtactmtccgggaatgttaacctttctattttcagcctgtgccacctgtctaggcaagctggcttmcccattggcccctgtgggtccacagcagcgtggctgccccccagggccaccgcttctttcttgatcctctttccttaacagtgacttgggcttgagtctggcaaggaaccttgcttttagcttcaccaccaaggagagaggttgacatgacctccccgccccctcaccaaggctgggaacagaggggatgtggtgagagccaggttcctctggccctctccagggtgttttccactagtcactactgtcttctccttgtagctaatcaatcaatattcttcccttgcctgtgggcagtggagagtgctgctgggtgtacgctgcacctgcccactgagttggggaaagaggataatcagtgagcactgttctgctcagagctcctgatctaccccaccccctaggatccaggactgggtcaaagctgcatgaaaccaggccctggcagcaacctggsaatggctggaggtgggagagaacctgacttctctttccctctccctcctccaacattactggaactctatcctgttaggatcttctgagcttgtttccctgctgggtgggacagaggacaaaggagaagggagggtctagaagaggcagcccttctttgtcctctggggtaaatgagcttgacctagagtaaatggagagaccaaaagcctctgatttttaatttccataaaatgttagaagtatatatatacatatatatatttctttaaatttttgagtctttgatatgtctaaaaatccattcccyctgccctgaagcctgagtgagacacatgaagaaaactgtgtttcatttaaagatgttaattaaatgattgaaacttggctgtggctactgcttcttaatgtgggggggacagggcagtggtctgggcccacatttagaagggaaaatgttttgcctgctgcacacattggacccaagtatgggcctcttctgcctagtactgccaaagggactgttaaggtgtcttgtccatcttctaccccccaccccccattacagggtaaaggaaccccagactaggtgaggggccagcagctgcctcacacttgtgttctctcctgagatggtccagctcacatccagacacccttgttcagacattttatttgaatttatgacagtgatggggatttgactgagatgccttatggagaagtaccccaccctytatgaagacaraatcactctctgccattcattctgcctgatgctaacaacacgcagctgatttagggagtgtcccagcctagctggatcaagggaaattccaggagccctggggcaggccctggcccccagtgccaagcctcagagtaagcagacattgggaaagttgccaaccacttggtagaccactaggttctctgttttcccttccctttccttttcaaatcccacagtttcctgttggggagaagctgtaattagcctagtccaggtaccagatcccagctaggggcgcagctgcttggataactccaagaaaacctgggcaccagtatttttccaattataaggactgtggcataaattttyaaatgagttatattgaaaccagatttctccagctgccaagggaaraaggtagggctggactccctgctgtggcccagcccttgttaggggttggtctctcactgcagccagacaggatgatcctgggttctggggagggtaagctgccccttgccgagttctgcaccgaataaagagtccaaacccgctgcttccgtgtcctgagagatgggtaaatgggtgatggatggagcagactgaagagacagcagatgactcag

SEQ ID NO: 502 - DNA, 3101 bp, Homo sapiens
acacttcttcctggcaaagaagtgyccaggaygggagctggggagccagggctgatctaggaggctgggagccaggtgacaggatggccccaaagagagttgtgcagctgtccctgaagatgcctacccatscygtgtgtgtggtgggagtcraggcacatgtggacattcacagtgatgtgcccaagggtgccaacagcttcagggtctctggaagctccggggtggaggtcttcatggtctacaaccgcacacgtgtgaaagagcccataggcaaggcccgttggccgctagacactgatgcagacatggtcgtatctgtgggcacagccagtaaggaattaaaggacttcaaggtgagrgtctcctactttggggagcaggaagaccaagctctgggccgcagcgtgctttacctcactggcgtcgatatttcccttgaggttgacacaggccgcacaggcaaggtgaagaggagccaaggggacaagaaaacctggcgctggggccctgagggctatggggctatcttgctggtgaactgtgaccgggacaatcacaggtccgcagagcctgacctcacccacagctggctgatgtcgctggctgacctgcaggacatgtccccaatgctgctgagctgcaatggccccgacaagctcttcgacagccacaagcttgtcttgaacgtgcccttttctgattccaaaagagtgagggtcttctgtgccaggggtgggaattctctctcggactacaaacaggtgctggggccccagtgtctgtcctatgaagttgagcgacagccaggggagcaggagatcaagttctatgtggaggggctgaccttccccgatgccgatttcctagggctggtttccctcagtgtcagcctggtggacccggggaccctgcccgaggtgaccctcttcacagacactgtgggcttccgcatggccccctggatcatgackcccaacactcagcctcctgaggagctgtatgtgtgcagagtgatggacactcatggctccaatgagaaattcctggaggacatgtcttatctgacattgaaagccaactgcaagctgaccatctgccctcaagttgaaaatcgaaatgaccgctggatccaggaygagatggagtttggctacatcgaggcccctcacaaatccttccccgtggtctttgactcccccmggaacaggggcctgaaagatttcccctataagaggatcctgggtcctgactttggatatgttacccgggagatcccgctccctggtccctccagccttgactccttcggcaacctggacgtcagcccgcccgtcacggtgggcggcacggaataccccctgggccggatcctcatcgggagcagcttccccaagtccggtgggcggcagatggccagggcagtgcggaacttcctgaaggcacagcaggtgcaggcacccgtggagctctactcggactggctctctgtgggccatgtggacgagtttctgacctttgtgcctacctctgaccaaaagggcttccggctgctcctggctagccccagcgcttgcctcaaactcttccaagagaagaaagaagagggttatggggaggcagcccagtttgatgggttaaaacaccaggcaaaaagaagcattaatgagatgctggcagacagacacctccagagagacaatcttcatgcacagaaatgcattgactggaaccgtaatgtgctgaagcgggagctgggcctggcagagagtgacatcgtggacattccccagctcttcttcctgaaaaacttctacgcggaagccttcttcccagacatggttaacatggtggtcttaggcaagtacctgggcatccccaagccctacgggcccatcatcaatggccgctgctgcctggaggagaaggtgcagtccctgctggagcctctgggcctgcactgcatcttcattgatgactacttgtcctaccacgagctgcagggggagatccactgtggcaccaacrtgcgcaggaagccctttcccttcaaatggtggaacatggtgccctgagcctgcccccacccgccatcctctctgcbctcttgctagggaaccctgccagggtgaaggcaaggaacaaccacctggcctccattctcttgggggagtcttggcactttgcaaacatcctggccaccatgggcaccaggacacagggatggataccacctaccctcgcctctggaatggcctacccaacccgagaagaatgcacctcattcttccctggcctctttcccacccacagcccccagaggctctagatcaacaatgttagcatgttccagaatggctgtgggaggcctagggagatgggccccacttagaattgctcccccttcattctgatgcctccctggggaacaaggataatgactttgcatctgcacctggaacggggcctgggggaccwggggtctggtgtgccaggcaccaggctgcctctgctcttggaaaactaggaaaggggatcagaaacatcctctccccgctctaggtttcttctcccaaaggggacccaaggctgtgacacttacctccacccccatccagcacccttcagctgtgtgtggacaaacaaggacagaaaaacccagtgtccaagggccaatttaaatagaaaaaaagacaacaaaattttaatagctgactccgacctcagaagagtgattgctacctttctggaaagactttaattaccagagctggcttctcccagctcagaaatgctgagaagccaacgtgaggcctgaggacacacaaaggatgacggggcaggaggggatgaggtcagggtagcagagtgtgtgacgacggatttgggggcctagaggtgtccgtggttcctgggctgggattttggactctggatttgaagggagctggagcttccagatgtagcaggggtagggggccagatgttagaagagggtgtgtgtgttgggaggaaattaggttatctctgaaggtggagtttaatttcctttaatagtctttaattattccccttcattctgcaggcagtgggaggggaag

SEQ ID NO: 503 - DNA, 758 bp, Homo sapiens
ctttgatgtcacaatctgacctgtgggtattaatctggtcacagctgctcacagactagatggcaaggtccaggggactagcacaggaagatgtggaagagaagtgaccatcaacccaagatcaaagcagaggatggacctctggtgggccagttcgaggttctgggttcagttccagaacctgccatgccacatcctctagagctgtcagaatttgagagcttcccagtgtttcaggacattaggcttcacatcagggaagtgggagctcaattggtcaagaaagtcaatgccgtctttcagctggacatcaccaaaaatgggaagaccattttgcggtggacyattgatctgaagaatggttctggggacatgtatccgggayctgccaggctcccagcagacactgtctttacaatcccggagtctgtctttatggagctggttttgggcaaaatgaacccgcagaaggctttccttgccggaaagttcaaagtgagtggcaaggttctgcttagctggaagctggaaagggttttcaaagactgggctaaattttaagcatgcaaaaataccaaggaagaacttctcttcgatgataatgtcgagtggaaatcatgcttaatctgaagattaaagtaaaaagtatccartatttttactcaaattcttcctattcaagtttaattgattttcctgttgatgggtaaattttcagggagggttctgaagcagtaaaaagcrttgtagtgcatcaa

SEQ ID NO: 504 - DNA, 677 bp, Homo sapiens
atgtggtccgcagtcagcaccacagcacctggcctcctgcacaccctgaaggtagcacccctgcctttggctcagagtatgctggtgccggtgccagctcccagaaaggratatgagtctagtttttccaatgaggaaacacagaaggcacaggcccttcaactggcctcttacctcaacctggycatgtgtcatctgaaactacaggccttctctgctgccactgaaagctgtaacaaggccctggaactgggcagcaacaacgagaagggcctcttccattggggagaggcccacctggctgtgaatgactttgaactggcacaggctgacttccagaaggtcttgcagctctaccccaacaacgaagccgccaaggcccagctggctgtgtgccagcagcagatctgcaggcagcttgcctgggagaagacgctctacgccaacacgtttgagaggctggctgaggaagagaacaaggccaaggcagaggcttcctcaggagacaatctcactgacacagagatggaggagcagaagagcaacaccacagagagccagtctcaagtggagacagaagcatagcccctctccaccagccctactcctgtggctgcctgccccccgtctccctactctgccctgttagttttgtaaaaactgaagaattttgagtg

SEQ ID NO: 505 - DNA, 1458 bp, Homo sapiens
aagggtgcgctgcrtggagatgacagttgaggagatgaaggagacygagaatgggacacagttggcgcctctkcccatggagggagtggacattcgcccaaacaggaggaaggcatgctgaaggtcatcgagagagggcacaggtacagagatgcccatgattggggactgaatctttgtccactacactggctggctgttagatggcacaaactttgaccccagtctggatcacaaggacaaattctcctttgacctgggaaaaggggaggtcaacaaggcttgggacattgccatagcagccatgaaggcaggggaggtgtgccatatcacctgcaaaccagaatatgccttcggtgcagcaggcagtcctccaaagatctccccaatgccacactcgtgtttgaggtggagttgtttgagtttaagggagaagatctgacggaagaagaagatggcggaatcatctacagaattacagacttgcggtgaaggctatcccaggcccaatgagggtgctatcatggagattgcactggaagggtgctacaaggactagctctttgaacatcaggagaatctggatctgccttatggtctggagagggccattcagtgcatgtagaaaggagaacattccattgtgtacctcaaacccagctatgcttttggcagtgttaggaaggaaaagttccaaatcccaccaaatgcctagctgaaatatgaattacacctcaagagttttgaaaagaccaaggagtcttgggagatgaattcagaagagaagctggagcagagcaccrcagtgaaagagtgggacactgtgtacttcaaggaaggcaaatacaagcaagctttactataatataagaggattgtgtcctgggtrgaatatgagtctagtttttccaatgaggaaacacagaaggcacaggcccttcaactggcctcttacctcaacctggycatgtgtcatctgaaactacaggccttctctgctgccactgaaagctgtaacaaggccctggaactgggcagcaacaacgagaagggcctcttccattggggagaggcccacctggctgtgaatgactttgaactggcacaggctgacttccagaaggtcttgcagctctaccccaacaacgaagccgccaaggcccagctggctgtgtgccagcagcagatctgcaggcagcttgcctgggagaagacgctctacgccaacacgtttgagaggctggctgaggaagagaacaaggccaaggcagaggcttcctcaggagacaatctcactgacacagagatggaggagcagaagagcaacaccacagagagccagtctcaagtggagacagaagcatagcccctctccaccagccctactcctgtggctgcctgccccccgtctccctactctgccctgttagttttgtaaaaactgaagaattttgagtg

SEQ ID NO: 506 - DNA, 331 bp, Homo sapiens
aaaccgtgtrctattagccatggtyaaccccaccgtgttcttcgacattgccgtcgacggcgagcccttgggccgcgtctcctttgagctrtttgcagacaaggtcccaaagacagcagaaaattttcgtgctctgagcactggagagaaaggatttggttataagggttcctrctttcacagaattattccagggtttatgtgtcagggtggtgamttcacacgccataatggcactggtggcaagtccatctatggggagaaatttgagcatgaatattgtggaggccatggagcgctttgggtccaggaatggcaagaccagcaagaa

SEQ ID NO: 507 - DNA, 774 bp, Homo sapiens
acttggctttgcagacgccgccgccgaggaaaaccgtgtrctattagccatggtyaaccccaccgtgttcttcgacattgccgtcgacggcgagcccttgggccgcgtctcctttgagctrtttgcagacaaggtcccaaagacagcagaaaattttcgtgctctgagcactggagagaaaggatttggttataagggttcctrctttcacagaattattccagggtttatgtgtcagggtggtgamttcacacgccataatggcactggtggcaagtccatctatggggagaaatttgaagatgagaacttcatcctaaagcayacaggtcctggcatcttgtccatggcaaatgctggacccaacacaaatggatcccagtttttcatctgcactgccaagactgagtggttggatggcaagcatgtggtgtttggcaaagtgaaagaaggcatgaatattgtggaggccatggagcgctttgggtccaggaatggcaagaccagcaagaagatcaccattgctgactgtggacaactcgaataagtttgacttgtgttttatcttaaccaccaggtcattccttctgtagctcaggagagcacccctccaccccatttgctcgcagtatcctagaatctttgtgctctcgctgcagttccctttgggttccatgttttccttgttccctcccatgcctagctggattgcagagttaagtttatgattatgaaataaaaactaaataacaaacaaaaaaaaagaagcaatta

SEQ ID NO: 508 - DNA, 3341 bp, Homo sapiens
aagcagtccccggtgtcggggcaggaggcacgcgcgcggctgaggcgaggtcgctcggcgcagctgttgcggggccatggcggggaccgcgctcaagaggctgatggccgwgtacaaacaattaacactgaatcctccggaaggaattgtagcaggccccatgaatgaagagaacttttttgaatgggaggcattgatcatgggcccagaagacacctgctttgagtttggtgtttttcctgccatcctgagtttcccacttgattacccgttaagtcccccaaagatgagatttacctgtgagatgtttcatcccaacatctaccctgatgggagagtctgcatttccatcctccacgcgccaggcgatgaccccatgggctacgagagcagcgcggagcggtggagtcctgtgcagagtgtggagaagatcctgctgtcggtggtgagcatgctggcagagcccaatgacgaaagtggagctaacgtggatgcgtccaaaatgtggcgcgatgaccgggagcagttctataagattgccaagcagatcgtccagaagtctctgggactgtgagacctggcctcrcacaggcgcrcacacaccgccaakcagctcagcattctcccccggcacacttagtgacagtgatgctctgtgctggtaccaaacaaggcagacttgcaagaaccayggcatcttttttttttttcaaacctttcctacttcaaacaggcttctcttctgaaaygatgacttaatgtcgaatattgacagcttactgcagttttacagtattcctcacaaagggcttcaggtagattatcagagctgtcagcactacctctccccgctgaaaccagcagttcatggcttcctgtggattccctccctccctggagtgttgagggggttgtacctgccagacttccaggggacgatggaatacccagaacgctccttctgaagaaatggggccctgtagctgcagcacaggggaagggcccggcaccctttctgggtccytcctggttccctgtgggccccatgaggagtccattacttcctttcttccttcatattttacaggcagatgcttttcttataatctaattacatcttttcatttgttatatattacaaaccatcacacttagaaatacttccaggaaatgcttttttgaagtgtgaattaataagaaatggggtaaatagaaaagaaatttattgctgattggccaggtgcggtggttcgtgcctgtaatcccagctctttgggaggccaaggcaggtagatcacaaggtcaggaaattgagaccatcctggctaatacagtgaaaccccatgtctgctaaaattacaaaaaattagctgggcgtggtggtgcacgcctgtagtctcagctactcaggaggctgaggcaggagaatcgcttgaacccgggaggcagaggtagyagtgagctgaagtcccgccactgcactccagcctgggcaacagagcgagactcagtctcaaaaagaaaaaagaaatttattgctgatcacaaggacagacagttttttcccgaccatactcatcaaagatttacgtttgtatattagtaactagtgcattactagagcaggtgcaggtgaggtctttaaagtttcaatgaaagtttcttctggatctacagaaaaaawwtttttttttcaatctaaaaactggaaattctagggtttttgtacattttggatgcactgggaatttattagcacaaaatcattctttgcaactcaaaattcagaagggactctaccatatcttagctcagagcacagaggagtgccttatccccacacttgactgggctgtggaggtgggcatgtgggcccctgggcccaggctggggacagagcccttgttttgtgacttaggattttgatgtggttcccatgttctctaacagggccagctgagcagcacaggccaggaggccacagtgtaagcaataacagatctgccacatgcagaagcaaatatcagkcctgtcgcacacgggcggcatttaaataggaatttctatttttgaaataagggatggtctatgaggcatayagtagatttgatgtgatccttttctccctcccttccataatggatcgtggtctgtgtgactgaacccacacagagtgtcatgggtgacagtttctggttgaagtagctccacgcykggcttctgtggacagcagattcttttccttctcacaaggggctcatttaaaatttggaggctgggtgctgtggctcacgcctgcaatcccagcactttgggagactgaggcgggcggatcatgaggtcaggagatcgcgaccatcctggctaacagtgaaaccctgtctccactaaaaatacaaaaaattagccgggcgtggtggcgggcgcctgtagtcccagctactctgaagactgaggcaggagaatggcgtgaacccaggaggcggagcttgcagtgagctgagatcrcgccactgcactccagcctgggcaacagagtgagactctgtctcaaaaaaaaaaaaaaaaaaaatggaacgsagggcaagaactcgtatttggaaggagatgggggaaaggagcggtattatacctawgttgtatttgcaggcaaatgagatggagccctctctgtaaagaagagtcatttgtgcaagtagacggggtctgtgggtgcaggccctggaggggcacacaattgcctggaggcttctgtgagatcgggagagggaggagaggcagtctcttgacaaaataaagtatttttattcatttgtatttattaaatgaaaaaacaatcccatggtgtccctgttgtgtggtggaacctaatgactgttgaaataaagttctgtgttttccctgccctgcagtgtgtgtccctttgtcgtattgtcagaggagcctgtggccactgcccccagggagcacaccagatcatcccagctgggattcctcacggygggggcttttctgcagacttgggttagctctggcaygttttcttctgtttctgatctcccttctgtcattctgtggtcttcctctggaattctcaggttagttggggtctgtgagacggatgtgttcactaacctataaatgacattttgcagctttttcagcagatgccattgtgtgagtggcacatttgaccactagaagccagcaggctgttccgactgcgcttccctcctgcagttgcttagaagcacagctccctgtcatcactcctctgtggtcctctgtggtcacggttggttgcgatgagacctgcctctgcgtcttgttacttagcatgt

SEQ ID NO: 509 - DNA, 3445 bp, Homo sapiens
aagcagtccccggtgtcggggcaggaggcacgcgcgcggctgaggcgaggtcgctcggcgcagctgttgcggggccatggcggggaccgcgctcaagaggctgatggccgwgtacaaacaattaacactgaatcctccggaaggaattgtagcaggccccatgaatgaagagaacttttttgaatgggaggcattgatcatgggcccagaagacacctgctttgagtttggtgtttttcctgccatcctgagtttcccacttgattacccgttaagtcccccaaagatgagatttacctgtgagatgtttcatcccaacatgtcaccctatgggaccaactcctggagaaggcaacacagaagtgggaaacttcctgattttgtggatgtggatcttaggtggacagcctgatgtccagggcaatctaccctgatgggagagtctgcatttccatcctccacgcgccaggcgatgaccccatgggctacgagagcagcgcggagcggtggagtcctgtgcagagtgtggagaagatcctgctgtcggtggtgagcatgctggcagagcccaatgacgaaagtggagctaacgtggatgcgtccaaaatgtggcgcgatgaccgggagcagttctataagattgccaagcagatcgtccagaagtctctgggactgtgagacctggcctcrcacaggcgcrcacacaccgccaakcagctcagcattctcccccggcacacttagtgacagtgatgctctgtgctggtaccaaacaaggcagacttgcaagaaccayggcatcttttttttttttcaaacctttcctacttcaaacaggcttctcttctgaaaygatgacttaatgtcgaatattgacagcttactgcagttttacagtattcctcacaaagggcttcaggtagattatcagagctgtcagcactacctctccccgctgaaaccagcagttcatggcttcctgtggattccctccctccctggagtgttgagggggttgtacctgccagacttccaggggacgatggaatacccagaacgctccttctgaagaaatggggccctgtagctgcagcacaggggaagggcccggcaccctttctgggtccytcctggttccctgtgggccccatgaggagtccattacttcctttcttccttcatattttacaggcagatgcttttcttataatctaattacatcttttcatttgttatatattacaaaccatcacacttagaaatacttccaggaaatgcttttttgaagtgtgaattaataagaaatggggtaaatagaaaagaaatttattgctgattggccaggtgcggtggttcgtgcctgtaatcccagctctttgggaggccaaggcaggtagatcacaaggtcaggaaattgagaccatcctggctaatacagtgaaaccccatgtctgctaaaattacaaaaaattagctgggcgtggtggtgcacgcctgtagtctcagctactcaggaggctgaggcaggagaatcgcttgaacccgggaggcagaggtagyagtgagctgaagtcccgccactgcactccagcctgggcaacagagcgagactcagtctcaaaaagaaaaaagaaatttattgctgatcacaaggacagacagttttttcccgaccatactcatcaaagatttacgtttgtatattagtaactagtgcattactagagcaggtgcaggtgaggtctttaaagtttcaatgaaagtttcttctggatctacagaaaaaawwtttttttttcaatctaaaaactggaaattctagggtttttgtacattttggatgcactgggaatttattagcacaaaatcattctttgcaactcaaaattcagaagggactctaccatatcttagctcagagcacagaggagtgccttatccccacacttgactgggctgtggaggtgggcatgtgggcccctgggcccaggctggggacagagcccttgttttgtgacttaggattttgatgtggttcccatgttctctaacagggccagctgagcagcacaggccaggaggccacagtgtaagcaataacagatctgccacatgcagaagcaaatatcagkcctgtcgcacacgggcggcatttaaataggaatttctatttttgaaataagggatggtctatgaggcatayagtagatttgatgtgatccttttctccctcccttccataatggatcgtggtctgtgtgactgaacccacacagagtgtcatgggtgacagtttctggttgaagtagctccacgcykggcttctgtggacagcagattcttttccttctcacaaggggctcatttaaaatttggaggctgggtgctgtggctcacgcctgcaatcccagcactttgggagactgaggcgggcggatcatgaggtcaggagatcgcgaccatcctggctaacagtgaaaccctgtctccactaaaaatacaaaaaattagccgggcgtggtggcgggcgcctgtagtcccagctactctgaagactgaggcaggagaatggcgtgaacccaggaggcggagcttgcagtgagctgagatcrcgccactgcactccagcctgggcaacagagtgagactctgtctcaaaaaaaaaaaaaaaaaaaatggaacgsagggcaagaactcgtatttggaaggagatgggggaaaggagcggtattatacctawgttgtatttgcaggcaaatgagatggagccctctctgtaaagaagagtcatttgtgcaagtagacggggtctgtgggtgcaggccctggaggggcacacaattgcctggaggcttctgtgagatcgggagagggaggagaggcagtctcttgacaaaataaagtatttttattcatttgtatttattaaatgaaaaaacaatcccatggtgtccctgttgtgtggtggaacctaatgactgttgaaataaagttctgtgttttccctgccctgcagtgtgtgtccctttgtcgtattgtcagaggagcctgtggccactgcccccagggagcacaccagatcatcccagctgggattcctcacggygggggcttttctgcagacttgggttagctctggcaygttttcttctgtttctgatctcccttctgtcattctgtggtcttcctctggaattctcaggttagttggggtctgtgagacggatgtgttcactaacctataaatgacattttgcagctttttcagcagatgccattgtgtgagtggcacatttgaccactagaagccagcaggctgttccgactgcgcttccctcctgcagttgcttagaagcacagctccctgtcatcactcctctgtggtcctctgtggtcacggttggttgcgatgagacctgcctctgcgtcttgttacttagcatgt

SEQ ID NO: 510 - DNA, 2631 bp, Homo sapiens
aagcagtccccggtgtcggggcaggaggcacgcgcgcggctgaggcgaggtcgctcggcgcagctgttgcggggccatggcggggaccgcgctcaagaggctgatggccgwgtacaaacaattaacactgaatcctccggaaggaattgtagcaggccccatgaatgaagagaacttttttgaatgggaggcattgatcatgggcccagaagacacctgctttgagtttggtgtttttcctgccatcctgagtttcccacttgattacccgttaagtcccccaaagatgagatttacctgtgagatgtttcatcccaacatctaccctgatgggagagtctgcatttccatcctccacgcgccaggcgatgaccccatgggctacgagagcagcgcggagcggtggagtcctgtgcagagtgtggagaagatcctgctgtcggtggtgagcatgctggcagagcccaatgacgaaagtggagctaacgtggatgcgtccaaaatgtggcgcgatgaccgggagcagttctataagattgccaagcagatcgtccagaagtctctgggactgtgagacctggcctcrcacaggcgcrcacacaccgccaakcagctcagcattctcccccggcacacttagtgacagtgatgctctgtgctggtaccaaacaaggcagacttgcaagaaccayggcatcttttttttttttcaaacctttcctacttcaaacaggcttctcttctgaaaygatgacttaatgtcgaatattgacagcttactgcagttttacagtattcctcacaaagggcttcaggtagattatcagagctgtcagcactacctctccccgctgaaaccagcagttcatggcttcctgtggattccctccctccctggagtgttgagggggttgtacctgccagacttccaggggacgatggaatacccagaacgctccttctgaagaaatggggccctgtagctgcagcacaggggaagggcccggcaccctttctgggtccytcctggttccctgtgggccccatgaggagtccattacttccttacatcttttcatttgttatatattacaaaccatcacacttagaaatacttccaggaaatgcttttttgaagtgtgaattaataagaaatggggtaaatagaaaagaaatttattgctgattggccaggtgcggtggttcgtgcctgtaatcccagctctttgggaggccaaggcaggtagatcacaaggtcaggaaattgagaccatcctggctaatacagtgaaaccccatgtctgctaaaattacaaaaaattagctgggcgtggtggtgcacgcctgtagtctcagctactcaggaggctgaggcaggagaatcgcttgaacccgggaggcagaggtagyagtgagctgaagtcccgccactgcactccagcctgggcaacagagcgagactcagtctcaaaaagaaaaaagaaatttattgctgatcacaaggacagacagttttttcccgaccatactcatcaaagatttacgtttgtatattagtaactagtgcattactagagcaggtgcaggtgaggtctttaaagtttcaatgaaagtttcttctggatctacagaaaaaawwtttttttttcaatctaaaaactggaaattctagggtttttgtacattttggatgcactgggaatttattagcacaaaatcattctttgcaactcaaaattcagaagggactctaccatatcttagctcagagcacagaggagtgccttatccccacacttgactgggctgtggaggtgggcatgtgggcccctgggcccaggctggggacagagcccttgttttgtgacttaggattttgatgtggttcccatgttctctaacagggccagctgagcagcacaggccaggaggccacagtgtaagcaataacagatctgccacatgcagaagcaaatatcagkcctgtcgcacacgggcggcatttaaataggaatttctatttttgaaataagggatggtctatgaggcatayagtagatttgatgtgatccttttctccctcccttccataatggatcgtggtctgtgtgactgaacccacacagagtgtcatgggtgacagtttctggttgaagtagctccacgcykggcttctgtggacagcagattcttttccttctcacaaggggctcatttaaaatttggaggctgggtgctgtggctcacgcctgcaatcccagcactttgggagactgaggcgggcggatcatgaggtcaggagatcgcgaccatcctggctaacagtgaaaccctgtctccactaaaaatacaaaaaattagccgggcgtggtggcgggcgcctgtagtcccagctactctgaagactgaggcaggagaatggcgtgaacccaggaggcggagcttgcagtgagctgagatcrcgccactgcactccagcctgggcaacagagtgagactctgtctcaaaaacggtattatacctawgttgtatttgcaggcaaatgagatggagccctctctgtaaagaagagtcatttgtgcaagtagacggggtctgtgggtgcaggccctggaggggcacacaattgc

SEQ ID NO: 511 - DNA, 911 bp, Homo sapiens
acgcgcgcggctgaggcgaggtcgctcggcgcagctgttgcggggccatggcggggaccgcgctcaagaggctgatggccgwgtacaaacccttgagaacgtgcagtgagagcttgaggaagaaggcctgacttgctgctgcggaattaggagggaaaagtgtatgcgttaaaaggggaaaggctcgttggtggagctttgaaagaattaacactgaatcctccggaaggaattgtagcaggccccatgaatgaagagaacttttttgaatgggaggcattgatcatgggcccagaagacacctgctttgagtttggtgtttttcctgccatcctgagtttcccacttgattacccgttaagtcccccaaagatgagatttacctgtgagatgtttcatcccaacagtaagtgcttttggaagtagtttttgtggtaccaggataggtacggagataatattatcagccacctgaaatgtggtatattctatatgtctatgatgtagatctttagaaaacacttcttatgttttgaaattcagccaagtaagcatggtggtattaagcacatgatttcaattttgaaggtcagtttaatatagataaaagacaacaggcacctaaaaccggatgccatttgacccagccaccctacttcactggggaggaagttttacacatgggtgtgtgctcagaaggggttatgctaatctttgtcatagtgttatttgtaatggtgaaaattttgacttaacctgggtttttaacacaagaataaattaagttatatattgtattagtctgttgtcacgctgctaatraagacatattcaagtctgggtaatttataaaggaaagagatttaatggactcacagttccacatggctggggagacctcacaatcatgg

SEQ ID NO: 512 - DNA, 2717 bp, Homo sapiens
acgcgcgcggctgaggcgaggtcgctcggcgcagctgttgcggggccatggcggggaccgcgctcaagaggctgatggccgwgtacaaacccttgagaacgtgcagtgagagcttgaggaagaaggcctgacttgctgctgcggaattaggagggaaaagtgtatgcgttaaaaggggaaaggctcgttggtggagctttgaaagaattaacactgaatcctccggaaggaattgtagcaggccccatgaatgaagagaacttttttgaatgggaggcattgatcatgggcccagaagacacctgctttgagtttggtgtttttcctgccatcctgagtttcccacttgattacccgttaagtcccccaaagatgagatttacctgtgagatgtttcatcccaacatctaccctgatgggagagtctgcatttccatcctccacgcgccaggcgatgaccccatgggctacgagagcagcgcggagcggtggagtcctgtgcagagtgtggagaagatcctgctgtcggtggtgagcatgctggcagagcccaatgacgaaagtggagctaacgtggatgcgtccaaaatgtggcgcgatgaccgggagcagttctataagattgccaagcagatcgtccagaagtctctgggactgtgagacctggcctcrcacaggcgcrcacacaccgccaakcagctcagcattctcccccggcacacttagtgacagtgatgctctgtgctggtaccaaacaaggcagacttgcaagaaccayggcatcttttttttttttcaaacctttcctacttcaaacaggcttctcttctgaaaygatgacttaatgtcgaatattgacagcttactgcagttttacagtattcctcacaaagggcttcaggtagattatcagagctgtcagcactacctctccccgctgaaaccagcagttcatggcttcctgtggattccctccctccctggagtgttgagggggttgtacctgccagacttccaggggacgatggaatacccagaacgctccttctgaagaaatggggccctgtagctgcagcacaggggaagggcccggcaccctttctgggtccytcctggttccctgtgggccccatgaggagtccattacttccttacatcttttcatttgttatatattacaaaccatcacacttagaaatacttccaggaaatgcttttttgaagtgtgaattaataagaaatggggtaaatagaaaagaaatttattgctgattggccaggtgcggtggttcgtgcctgtaatcccagctctttgggaggccaaggcaggtagatcacaaggtcaggaaattgagaccatcctggctaatacagtgaaaccccatgtctgctaaaattacaaaaaattagctgggcgtggtggtgcacgcctgtagtctcagctactcaggaggctgaggcaggagaatcgcttgaacccgggaggcagaggtagyagtgagctgaagtcccgccactgcactccagcctgggcaacagagcgagactcagtctcaaaaagaaaaaagaaatttattgctgatcacaaggacagacagttttttcccgaccatactcatcaaagatttacgtttgtatattagtaactagtgcattactagagcaggtgcaggtgaggtctttaaagtttcaatgaaagtttcttctggatctacagaaaaaawwtttttttttcaatctaaaaactggaaattctagggtttttgtacattttggatgcactgggaatttattagcacaaaatcattctttgcaactcaaaattcagaagggactctaccatatcttagctcagagcacagaggagtgccttatccccacacttgactgggctgtggaggtgggcatgtgggcccctgggcccaggctggggacagagcccttgttttgtgacttaggattttgatgtggttcccatgttctctaacagggccagctgagcagcacaggccaggaggccacagtgtaagcaataacagatctgccacatgcagaagcaaatatcagkcctgtcgcacacgggcggcatttaaataggaatttctatttttgaaataagggatggtctatgaggcatayagtagatttgatgtgatccttttctccctcccttccataatggatcgtggtctgtgtgactgaacccacacagagtgtcatgggtgacagtttctggttgaagtagctccacgcykggcttctgtggacagcagattcttttccttctcacaaggggctcatttaaaatttggaggctgggtgctgtggctcacgcctgcaatcccagcactttgggagactgaggcgggcggatcatgaggtcaggagatcgcgaccatcctggctaacagtgaaaccctgtctccactaaaaatacaaaaaattagccgggcgtggtggcgggcgcctgtagtcccagctactctgaagactgaggcaggagaatggcgtgaacccaggaggcggagcttgcagtgagctgagatcrcgccactgcactccagcctgggcaacagagtgagactctgtctcaaaaacggtattatacctawgttgtatttgcaggcaaatgagatggagccctctctgtaaagaagagtcatttgtgcaagtagacggggtctgtgggtgcaggccctggaggggcacacaattgc

SEQ ID NO: 513 - DNA, 1746 bp, Homo sapiens
atgtgccacaccagctgctcctcgggctgccagccagcctgctgcgcgcccagcccctgccaggcatcctgttacatccccgtgggctgccagtcctccgtgtgcgtgcccgtgagcttcaagccagccgtgtgtgtgcccgtgagatgccagtcctctgtgtgcgtgcccgcagctctgtggttgactactggcaacattgctggagctggccttttgttttttggtggaggtattggtggcactatcctatatgccaaatgggcttcccatttccgagaaagagtagagaaaaccataccttactcagacaaactcttcgaggtggttcttggttctgcaccttataatgttccattgccaaagaaatcaactcagtctggtccactaaaaatctctagtgtatcagaagtaacaaaagaatktaaacagcctgcctcacaactccaaaaacaaaagggagatactccagcttcagcaaccgcaggtgatacagtgttggtccctggggttcagcatgaggaatctttaaaaactgatcaccctgmaattgatgaaggaaaacccacacctgcactttcagaagaagcatcctcatcttctataagggaacgaccatgtgaagaaattgcagcttgccttgcacaasaggaaaaacaagaacaagttaaaactgagtctctagccaagagctttgaagatgctctgaggcaaactgcaaatgtcactctgcaggcgattgcagctcagaacactgtggtccaggctgtcaatgcacactccaacatattgaaagccgccatggacaattctgagattgasggcaagaagaagtctgctaagtgscacacagtgcaaggtgcgttgaaggarcacagaaaggcagtagatgaagctgccaatgcccttctcaaagccaaagaagaggtccaagcagctcaatttgagkctaagcttgtatctcagtatcatgagctggtgggccaagctcaggatgactttaaacgacagctggacagtattactccagaagtccttcctggrtggaaaggaatgagcgtttcggacccagctgacaagctctctactgatgatctgaactccctgattgcccgtgcacatcgtcacatcgatcagctgaacagagagctagcagaacagaaggccacagaaaagcagcacatcacattagccttggagaaacaaacgctggaagaaaagygggttcaagaacaggaattgaagtatgaatttgagcagaacctgtctgagaaactctcggaacaagaattacagtttcatcatctaagtcaagagcaagttcacaactttactctggatataaataccgcctatgccagactcagaggaatcgaacacgctgttcagagtcatgcagttgctgaagaggaagccagaaaagcctaccaactctggctttcagtggaggcattaaagtacagcatgaagacctcatctgcagaaatgcctgctgtcccactgggtagtgcagttgaggccatcaaagccaactgttctgataatgaatttacyaaagctttagccacagctatccctccagagtccctgacccatggggtgtacagtgaagagacccttagagtccgcttttatgctgttcaaaaactggcccgaagggtagcaatgattgattaaaccagaaatagcttgtaccagtacttcttctcctacctgcagtccctgcttctattcccgcctcagcaa

SEQ ID NO: 514 - DNA, 2601 bp, Homo sapiens
atggcagctcccgcatccaccagcagcaccgtccgctcgacagatactgcgggcctgtcagttatcgagtgtgaccgctgtggcccagagttgtctctatgggaagttagtcctccgtccactgygaccatgccgccgatactctacttcaggcagctctgtggttgactactggcaacattgctggagctggccttttgttttttggtggaggtattggtggcactatcctatatgccaaatgggcttcccatttccgagaaagagtagagaaaaccataccttactcagacaaactcttcgaggtggttcttggttctgcaccttataatgttccattgccaaagaaatcaactcagtctggtccactaaaaatctctagtgtatcagaagtaacaaaagaatktaaacagcctgcctcacaactccaaaaacaaaagggagatactccagcttcagcaaccgcaggtgatacagtgttggtccctggggttcagcatgaggaatctttaaaaactgatcaccctgmaattgatgaaggaaaacccacacctgcactttcagaagaagcatcctcatcttctataagggaacgaccatgtgaagaaattgcagcttgccttgcacaasaggaaaaacaagaacaagttaaaactgagtctctagccaagagctttgaagatgctctgaggcaaactgcaaatgtcactctgcaggcgattgcagctcagaacactgtggtccaggctgtcaatgcacactccaacatattgaaagccgccatggacaattctgagattgasggcaagaagaagtctgctaagtgscacacagtgcaaggtgcgttgaaggarcacagaaaggcagtagatgaagctgccaatgcccttctcaaagccaaagaagaggtagagaagatgaaaagtgtgactgaaaatgcaaagaaagaagaggttgctggggccaagcctcatataaacttcacaacatgatagttgatctggataatgtggtcaaaaaggtccaagcagctcaatttgagkctaagcttgtatctcagtatcatgagctggtgggccaagctcaggatgactttaaacgacagctggacagtattactccagaagtccttcctggrtggaaaggaatgagcgtttcggacccagctgacaagctctctactgatgatctgaactccctgattgcccgtgcacatcgtcacatcgatcagctgaacagagagctagcagaacagaaggccacagaaaagcagcacatcacattagccttggagaaacaaacgctggaagaaaagygggcatttgactctgtagtagcaaaagcattagaacatcatggaagtaaaatgcaggctgaataggacagaaasgtagaggaagtcagagatgccatggagaatgaaatgagaacctagcttcactgacaggcagctgcccacactgatcacttgtgagatgtccttagggttcaagaacaggaattgaagtatgaatttgagcagaacctgtctgagaaactctcggaacaagaattacagtttcatcatctaagtcaagagcaagttcacaactttactctggatataaataccgcctatgccagactcagaggaatcgaacacgctgttcagagtcatgcagttgctgaagaggaagccagaaaagcctaccaactctggctttcagtggaggcattaaagtacagcatgaagacctcatctgcagaaatgcctgctgtcccactgggtagtgcagttgaggccatcaaagccaactgttctgataatgaatttacyaaagctttagccacagctatccctccagagtccctgacccatggggtgtacagtgaagagacccttagagtccgcttttatgctgttcaaaaactggcccgaagggtagcaatgattgattaaaccagaaatagcttgtaccagtacttcttctcctacctgcagtccctgcttctattcccgcctcagcaactgaagctgcagagctctgatctgaagatataaacacgtttaaattactgtcatatgcctcctattgcattgagcatggtgatctggagctagtagcaaaatttgtcaatcagctgaagggagaatccagataagtggcacaagactggctgaaggaagcccgaataaccctagaaacgaaacagataatggaaatcctgacagcatatgccagcgccgtaggcacaagaaccactcaagtacagccagagtaaggtctaggaagattttcgtaaagtcrtatttcatgtcaaggaaatcagcagtgatacatgaagggtttgccgcaagggtcccagaattgtctagacatgagcaggcttacaagtactgttctaaatgttaacacctgttgcatttatattctttccacttgctatcatgtcagtgaactccaggagtgctttctttgcaactcgtgtaacattttctgtttttcggattttactgatcagacttgtgaggccaatcaaaataatgtttgtgatctctactactgttgattttgccctcggagcaaactgaataaacaagatgaaaactgaaaaaaaaaa

SEQ ID NO: 515 - DNA, 1122 bp, Homo sapiens
attcggtcggtcgcagcccgctcgggcccgttcgcgcccgtcctgtcggccacgtcccgcggggtggcgggcgcgctgcggcccttggtgcaggccacggtgcccgccaccccggagcagcctgtgttggacctgaagcggcccttcctcagccgggagtcgctgagcggccaggccgtgcgccggcctttggtcgcctccgtgggcctcaatgtmcctgcttctgtttgttattcccacacagacgtcaaggtgcctgacttctctgaataccgccgccttgaagttttagatagtacgaagtcttcaagagaaagcascgaggctaggaaaggtttctcctatttggtaactggagtaactactgtgggtgtcgcatatgctgccaagaatgccgtcacccagttcgtttccagcatgagtgcttctgctgatgtgttggccctggcgaaaatcgaaatcaagttatccgatattccagaaggcaagaacatggctttcaaatggagaggcaaacccctgtttgtacgtcatagaacccagaaggaaattaagcaggaagctgcagttgaattatcacagttgagggacccacagcatgatctagatcgagtaaagaaacctgaatgggttatcctgataggtgtttgcactcatcttggttgtgtacccattgcaaatgcaggagattttggtggttattactgcccttgccatgggtcacactatgatgcatctggcaggatcagattgggtcctgctactctcaaccttgaagtccccacgtatgagttcaccagtgacgatatggtgattgttggttagagacttggactcaagtcataggcttctttcagtctttatgtcacctcaggagacttatttgagaggaagccttctgtacttgaagttgatttgaaatatgtaagaattgatgatgtatttgcaaacattaatgtgaaataaattgaatttaatgttgaatactttcaggcattcacttaataaagccactgttaagcactgttatgctcagtcatacacgcgaaaggtacaacgtcttttagctaattctaattaaaaattacagactggtgtacaagatacttgtgaaatctgtaa

SEQ ID NO: 516 - DNA, 1074 bp, Homo sapiens
atgacaggctggagctgccttgtgacaggagcaggagggtttctgggtcagaggatcatctscctgttagtggaggagacagagctgaaggagatcagggccttggacaggccaaatcattccaatgacctaacctctgctcacacagaactccagaacaagatcaagctgacagtgctggaaggagacattctggatgagccattcctgaagagagcctgccaggacgtgtcggtcrtcatccacaccgcctgtatcattgatgtcttcggagtcactcacagacagtctatcatgaatgtcaatgtgaaagcatgctctttctgggcgggtacccagctcctgttggaggcctgtgtccaagctactgtgccagtcttcatctacaccagtaccctccagttagccgggcccaactcctacaaggaaatcattgagaatgcccatgaagaagactttctggaaaacacatggtctgctccatatccatacagcaaaaagyttgctgagaaggctgtgctggcagctaatgggtggactcwgaaaaatggtgataccttgtacacttgtgccttaagacccatgtatatctatggggaaggaagcccatttcttactgccartataaatgaggccctgaacarcaatgggatcctgtcgagtgtcagcaagttctccacagccaacccagtctatgttggcaacgtggcctgggcccacattctggccttgagggccttgcgggaccccaagaaggccccaagtgtcctaggacagttctactatatctcagatgacacgcctcaccaaagttatgataaccttaattacatcytgagcaaagagttcggcycctgccttgattccagatgaagccttcttttattcctgatgtactggattggcttcctgctgggaatagtgagcctcctgctcaggccartttgcacctatcaaccgcccttcgactgccacacagtgacattgtcaaatagcatgttcaccttctcttacaagaaggctcagcgagatctggcatataagccactttacagctgggaggaagccaagcag

SEQ ID NO: 517 - DNA, 1646 bp, Homo sapiens
ggacaccctagaataagatcttctccccagcatcttctgtttcctggagagtgtttcctgctmcytcrgattggycatgacaggctggagctgccttgtgacaggagcaggagggtttctgggtcagaggatcatctscctgttagtggaggagacagagctgaaggagatcagggccttggacaggccttcagaccaggattgagggaggaattttctaaactccagaacaagatcaagctgacagtgctggaaggagacattctggatgagccattcctgaagagagcctgccaggacgtgtcggtcrtcatccacaccgcctgtatcattgatgtcttcggagtcactcacagacagtctatcatgaatgtcaatgtgaaaggtaggggatacttcctgacactgaaagcatgctctttctgggcgggtacccagctcctgttggaggcctgtgtccaagctactgtgccagtcttcatctacaccagtaccctccagttagccgggcccaactcctacaaggaaatcattgagaatgcccatgaagaagactttctggaaaacacatggtctgctccatatccatacagcaaaaagyttgctgagaaggctgtgctggcagctaatgggtggactcwgaaaaatggtgataccttgtacacttgtgccttaagacccatgtatatctatggggaaggaagcccatttcttactgccartataaatgaggccctgaacarcaatgggatcctgtcgagtgtcagcaagttctccacagccaacccagtctatgttggcaacgtggcctgggcccacattctggccttgagggccttgcgggaccccaagaaggccccaagtgtcctaggacagttctactatatctcagatgacacgcctcaccaaagttatgataaccttaattacatcytgagcaaagagttcggcycctgccttgattccagatgaagccttcttttattcctgatgtactggattggcttcctgctgggaatagtgagcctcctgctcaggccartttgcacctatcaaccgcccttcgactgccacacagtgacattgtcaaatagcatgttcaccttctcttacaagaaggctcagcgagatctggcatataagccactttacagctgggaggaagccaagcagaaaaccatggagtgagttggttcccttgtggaccggcacaaggaraacctgaagtccaagactcagtgctttaaggatgacagagatgtgcatgtgggtattgttaggagatgtcatcaagctccatcctcctggcttcayacagaatgtgacaagggcataagcccaggtcctgctgcctccctttcacacaatgcccaacttattgtcttcctcgtgtcatcaaaacctgcccattccctgacccaaccagaagctttctgtcctaatcatataccagaggacagacaatgtgatttgctttttccaaatctcagtggctgattctgaacaactgtggtctcttttatcttaagggtctcttttaactgctagagctctccatttctcctcctaaaagagaaggatttcttttcttttaagtctcctatttcttcacacagttcaaggaaatgagcaataaatgttttaat

SEQ ID NO: 518 - DNA, 3474 bp, Homo sapiens
gctgcaccgggcagcgccgagggttgccggccggcgcgcggggagtagagggcgcgggccgcagtgccgggttccagagggagctctgcgccgggtccttccctgtggtagccccaggacacccccagcctcaacatcccattctgggactcctgccctgttcccacattcgttctacctcgagtctccaggagcttccagtggcttggtcaccgccaactctcgtccatgcctcttagagcccctttcccggcctcaccgggtgtcgcttaatagtcttgggaccttaaggagcaagtcagcccctgcggaccctcccagtgaagagaaagagctggctgtgcggtggaatttggaagagacgacgtttgggagcctttgctgagtccagggagagaggcgtcccccaccgtgccgctgcagctcgggcagagccgccaagctttgggttctctagggtgtgtacccaggagtggatctgctgtatcatatggtcactctattcaacctttcgagaaaccaccaaattgtttcttcaggaaatgcaccatctgacatccccattttatgaggatccccacgtctctgtcatctcaccaacacttgtgctgaggaacctctaatcatctcccatggatttgtgatcagcgttgcagctctcccagcagccctggacagtggcccccagcagtcagcatgtggctgccgcgcgtctccagcacagcagtgaccgcgctcctcctggcgcagaccttcctcctcctctttctggtttcccggccagggycctcgtccccagcaggcggcgaggcgcgygtgcatgtgctggtgctgtcctcgtggygctcgggctcgtccttcgtgggccaactcttcaaccagcaccccgacgtcttctacctaatggakyccgcgtggcacgtgtggaccaccctgtcgcagggcagcgccgcmacgctgcacatggctgtgcgcgacctggtgcgctccgtcttcctgtgcgacatggacgtgtytgatgcctatctgccttggcgccgcaacctgtccgacctcttccagtgggccgtgagccgtgyactgtgctcgccrcccgcctgcagygcctttccccgaggcgccatcagcagcgaggccgtgtgcaagccactgtgcgcgcggcagtccttcascctggcccgggaggcctgccsctcctacagccacgtggtgctcarggaggtgcgcttcttcaacctgcaggtgctctacccgctgctcagcgaccccgcgctcaacctacgcatcgtgcacckggtgcgcgamccgcgggycgtgctgcgctccygggagcagacagccaaggctctggcgcgtgacaacggcatcgtgctgggcaccaacggcacgtgggtggaggccgaccccggcctgcgcgtggtgcgcgaggtgtgccgtagccacgtacgcatcgccgaggccgccacactcaagccgccaccctttctgcgcggccgctaccgcctggtgcgcttcraggacctggcgcgggagccgctggcagaaatccgtgcgctctacgccttcactgggctcagtctcacgccacagctcgaggcctggatccataacatcacccacggatctggacctggtgcgcgccgcgaagccttcaakacttcgtccaggaatgcgctcaacgtctcccaggcctggcgccatgcgctgccctttgccaagatccgccgcgtgcaggaactgtgcgctggtgcgctgcagctgctgggctaccggcctgtgtactctgaggacgagcagcgcracctcgcccttgatctggtgctgccacgaggcctgaacggcttcacttgggcatcatccaccgcctcgcacccccgaaattagtggaggccacagttgtagcaggcgctaggcccgggaggagagtgcatggtgcagagggggctggggcgcacggagaagcaggtccctatattgaccaaggagtttgtggtacgacccctccccctccccaagtaggcaaggactgcacgtttctttctctcttgattcttggttttcctttgagtcctctggagctgccttctcatcaggtgcactcttcatggaaagcaactcttgcccctcctcctctgggcacagggtgtgcgttcagatgacttggctcctactcaagggctttcttcccctttaactctctccttctggtgacacatcctgcagcagctgagggggtgccctggcactggctgggagtggagaggcactgtggtgaaatggctccagaggtctgtacatcacatacatatgcacacaggcacacatggcaaaactcggaagtgaaaggacttgtctgaaatcacatggtgagaaggaggatgaagggaggagagagcttttgctctgggtctccagtggataggagaggacctgcctcctgggtgagaagggtcagattttcctattttaattgctttagggaagagcaagcagagtcatgaccagggacacagctgagagatagaggaggctgtgaatgctgagaccagagtttatcatgctggacaagcctggaaggaggcaataagtgggaaaggtaggaggagagaaggctggggagggctgggcagcaagccaggcacagtgagtggcagagcaagagggggaaagcaggatcagtgcctggaaggcaggtgtgcccgtcagcggggagtggaactcatcaggcttgccaagaggttggaagggaaatggctctgggctggaactgtcttcccttggtccttctggtccaggccttggaggaaagcagaggatgatccctgcctgtgagccacacctcctagctctgggggcaaaggggcttagtaaaggaatgctggatgtgtagagggtttagtcccgagctcaggaaatgagagcctataagtgcccagtacatgtttaaaagaagagctcatggaacctctggaaaggacagggaagttgagttagccacataaatgaacccaagtcacattggaacacagagctggtctgggaactgtgttggctgccaacagaacttctgaccctgttacctgtgaaatgaggcagtttccctcacgttgccatcagctaccaggagcgatgctggtggtcactagcttctgatcctcatcctgggtgtggccacagattgggggaacctggattgtggagtcacatcctccctgcaaagcaagcagggcaagggagatctggcattttctgctttacgtggagggagaacaggcacattagccttgaagctgaagctcattttaggttccttccaggtttagaagcttcaaccaaatgaaacttgaatctgtccctcgtgacaattataggaggaaggtatttaaaaccccagatttatgaatgtgtactacatggcttagagaatgtctttgttcttgttcaggtggktataacaaaataccttaagagtgg

SEQ ID NO: 519 - DNA, 3757 bp, Homo sapiens
ggaagagacgacgtttgggagcctttgctgagtccagggagagaggcgtcccccaccgtgccgctgcagctcgggcagagccgccaagctttggggtgctgaggaacctctaatcatctcccatggatttgtgatcagcgttgcagctctcccagcagccctggacagtggcccccagcagtcagcatgtggctgccgcgcgtctccagcacagcagtgaccgcgctcctcctggcgcagaccttcctcctcctctttctggtttcccggccagggycctcgtccccagcaggcggcgaggcgcgygtgcatgtgctggtgctgtcctcgtggygctcgggctcgtccttcgtgggccaactcttcaaccagcaccccgacgtcttctacctaatggakyccgcgtggcacgtgtggaccaccctgtcgcagggcagcgccgcmacgctgcacatggctgtgcgcgacctggtgcgctccgtcttcctgtgcgacatggacgtgtytgatgcctatctgccttggcgccgcaacctgtccgacctcttccagtgggccgtgagccgtgyactgtgctcgccrcccgcctgcagygcctttccccgaggcgccatcagcagcgaggccgtgtgcaagccactgtgcgcgcggcagtccttcascctggcccgggaggcctgccsctcctacagccacgtggtgctcarggaggtgcgcttcttcaacctgcaggtgctctacccgctgctcagcgaccccgcgctcaacctacgcatcgtgcacckggtgcgcgamccgcgggycgtgctgcgctccygggagcagacagccaaggctctggcgcgtgacaacggcatcgtgctgggcaccaacggcacgtgggtggaggccgaccccggcctgcgcgtggtgcgcgaggtgtgccgtagccacgtacgcatcgccgaggccgccacactcaagccgccaccctttctgcgcggccgctaccgcctggtgcgcttcraggacctggcgcgggagccgctggcagaaatccgtgcgctctacgccttcactgggctcagtctcacgccacagctcgaggcctggatccataacatcacccacggatctggacctggtgcgcgccgcgaagccttcaakacttcgtccaggaatgcgctcaacgtctcccaggcctggcgccatgcgctgccctttgccaagatccgccgcgtgcaggaactgtgcgctggtgcgctgcagctgctgggctaccggcctgtgtactctgaggacgagcagcgcracctcgcccttgatctggtgctgccacgaggcctgaacggcttcacttgggcatcatccaccgcctcgcacccccgaaattagtggaggccacagttgtagcaggcgctaggcccgggaggagagtgcatggtgcagagggggctggggcgcacggagaagcaggtccctatattgaccaaggagtttgtggtacgacccctccccctccccaagtaggcaaggactgcacgtttctttctctcttgattcttggttttcctttgagtcctctggagctgccttctcatcaggtgcactcttcatggaaagcaactcttgcccctcctcctctgggcacagggtgtgcgttcagatgacttggctcctactcaagggctttcttcccctttaactctctccttctggtgacacatcctgcagcagctgagggggtgccctggcactggctgggagtggagaggcactgtggtgaaatggctccagaggtctgtacatcacatacatatgcacacaggcacacatggcaaaactcggaagtgaaaggacttgtctgaaatcacatggtgagaaggaggatgaagggaggagagagcttttgctctgggtctccagtggataggagaggacctgcctcctgggtgagaagggtcagattttcctattttaattgctttagggaagagcaagcagagtcatgaccagggacacagctgagagatagaggaggctgtgaatgctgagaccagagtttatcatgctggacaagcctggaaggaggcaataagtgggaaaggtaggaggagagaaggctggggagggctgggcagcaagccaggcacagtgagtggcagagcaagagggggaaagcaggatcagtgcctggaaggcaggtgtgcccgtcagcggggagtggaactcatcaggcttgccaagaggttggaagggaaatggctctgggctggaactgtcttcccttggtccttctggtccaggccttggaggaaagcagaggatgatccctgcctgtgagccacacctcctagctctgggggcaaaggggcttagtaaaggaatgctggatgtgtagagggtttagtcccgagctcaggaaatgagagcctataagtgcccagtacatgtttaaaagaagagctcatggaacctctggaaaggacagggaagttgagttagccacataaatgaacccaagtcacattggaacacagagctggtctgggaactgtgttggctgccaacagaacttctgaccctgttacctgtgaaatgaggcagtttccctcacgttgccatcagctaccaggagcgatgctggtggtcactagcttctgatcctcatcctgggtgtggccacagattgggggaacctggattgtggagtcacatcctccctgcaaagcaagcagggcaagggagatctggcattttctgctttacgtggagggagaacaggcacattagccttgaagctgaagctcattttaggttccttccaggtttagaagcttcaaccaaatgaaacttgaatctgtccctcgtgacaattataggaggaaggtatttaaaaccccagatttatgaatgtgtactacatggcttagagaatgtctttgttcttgttcaggtggktataacaaaataccttaagagtgggattacaggcatgagccactgtacctggcgaaaaacagtttgttaacacaggcagccaacatcactcaggataagcctcaatgaaaagtaacaaagtgatggcttggaacactgtcttacacagcatttttaaaaaatacaataaatttgtagagataggatgaccaaggacaacagttttaggcttccaaaggtggtaaactatgggatggtaaatatccgagaggaagctgatgcaacaggatttgtctgcagcagcctctggtaccacctctgagtcaagggttgtgtccagtgatggagagtttatatcgtgcctttaggcagaaaaggggagggaaacctgaacttttcctgcactttctgcttcttaattgccttcagctgaaaatcattttttatgtgaaaaaggcatagtctgagctgacgcctctgctttcctccacctgaagagaacctgcgtgctgctccyttgcttcggacctccgcctctgcccgggagaaagcccaggccagcctgctggacaagcagagaccatgagaaggagagttcaggggtcccaatccaggccatcctagaccagccagctccagctgatccgcacgcagccacttcggctaccttctactggccaaagggagtcccagggctcacccagattcagaggtggggaaactgagtccaccacttgagaagagtagctataaagacatatgagcgagrccagctgagcccagcactgcggccaagtcgaagactttaggagcaataaaagtgcttattgtgtttcag

SEQ ID NO: 520 - DNA, 756 bp, Homo sapiens
atggcaccctccaggaagttcttcttggaggacctggaagatgaatgggtggaagaagagtcttggggagctcattgacactgaacgtgaccaaggtgccagccgacgctgaggtggtttgctctcccccaactgcctatatcgacttcacccagcagaagctagatcccaagattgctgtgcctgcgcagaactgctacaaagtgactaatggggcctttactggggagatcagccctggcataatcaaagactgcggagctacgtgggtagtcctggggcactcggagagaaggcatgtctttggggagtcagatgaactgattgagcagaaagtggcccgtgctctggcagagggacttggagtaatcacctgcattgggaagaagctagatgcaagggaagctggcatcactgagaaggttgttttcgagcaggcaaaggtcatcacagataaggtgaatggactaagcagcccagaagcccagtaactgcccctcccctgcacatgcttctgatggtgtcatctgccctcttttgtggcctcatccaaactgtaccttcctttactgtttatatcttcaccctgtaatggttgagaccaggccaatcccttctccgcttactataatggttggaactaaacgtcaccaaggtggcttctccttggctgaragatggaaagggtggaatttgctcctgggtcccctaggccccagtgaaggcaggagataaaccatcctctcccttcttaca

SEQ ID NO: 521 - DNA, 2732 bp, Homo sapiens
ttgctggaaggtataaaagaccagctcctccaagcagagcaactccctggctgccgtgaaaagacaaggcactgggcagtgatgagggtccttctccatctcccagccctcctggcttccctcatcttgcttcaggctgcagcatctaccacaagagcgcagactaccagaacctctgccatctccgatactgtgagtcaggccaaggtccaagtcaacaaggccttcctggactcccgaaccaggctgaagaccgccatgagctctgagactcccaccagccgacagctctcagaatacctcaagcatgccaaaggccggacgcgcacagccatccgcaatggacaggtgtgggaggagtctttaaagagactgaggcagaaggcatccttgaccaatgtcacagatcccagcctggacttgacttcactgtctctggaggtgggctgtggtgctcctgctcccgtggtgagatgcgacccgtgcagcccttaccgcaccattacsggagactgcaataacaggaggaagcctgcgctgggcgccgccaacagggctctggcgcgctggctgcccgcggagtacgaggacgggctctccctgcccttcggctggacgccggggaagacgcgcaacggcttccctctcccgctggcccgggaggtatctaacaagattgttggctatctgaatgaggagggtgttctggaccaaaacaggtccctgctcttcatgcagtggggtcagattgtggatcatgacctggactttgcccctgacaccgagctggggagtagcgagtactccaaagcccagtgtgatgagtactgtatccagggagacaactgcttccccatcatgttcccacccaatgaccccaaggcggggactcaagggaaatgcatgcctttcttccgagctgggttcgtctgccccactccaccctacaagtccctggcccgagagcagatcaacgctctgacctccttcctggatgccagctttgtgtacagctccgagccaagcctggccagccgcctccgcaacctcagcagccccctgggcctcatggctgtcaaccaggaggtctcagaccatggactaccctacctgccctatgacagcaagaagccaagcccctgtgagttcatcaacaccactgcccgtgtgccctgcttcctggcaggagattctcgagcctcagagcatattctgctggccacatcccacaccctctttctccgcgagcataaccggctggccagagaactaaagagactcaaccctcagtgggatggagagaagctctaccaggaagcccggaaaatcctgggagccttcrtgcagattatcacctttagggactacctacccattttgytaggtgaccacatgcagaagtggatacccccatatcaaggctacagtgaatctgtggatcccagaatttccaatgtcttcaccttcgccttccgctttggccacttggaggtcccctctagtatgttccgcctggatgagarttatcagccatgggggccagaaccagaactccccctccacaccctcttcttcaacacttggaggatggtcaaagatggtggaattgatcctctggtgcggggcctgctggccaagaaatccaagctgatgaaacagaataaaatgatgactggagagctgcgcaacaagcttttccagccaactcacaggatccatggctttgacctggctgccatcaacacacagcgttgccgggaccatgggcaacctgggtacaattcctggagagccttctgtgacctctcacagccgcagacactagaggagttgaacacagtgctgaagagcaagatgctggccaagaagttactgggtctctacgggacccctgacaacatcgacatctggataggggccattgctgagccrctggtggaaaggggtcgggtggggcctctcctggcctgcctcttgggcaagcagttccagcagatccgtgatggagacaggttctggtgggaaaaccctggggtcttcacgaacgagcagaaggactctctacagaaaatgtccttctcacgccttgtctgtgacaacacccgcatcaccaaggtcccacgggacccattytgggccaacagctacccctatgacttcgtggattgctcagccatcgacaagctggacctgtcaccctgggcctcagtgaagaattaggggcccgcgctgcacaggaaagttccctttggtccacagggccatttcaagcaagttcaatgacctggtcccttagagctccatatcccagtcccagcccttctttgcagctgggcctctctatayccctggatgaacagcttgctcaggccccagggtggctgcctcggccctcccagctcttacactcagctccagtggcttctcctttctgtcaagacttagccccgctgagatgcccttctgctccagcttgctggatgttacctgtcctcttccctccacaagtcttggcccttaacctttatctttcttcctgtcctctcacctagattgtaagctccctgggccaggacttcagcctgcctccgagggtcccctgtggcacctagcatggtgcacagcacattagaagtgctcaaaaacatctgatgactgactaaagatgctaggcgtgacaccgttccctccaaaagcagacctcggaatcactgccaaataagtaactagac

SEQ ID NO: 522 - DNA, 2723 bp, Homo sapiens
ttgctggaaggtataaaagaccagctcctccaagcagagcaactccctggctgccgtgaaaagacaaggcactgggcagtgatgagggtccttctccatctcccagccctcctggcttccctcatcttgcttcaggctgcagcatctaccacaagagcgcagactaccagaacctctgccatctccgatactgtgagtcaggccaaggtccaagtcaacaaggccttcctggactcccgaaccaggctgaagaccgccatgagctctgagactcccaccagccgacagctctcagaatacctcaagcatgccaaaggccggacgcgcacagccatccgcaatggacaggtgtgggaggagtctttaaagagactgaggcagaaggcatccttgaccaatgtcacagatcccagcctggacttgacttcactgtctctggaggtgggctgtggtgctcctgctcccgtggtgagatgcgacccgtgcagcccttaccgcaccattacsggagactgcaataacaggaggaagcctgcgctgggcgccgccaacagggctctggcgcgctggctgcccgcggagtacgaggacgggctctccctgcccttcggctggacgccggggaagacgcgcaacggcttccctctcccgctggcccgggaggtatctaacaagattgttggctatctgaatgaggagggtgttctggaccaaaacaggtccctgctcttcatgcagtggggtcagattgtggatcatgacctggactttgcccctgacaccgagctggggagtagcgagtactccaaagcccagtgtgatgagtactgtatccagggagacaactgcttccccatcatgttcccacccaatgaccccaaggcggggactcaagggaaatgcatgcctttcttccgagctgggttcgtctgccccactccaccctacaagtccctggcccgagagcagatcaacgctctgacctccttcctggatgccagctttgtgtacagctccgagccaagcctggccagccgcctccgcaacctcagcagccccctgggcctcatggctgtcaaccaggaggtctcagaccatggactaccctacctgccctatgacagcaagaagccaagcccctgtgagttcatcaacaccactgcccgtgtgccctgcttcctggcaggagattctcgagcctcagagcatattctgctggccacatcccacaccctctttctccgcgagcataaccggctggccagagaactaaagagactcaaccctcagtgggatggagagaagctctaccaggaagcccggaaaatcctgggagccttcrtgcagattatcacctttagggactacctacccattttgytaggtgaccacatgcagaagtggatacccccatatcaaggctacagtgaatctgtggatcccagaatttccaatgtcttcaccttcgccttccgctttggccacttggaggtcccctctagtatgttccgcctggatgagarttatcagccatgggggccagaaccagaactccccctccacaccctcttcttcaacacttggaggatggtcaaagatggtggaattgatcctctggtgcggggcctgctggccaagaaatccaagctgatgaaacagaataaaatgatgactggagagctgcgcaacaagcttttccagccaactcacaggatccatggctttgacctggctgccatcaacacacagcgttgccgggaccatgggcaacctgggtacaattcctggagagccttctgtgacctctcacagccgcagacactagaggagttgaacacagtgctgaagagcaagatgctggccaagaagttactgggtctctacgggacccctgacaacatcgacatctggataggggccattgctgagccrctggtggaaaggggtcgggtggggcctctcctggcctgcctcttgggcaagcagttccagcagatccgtgatggagacgttctggtgggaaaaccctggggtcttcacgaacgagcagaaggactctctacagaaaatgtccttctcacgccttgtctgtgacaacacccgcatcaccaaggtcccacgggacccattytgggccaacagctacccctatgacttcgtggattgctcagccatcgacaagctggacctgtcaccctgggcctcagtgaagaattaggggcccgcgctgcacaggaaagttccctttggtccacagggccatttcaagcaagttcaatgacctggtcccttagagctccatatcccagtcccagcccttctttgcagctgggcctctctatayccctggatgaacagcttgctcaggccccagggtggctgcctcggccctcccagctcttacactcagctccagtggcttctcctttctgtcaagacttagccccgctgagatgcccttctgctccagcttgctggatgttacctgtcctcttccctccacaagtcttggcccttaacctttatctttcttcctgtcctctcacctagattgtaagctccctgggccaggacttcagcctgcctccgagggtcccctgtggcacctagcatggtgcacagcacattagaagtgctcaaaaacatctgatgactgactaaagatgctaggcgtgacaccgttccctccaaaagcagacctcggaatcactgccaaataagta

SEQ ID NO: 523 - DNA, 2558 bp, Homo sapiens
caggatccccaggcctggagtggggtccgtgcatggccagctggctctgccccacggccagtcctgagcaggcctcccttgggccagcccgatgtgactgagcccagcagaccctgagcaagaagcaggtccatcgcggagccagagggcaggaggaacatgacatcayggaaatggtttcacccaaatatcactggtgtggaggcagaaaacctactgttgacaagaggagttgatggcagtttttcggcaaggcctagtaaaagtaaccctggagacgtcacactttctgttagaagaaatggagctgtcacccacaccaagattcagaacactggtgattgctatgacctgtatggaggggagaagtttgccactttggctgagttggtccagtattacatggaacatcatgggcaattaaaagagaagaatggagatgttattgagcttaaaaatcctctgaactgtgcagatcctacttctcaaaggtggtttcatggacacctctctggaaaagaagcagagaaattgttaactgaaaaaggaaagcatagtagctttcttgtacgagagagccagagccaccctggagattttgttctctccgtgtgcaccggtgatgacaaaggagagagcaatgacggcaagtctaaagtgactcatgtcatgattcactgtcaggaactgaaatacgatgttggtggaggagaacggtttgatgctttgacagatcttgtggaacattagaagaagaatcctatggtggaaacactgggtacagtactacaactcaagcagccccttaacacgacttgtacaaatgctgctgaaatagaaagcagagttcgagaactaagcaaattagctgagaccacagataaagtcagacaaggcttttgggaagaatttgagacactgcaacaacaggagtgcaaacttctctacagccaaaaagagggtcgaaggcaagaaaacaaaaccaaaaatagatataaaggcatcctgccctttgatcatagggttgtcctacacaatggtgatcccagtgaggctgtttcagattacatcaacgcagatatcatcatgcctgaatttgaaaccaagtgcaacaatttgtagcccaaaaagagttacattgccccacaaggctgcctgcaaaacactgtgaatgacttttggcggatagtgttccaagaaaactcccaggtgattgtcatgacaacgaaagaagtggagagaggaaagagtaaatgtgtcaaatactggcccgatgagtatgctctaaaagaatatggcatcgtgcatgttaggaacgtcaaagaaagcaccactcatgactataagctaagaaaacttaaactttcaaagattggacaagggaatatggagagaatggtctggcaataccacttgtggacctggctgtaccacggagtgccctgcgaccccaaaggcatgctgcacttcctggacgaagtgcaccataagcaggagagcatcatggatgcagggctggtcgtggtgccctgcagtgctggcattggccagacagggacgttcattgtgattgatattcttattgacatcatcagagagaaaggtgttgactgcgaaattgacgttcccaaaaccatccagatggtgcggtctcagaggtcagagatggtccagacagaagcacagtaccgatttatctatacggtggtccagcatcatattgaaacactacagcgcaggattgaggaagagcagaaaagcaagaggaaagggcacgaatatacaaatattaagtattctctagtggaccagacgagtggggatcagagccccctcctgccttatactccaatgccaccctgtgcagaaatgagagaagagagtgccagagtctatgaaaacgtgggcctgatgcaacagcagaaacatttaagatgagaaaacctgccaaaacttcagcacagaaatagatgtggactttcaccctctccctaaaaagatcaagagcagacgcaataaagtttatgtgaagacagaatttggatttggaaggcttgtgttgtggttgactaccttttgataagcaaaatttgaaatcatttaaaaaccactgtattttaactcaacaatacctgcttcccaattactcatttcctcagataagaagaaatcatctctacaatgtagacaacgttgtattttatagaattttgttttaaattgaggaagcagttaaattgtgtgctatattttgcagattatggggattcaaattctagttataggtttttgttgttttttttttttttctttttataaccttaaccagtttaatttttttttcattgtggggcaaggtaagaagaaatgatttgggaaaattaagtaacaacatcctagaaaagtgagaacaatctcatctaccatcatgtatccagtagtggataattcattttgatggcttctacttttggctaaatgagaattaagccagtgcctgagactgccagaagcttactggtctacctttgcattagcattaaggagtcatagaaaaa

SEQ ID NO: 524 - DNA, 1818 bp, Homo sapiens
tggtttcacccaaatatcactggtgtggaggcagaaaacctactgttgacaagaggagttgatggcagtgttttggcaaggcctaataaaagtaaccctggagacttcacactttccattagaagaaatggagctgtcacccacatttattatacctctgaaaggaactgaaatatgacgttggtggaggagaacggtttgattctttgacagatcttgaagaacattacaagaagaattccatggtggaaaccttgggtacagtactacaactcaagcatccccttaacacgactcatataaatgctgctgaaatagaaagcagagttcgagaactaagcaaattagctgagaccacagacaaagtcaaacaaggcttttgggaaaaatttgagacactacaacaacaggagtgcaaacttctctacagccgaaaagagggtcaaaggcaagaaaacaaaaacaaaaatagatataaaaacatcctaccctttgatcatackagggttgtcctacacgacggtgatcccgatgagcctgtttcagattacatcagtgcaaataccatcatgcctgaatttgaaaccargtgcaacaattcaaagcccaaaacgtgttacattgccacacaaggctgtcagcaaaacacagtgaatgacttttggcagatgaagttccaagaaaactcmcgagtgattgtcatgacaacaaaagaagtggakagaggaaagagtaaatgtgtcaaatactggcctgatgagtatgctttaaaagaatatggcgtcatgcgtgttaggaacgtcaaagaaagcgcagctcatgactatacactaagagaacttgaactttcaaagattggaccagggaatatggagagaacggtcgggcaatatcactttcggacctggccggaccatggagtgcccagcgaccccggggtcgtgctggacttcctggaggaggtgtaccataagcaggggagcatcacggatgcagggccggtcgtggtgcactgtagtgctggaattggcctgacagggacgttcattgtgattgatattcttactgacatcgtcagagagaaaggtgttgactgcaacattgacgttcccaaaaccatccagatgatgcggtctcagaggtcagggatggtccagacagaagcatagtaccgatttatctatacggcagtccagcattatattgaaacactgcagctcaggattgaagaagagcaaaaaagcaagaggaaagggcacgaatatataaatattaagtattctctagcggaccagaagagtggagatcagagccccctcctgccttgtactccaacgccaccctgtgcagaaatgagagaagacagtgctagagtctgaaaacgtgggcctgatgcagcagcagaaaagtttcagatgagaaaacctgccaaaacttcagcacagaaatagaagtggactttcaccctctctctgaaaagatcaagaacagatgcaagaaagtttatgtgaagacagaatttagatctggaaggcttgcattgtggttgactaccttttgataagcaaaatttgaaaccatttaaagatcactgtattttaactcaaaaatacctgcttcccaattacttatttcctcagataagaagaaatcatctcttcaatgtagacaacattatattttatagaatttgttttaaattgaggaagcagttaacttgtgcactgtattttgcagatgatggggattcaaattctagtaataggcttttttttttctttttataaccttaaccagtttaaktttttttcctcattg

SEQ ID NO: 525 - DNA, 734 bp, Homo sapiens
atgccaccgccgctgggagccctgtactatcagccatggtcaaccccactgttcttcaacattgctgacgaaggcaagcccttgggcygcgtctccttcaacctgtttgcagacaagattccaaagacagcagaaaactttcatgctctgagcactggcgagaaaggatttggttttaagggtttccgctttcacagaattattccagggtttatgtatcagggtggtgacttcacacccataatggcactggtggcaagtccatttacggggagaaatttggtgatgaaaacttcatcctaaagcatacaggtcctrgcatcttgtccatggcaaatgctggacccracacaaacggttcccagtttttcatctgcactgccaagactgagtggttggatggcaagcatgtggtctgtggcaaggcgaaagaaggcaagaatattgtggaggccatggagcgctgtggttccaggaatggyaagaccagcaagaagatcaccattgctgactgtgaacaactctaataagtttgacttgtgttttatcttaaccaccagaccattccttctgtagctcaggagagcacccctccaccccatttgctctcagtatcctagaatctttgtgctcttgctgcagttccctttgggttccatgttttccttgttcccttccgtgcctagctggattgcagtgttaagtttatgattatgaataaaaacraaataaca

SEQ ID NO: 526 - DNA, 2721 bp, Homo sapiens
aggaaaagagccacgaaataaccgggagacaagctttcggaggcttttgactgactggatgtgggaatgttgtggaagacttctggcctgccatttcctgagaacgggactgctgagagaggagctgggaggagcactgcaaatttcactttggacacgtgcatggctgcctcctaatcccatagtccagaggaggcatccctaggactgcgggcaagggagccgggcaagcccagggcagccttgaaccgtsccctggcctgccctccccrgtgggggccaggatgctgaagaagcagtctgcagggcttgtgctgtggggcgctatcctctttgtggcctggaatgccctgctgctcctcttcttctggacgcgcccagcacctggcaggccaccctcagtcagcgctctcratgrcgaccccgccagcctcacccgggaagtgattcgcctggcccaagacgccgaggtggagctggagcggcagcgtgrgctgctgcagcagatcggggatgccctgtcgagccagcgggggagggtgcccaccgcggcccctcccgcccagccgcgtgtgcctgtgacccccgcgccggcggtgattcccatcctggtcatcgcctgtgaccgcagcactgttcggcgctgcctggacaagctgctgcattatcggccctcggctgagctcttccccatcatcgttagccaggactgcgggcacgaggagacggcccaggccatcgcctcctacggcagcgcggtcacgcacatccggcagcccgacctgagcagcattgcggtgccgccggaccaccgcaagttccagggctactacaagatcgcgcgccactaccgctgggcgctgggccaggtcttccggcagtttcgcttccccgcggccgtggtggtggaggatgacctggaggtggccccggacttcttcgagtactttcrggccacctatccgctgctgaaggccgacccctccctgtggtgcgtctcggcctggaatgacaacggcaaggagcagatggtggacgccagcaggcctgagctgctctaccgcaccgactttttccctggcctgggctggctgctgttggccgagctctgggctgagctggagcccaagtggccaaaggcyttctgggacgactggatgcggcggccggagcagcggcaggggcgggcctgcatacgccctgagatctcaagaacgatgacctttggccgcaagggtgtgagccacgggcagttctttgaccagcacctcaagtttatcaagctgaaccagcagtttgtgcacttcacccagctggacctgtcttacctgcagcgggaggcctatgaccgagatttcctcgcccgcgtctacggtgctccccagctgcaggtggagaaagtgaggaccaatgaccggaaggagytgggggaggtkcgggtgcagtatacgggcagggacagcttcaaggctttcgccaaggctctgggtgtcatggatgaccttaagtcgggggttccgagagctggctaccggggtattgtcaccttccagttccggggccgccgtgtccacctggcgcccccacygacgtgggagggctatgatcctagctggaattagcacctgcctgtccttcctgggcccctccttgccacatcatgagctgaggtgggaccacagtccccaggctgcatcggcctgcctgtgtttccctcttaggtgcatttatctttttgatttttccgagtggcatttaagtgcacaaatgataacaagaggattattctcccgttctcaagggagtcagatcaggggaactattctagggtatgttgcggggtattaagcaggaaaccactgtgtggtggggggcactgggcttgttggggccagaaatgtccacgtcctgagctttctcctggagcatgtgcagagagtttggcaacgttcgctctcttgaccagaccccttctccctgacctggctcttccagccagggcacgagccctccttctatacctgctccccttcccccagtggggactgagttatgggagaaggggacatatttgtggccaaaatgatactaaccaaaggggcttccttgtcagggcctggtggagttggtgggtcatcggggctcactgcctcctgcccttctctcctgtctgacccccacttagcccttctctccttgcagcctagcagtttatagttctgagatggaaagttgaagggggcaagcaagacctctcctcagcccatgcccagctgtcaggagagaggtgcagggaggaaggccttgtgctgggacaacctctctcttgccttacctcagagagggactatgccctgacccctcctttytgaaaatcagtgccctccctgttgctctaggaggctcctgctggcttggtagaagacagaattcgatctgcctgtccctttttcccctggggtttgacacacaggctcctctcagcatgaggtggagcagtgaccaggtggagcagtgaccaggacgcctctggcccagtgctgcccagcctccccgcccgctcccaggcgccccatgtcctcacaggccaggacgccatggcaggatggagaggacttggtggatttttktttcttkcctgacctcagtttcatgaaagaaagtggaagctacagaattattttctaaaataaaggctgaattgtctgaaaaatatttatg

SEQ ID NO: 527 - DNA, 896 bp, Homo sapiens
ccgcgacgcatgcgtgcttcttcccgcgcggctccacctgccgcgcgcttccgctgctggccagtctcttctgcccctccccctcctgttaacacagaaatctgcctcctgggccatgccgcttctaaggcctgtttcttctcatgagccccagcacaagacagatgggccagttctcacagtggataacttcccctgcctgagcaagagatgggatagtatctgggatctgtccatcaccagactctgagcttaataaggcagctgaatgaagggaggtaacggacccctgagaggggcactgaagtctgcagtggggggggaggggcctggacacaccccttcccccccagactcctccccgtcagggtcagctcagccatggactttggacctggataagaagagagaagctgcactttggtggatctgatttgggattctcagttttgaaaatggagtgctgaatggggatttgatgatctcctggagagcaactgagacaagagaagaaaggtaaggctcctgtctcatttcccacttaatgtcttgctgtgcctgtgcagaaggtgttgagctggcgagttcrcggaggctactattcaggaaatcttatccagatgagtacactggaagctacacctctccattactctgtccrgagcctggcagagagcaggtgtgtgatacacgtcgtcaggtgactgaccgaggaattcagggcaaacagatcatctcaatttgccttgctgatgtgccagctgggattacgctgatggatgaagctcttcagagctatgggcaatatctacatatttgattgtcaagaaacttcgtgtggaaatagcttcaaacttacacaaattgcaagaataaaaaatagtataaggatattc

SEQ ID NO: 528 - DNA, 2819 bp, Homo sapiens
gmctgtagtcctcggctacccaccctcaccgcctggggtcccatggtgagacagctgggtgggcatcaggcttctgcagagggccaggccggagggagctgggcgagggagtggggctggctcctggcttgcaccggcctcgtggaatccaggcctcagacctgatcgctggcgaaactggctctgtgcgctggagyccctggtcttctgcgtctstcctcctcccggccagactttactcctggctcagcgacaggtgcatggctgcctcctaatcccatagtccagaggaggcatccctaggactgcgggcaagggagccgggcaagcccagggcagccttgaaccgtsccctggcctgccctccccrgtgggggccaggatgctgaagaagcagtctgcagggcttgtgctgtggggcgctatcctctttgtggcctggaatgccctgctgctcctcttcttctggacgcgcccagcacctggcaggccaccctcagtcagcgctctcratgrcgaccccgccagcctcacccgggaagtgattcgcctggcccaagacgccgaggtggagctggagcggcagcgtgrgctgctgcagcagatcggggatgccctgtcgagccagcgggggagggtgcccaccgcggcccctcccgcccagccgcgtgtgcctgtgacccccgcgccggcggtgattcccatcctggtcatcgcctgtgaccgcagcactgttcggcgctgcctggacaagctgctgcattatcggccctcggctgagctcttccccatcatcgttagccaggactgcgggcacgaggagacggcccaggccatcgcctcctacggcagcgcggtcacgcacatccggcagcccgacctgagcagcattgcggtgccgccggaccaccgcaagttccagggctactacaagatcgcgcgccactaccgctgggcgctgggccaggtcttccggcagtttcgcttccccgcggccgtggtggtggaggatgacctggaggtggccccggacttcttcgagtactttcrggccacctatccgctgctgaaggccgacccctccctgtggtgcgtctcggcctggaatgacaacggcaaggagcagatggtggacgccagcaggcctgagctgctctaccgcaccgactttttccctggcctgggctggctgctgttggccgagctctgggctgagctggagcccaagtggccaaaggcyttctgggacgactggatgcggcggccggagcagcggcaggggcgggcctgcatacgccctgagatctcaagaacgatgacctttggccgcaagggtgtgagccacgggcagttctttgaccagcacctcaagtttatcaagctgaaccagcagtttgtgcacttcacccagctggacctgtcttacctgcagcgggaggcctatgaccgagatttcctcgcccgcgtctacggtgctccccagctgcaggtggagaaagtgaggaccaatgaccggaaggagytgggggaggtkcgggtgcagtatacgggcagggacagcttcaaggctttcgccaaggctctgggtgtcatggatgaccttaagtcgggggttccgagagctggctaccggggtattgtcaccttccagttccggggccgccgtgtccacctggcgcccccacygacgtgggagggctatgatcctagctggaattagcacctgcctgtccttcctgggcccctccttgccacatcatgagctgaggtgggaccacagtccccaggctgcatcggcctgcctgtgtttccctcttaggtgcatttatctttttgatttttccgagtggcatttaagtgcacaaatgataacaagaggattattctcccgttctcaagggagtcagatcaggggaactattctagggtatgttgcggggtattaagcaggaaaccactgtgtggtggggggcactgggcttgttggggccagaaatgtccacgtcctgagctttctcctggagcatgtgcagagagtttggcaacgttcgctctcttgaccagaccccttctccctgacctggctcttccagccagggcacgagccctccttctatacctgctccccttcccccagtggggactgagttatgggagaaggggacatatttgtggccaaaatgatactaaccaaaggggcttccttgtcagggcctggtggagttggtgggtcatcggggctcactgcctcctgcccttctctcctgtctgacccccacttagcccttctctccttgcagcctagcagtttatagttctgagatggaaagttgaagggggcaagcaagacctctcctcagcccatgcccagctgtcaggagagaggtgcagggaggaaggccttgtgctgggacaacctctctcttgccttacctcagagagggactatgccctgacccctcctttytgaaaatcagtgccctccctgttgctctaggaggctcctgctggcttggtagaagacagaattcgatctgcctgtccctttttcccctggggtttgacacacaggctcctctcagcatgaggtggagcagtgaccaggtggagcagtgaccaggacgcctctggcccagtgctgcccagcctccccgcccgctcccaggcgccccatgtcctcacaggccaggacgccatggcaggatggagaggacttggtggatttttktttcttkcctgacctcagtttcatgaaagaaagtggaagctacagaattattttctaaaataaaggctgaattgtctgaaaaatatttatg

SEQ ID NO: 529 - DNA, 3088 bp, Homo sapiens
aggggggaaggagtgcgaggggagggccgggccgctgggggtcgagggggtggggcctgggccrgcgctggggatcgggcctggggcctggattgcgacccgsggcgggccgcggctcctagccgagacggggcgggcgggaaccaggttaacacagaaatctgcctcctgggccatgccgcttctaaggcctgtttcttctcatgagccccagcacaagacagatgggccagttctcacagtggataacttcccctgcctgagcaagagatgggatagtatctgggatctgtccatcaccagactctgagcttaataaggcagctgaatgaagggaggtaacggacccctgagaggggcactgaactccccgtcagggtcagctcagccatggactttggacctggataagaagagagaagctgcactttggtggatctgatttgggattctcagttttgaaaatggagtgctgaatggggatttgatgatctcctggagagcaactgagacaagagaagaaaggtgcatggctgcctcctaatcccatagtccagaggaggcatccctaggactgcgggcaagggagccgggcaagcccagggcagccttgaaccgtsccctggcctgccctccccrgtgggggccaggatgctgaagaagcagtctgcagggcttgtgctgtggggcgctatcctctttgtggcctggaatgccctgctgctcctcttcttctggacgcgcccagcacctggcaggccaccctcagtcagcgctctcratgrcgaccccgccagcctcacccgggaagtgattcgcctggcccaagacgccgaggtggagctggagcggcagcgtgrgctgctgcagcagatcggggatgccctgtcgagccagcgggggagggtgcccaccgcggcccctcccgcccagccgcgtgtgcctgtgacccccgcgccggcggtgattcccatcctggtcatcgcctgtgaccgcagcactgttcggcgctgcctggacaagctgctgcattatcggccctcggctgagctcttccccatcatcgttagccaggactgcgggcacgaggagacggcccaggccatcgcctcctacggcagcgcggtcacgcacatccggcagcccgacctgagcagcattgcggtgccgccggaccaccgcaagttccagggctactacaagatcgcgcgccactaccgctgggcgctgggccaggtcttccggcagtttcgcttccccgcggccgtggtggtggaggatgacctggaggtggccccggacttcttcgagtactttcrggccacctatccgctgctgaaggccgacccctccctgtggtgcgtctcggcctggaatgacaacggcaaggagcagatggtggacgccagcaggcctgagctgctctaccgcaccgactttttccctggcctgggctggctgctgttggccgagctctgggctgagctggagcccaagtggccaaaggcyttctgggacgactggatgcggcggccggagcagcggcaggggcgggcctgcatacgccctgagatctcaagaacgatgacctttggccgcaagggtgtgagccacgggcagttctttgaccagcacctcaagtttatcaagctgaaccagcagtttgtgcacttcacccagctggacctgtcttacctgcagcgggaggcctatgaccgagatttcctcgcccgcgtctacggtgctccccagctgcaggtggagaaagtgaggaccaatgaccggaaggagytgggggaggtkcgggtgcagtatacgggcagggacagcttcaaggctttcgccaaggctctgggtgtcatggatgaccttaagtcgggggttccgagagctggctaccggggtattgtcaccttccagttccggggccgccgtgtccacctggcgcccccacygacgtgggagggctatgatcctagctggaattagcacctgcctgtccttcctgggcccctccttgccacatcatgagctgaggtgggaccacagtccccaggctgcatcggcctgcctgtgtttccctcttaggtgcatttatctttttgatttttccgagtggcatttaagtgcacaaatgataacaagaggattattctcccgttctcaagggagtcagatcaggggaactattctagggtatgttgcggggtattaagcaggaaaccactgtgtggtggggggcactgggcttgttggggccagaaatgtccacgtcctgagctttctcctggagcatgtgcagagagtttggcaacgttcgctctcttgaccagaccccttctccctgacctggctcttccagccagggcacgagccctccttctatacctgctccccttcccccagtggggactgagttatgggagaaggggacatatttgtggccaaaatgatactaaccaaaggggcttccttgtcagggcctggtggagttggtgggtcatcggggctcactgcctcctgcccttctctcctgtctgacccccacttagcccttctctccttgcagcctagcagtttatagttctgagatggaaagttgaagggggcaagcaagacctctcctcagcccatgcccagctgtcaggagagaggtgcagggaggaaggccttgtgctgggacaacctctctcttgccttacctcagagagggactatgccctgacccctcctttytgaaaatcagtgccctccctgttgctctaggaggctcctgctggcttggtagaagacagaattcgatctgcctgtccctttttcccctggggtttgacacacaggctcctctcagcatgaggtggagcagtgaccaggtggagcagtgaccaggacgcctctggcccagtgctgcccagcctccccgcccgctcccaggcgccccatgtcctcacaggccaggacgccatggcaggatggagaggacttggtggatttttktttcttkcctgacctcagtttcatgaaagaaagtggaagctacagaattattttctaaaataaaggctgaattgtctgaaaaatatttatg

SEQ ID NO: 530 - DNA, 2754 bp, Homo sapiens
gccaggtcaaaggagagggtggaggaaaagagccacgaaataaccgggagacaagctttcggaggcttttgactgactggatgtgggaatgttgtggaagacttctggcctgccatttcctgagaacgggactgctgagagaggagctgggaggagcactgcaaatttcactttggacacgtgagtcagaggtgcatggctgcctcctaatcccatagtccagaggaggcatccctaggactgcgggcaagggagccgggcaagcccagggcagccttgaaccgtsccctggcctgccctccccrgtgggggccaggatgctgaagaagcagtctgcagggcttgtgctgtggggcgctatcctctttgtggcctggaatgccctgctgctcctcttcttctggacgcgcccagcacctggcaggccaccctcagtcagcgctctcratgrcgaccccgccagcctcacccgggaagtgattcgcctggcccaagacgccgaggtggagctggagcggcagcgtgrgctgctgcagcagatcggggatgccctgtcgagccagcgggggagggtgcccaccgcggcccctcccgcccagccgcgtgtgcctgtgacccccgcgccggcggtgattcccatcctggtcatcgcctgtgaccgcagcactgttcggcgctgcctggacaagctgctgcattatcggccctcggctgagctcttccccatcatcgttagccaggactgcgggcacgaggagacggcccaggccatcgcctcctacggcagcgcggtcacgcacatccggcagcccgacctgagcagcattgcggtgccgccggaccaccgcaagttccagggctactacaagatcgcgcgccactaccgctgggcgctgggccaggtcttccggcagtttcgcttccccgcggccgtggtggtggaggatgacctggaggtggccccggacttcttcgagtactttcrggccacctatccgctgctgaaggccgacccctccctgtggtgcgtctcggcctggaatgacaacggcaaggagcagatggtggacgccagcaggcctgagctgctctaccgcaccgactttttccctggcctgggctggctgctgttggccgagctctgggctgagctggagcccaagtggccaaaggcyttctgggacgactggatgcggcggccggagcagcggcaggggcgggcctgcatacgccctgagatctcaagaacgatgacctttggccgcaagggtgtgagccacgggcagttctttgaccagcacctcaagtttatcaagctgaaccagcagtttgtgcacttcacccagctggacctgtcttacctgcagcgggaggcctatgaccgagatttcctcgcccgcgtctacggtgctccccagctgcaggtggagaaagtgaggaccaatgaccggaaggagytgggggaggtkcgggtgcagtatacgggcagggacagcttcaaggctttcgccaaggctctgggtgtcatggatgaccttaagtcgggggttccgagagctggctaccggggtattgtcaccttccagttccggggccgccgtgtccacctggcgcccccacygacgtgggagggctatgatcctagctggaattagcacctgcctgtccttcctgggcccctccttgccacatcatgagctgaggtgggaccacagtccccaggctgcatcggcctgcctgtgtttccctcttaggtgcatttatctttttgatttttccgagtggcatttaagtgcacaaatgataacaagaggattattctcccgttctcaagggagtcagatcaggggaactattctagggtatgttgcggggtattaagcaggaaaccactgtgtggtggggggcactgggcttgttggggccagaaatgtccacgtcctgagctttctcctggagcatgtgcagagagtttggcaacgttcgctctcttgaccagaccccttctccctgacctggctcttccagccagggcacgagccctccttctatacctgctccccttcccccagtggggactgagttatgggagaaggggacatatttgtggccaaaatgatactaaccaaaggggcttccttgtcagggcctggtggagttggtgggtcatcggggctcactgcctcctgcccttctctcctgtctgacccccacttagcccttctctccttgcagcctagcagtttatagttctgagatggaaagttgaagggggcaagcaagacctctcctcagcccatgcccagctgtcaggagagaggtgcagggaggaaggccttgtgctgggacaacctctctcttgccttacctcagagagggactatgccctgacccctcctttytgaaaatcagtgccctccctgttgctctaggaggctcctgctggcttggtagaagacagaattcgatctgcctgtccctttttcccctggggtttgacacacaggctcctctcagcatgaggtggagcagtgaccaggtggagcagtgaccaggacgcctctggcccagtgctgcccagcctccccgcccgctcccaggcgccccatgtcctcacaggccaggacgccatggcaggatggagaggacttggtggatttttktttcttkcctgacctcagtttcatgaaagaaagtggaagctacagaattattttctaaaataaaggctgaattgtctgaaaaatatttatg

SEQ ID NO: 531 - DNA, 2932 bp, Homo sapiens
gggttgcgccagggagccggaaagccgactcccgaagttggggtcctgggaaaacttgggtcctgggttgactgagaagcggcggggaaaggaggcgggccaggaggagggggcctggcggacgccggccggggggcggggcgcggcggggctgtcggtcacgcccctcagtccgccccgccccgccccgcctgccggggaagggccacgttgcccgcccggccgtccggccccggcgcgccgcagaaagggctggcgagtcgaaaggcgaggcggccgcgrcagcgcttgggacgcgcctgggcaccgggctcgctccctgcgccccggagcaggccaagttcggggccaggacgtcgggaggacctggtgcatggctgcctcctaatcccatagtccagaggaggcatccctaggactgcgggcaagggagccgggcaagcccagggcagccttgaaccgtsccctggcctgccctccccrgtgggggccaggatgctgaagaagcagtctgcagggcttgtgctgtggggcgctatcctctttgtggcctggaatgccctgctgctcctcttcttctggacgcgcccagcacctggcaggccaccctcagtcagcgctctcratgrcgaccccgccagcctcacccgggaagtgattcgcctggcccaagacgccgaggtggagctggagcggcagcgtgrgctgctgcagcagatcggggatgccctgtcgagccagcgggggagggtgcccaccgcggcccctcccgcccagccgcgtgtgcctgtgacccccgcgccggcggtgattcccatcctggtcatcgcctgtgaccgcagcactgttcggcgctgcctggacaagctgctgcattatcggccctcggctgagctcttccccatcatcgttagccaggactgcgggcacgaggagacggcccaggccatcgcctcctacggcagcgcggtcacgcacatccggcagcccgacctgagcagcattgcggtgccgccggaccaccgcaagttccagggctactacaagatcgcgcgccactaccgctgggcgctgggccaggtcttccggcagtttcgcttccccgcggccgtggtggtggaggatgacctggaggtggccccggacttcttcgagtactttcrggccacctatccgctgctgaaggccgacccctccctgtggtgcgtctcggcctggaatgacaacggcaaggagcagatggtggacgccagcaggcctgagctgctctaccgcaccgactttttccctggcctgggctggctgctgttggccgagctctgggctgagctggagcccaagtggccaaaggcyttctgggacgactggatgcggcggccggagcagcggcaggggcgggcctgcatacgccctgagatctcaagaacgatgacctttggccgcaagggtgtgagccacgggcagttctttgaccagcacctcaagtttatcaagctgaaccagcagtttgtgcacttcacccagctggacctgtcttacctgcagcgggaggcctatgaccgagatttcctcgcccgcgtctacggtgctccccagctgcaggtggagaaagtgaggaccaatgaccggaaggagytgggggaggtkcgggtgcagtatacgggcagggacagcttcaaggctttcgccaaggctctgggtgtcatggatgaccttaagtcgggggttccgagagctggctaccggggtattgtcaccttccagttccggggccgccgtgtccacctggcgcccccacygacgtgggagggctatgatcctagctggaattagcacctgcctgtccttcctgggcccctccttgccacatcatgagctgaggtgggaccacagtccccaggctgcatcggcctgcctgtgtttccctcttaggtgcatttatctttttgatttttccgagtggcatttaagtgcacaaatgataacaagaggattattctcccgttctcaagggagtcagatcaggggaactattctagggtatgttgcggggtattaagcaggaaaccactgtgtggtggggggcactgggcttgttggggccagaaatgtccacgtcctgagctttctcctggagcatgtgcagagagtttggcaacgttcgctctcttgaccagaccccttctccctgacctggctcttccagccagggcacgagccctccttctatacctgctccccttcccccagtggggactgagttatgggagaaggggacatatttgtggccaaaatgatactaaccaaaggggcttccttgtcagggcctggtggagttggtgggtcatcggggctcactgcctcctgcccttctctcctgtctgacccccacttagcccttctctccttgcagcctagcagtttatagttctgagatggaaagttgaagggggcaagcaagacctctcctcagcccatgcccagctgtcaggagagaggtgcagggaggaaggccttgtgctgggacaacctctctcttgccttacctcagagagggactatgccctgacccctcctttytgaaaatcagtgccctccctgttgctctaggaggctcctgctggcttggtagaagacagaattcgatctgcctgtccctttttcccctggggtttgacacacaggctcctctcagcatgaggtggagcagtgaccaggtggagcagtgaccaggacgcctctggcccagtgctgcccagcctccccgcccgctcccaggcgccccatgtcctcacaggccaggacgccatggcaggatggagaggacttggtggatttttktttcttkcctgacctcagtttcatgaaagaaagtggaagctacagaattattttctaaaataaaggctgaattgtctgaaaaatatttatg

SEQ ID NO: 532 - DNA, 2852 bp, Homo sapiens
tccttgcccctcccctcctccttcccacctggaggggaaatgaaatctgacaggtagaaagaggggagttggggttctttttctctctccctccaccagcatcactctctgcctctccctcaaaaatacgttsctgggtcaggatatatgttgactccctagagagctctggagtcaacctcctggccttcctccaccctcactcttggccttttcctgcccccatttcctctacctgtggggcatggagccacragcctttgtgtgacggtttgctttctctctcctgtctttaggtgcatggctgcctcctaatcccatagtccagaggaggcatccctaggactgcgggcaagggagccgggcaagcccagggcagccttgaaccgtsccctggcctgccctccccrgtgggggccaggatgctgaagaagcagtctgcagggcttgtgctgtggggcgctatcctctttgtggcctggaatgccctgctgctcctcttcttctggacgcgcccagcacctggcaggccaccctcagtcagcgctctcratgrcgaccccgccagcctcacccgggaagtgattcgcctggcccaagacgccgaggtggagctggagcggcagcgtgrgctgctgcagcagatcggggatgccctgtcgagccagcgggggagggtgcccaccgcggcccctcccgcccagccgcgtgtgcctgtgacccccgcgccggcggtgattcccatcctggtcatcgcctgtgaccgcagcactgttcggcgctgcctggacaagctgctgcattatcggccctcggctgagctcttccccatcatcgttagccaggactgcgggcacgaggagacggcccaggccatcgcctcctacggcagcgcggtcacgcacatccggcagcccgacctgagcagcattgcggtgccgccggaccaccgcaagttccagggctactacaagatcgcgcgccactaccgctgggcgctgggccaggtcttccggcagtttcgcttccccgcggccgtggtggtggaggatgacctggaggtggccccggacttcttcgagtactttcrggccacctatccgctgctgaaggccgacccctccctgtggtgcgtctcggcctggaatgacaacggcaaggagcagatggtggacgccagcaggcctgagctgctctaccgcaccgactttttccctggcctgggctggctgctgttggccgagctctgggctgagctggagcccaagtggccaaaggcyttctgggacgactggatgcggcggccggagcagcggcaggggcgggcctgcatacgccctgagatctcaagaacgatgacctttggccgcaagggtgtgagccacgggcagttctttgaccagcacctcaagtttatcaagctgaaccagcagtttgtgcacttcacccagctggacctgtcttacctgcagcgggaggcctatgaccgagatttcctcgcccgcgtctacggtgctccccagctgcaggtggagaaagtgaggaccaatgaccggaaggagytgggggaggtkcgggtgcagtatacgggcagggacagcttcaaggctttcgccaaggctctgggtgtcatggatgaccttaagtcgggggttccgagagctggctaccggggtattgtcaccttccagttccggggccgccgtgtccacctggcgcccccacygacgtgggagggctatgatcctagctggaattagcacctgcctgtccttcctgggcccctccttgccacatcatgagctgaggtgggaccacagtccccaggctgcatcggcctgcctgtgtttccctcttaggtgcatttatctttttgatttttccgagtggcatttaagtgcacaaatgataacaagaggattattctcccgttctcaagggagtcagatcaggggaactattctagggtatgttgcggggtattaagcaggaaaccactgtgtggtggggggcactgggcttgttggggccagaaatgtccacgtcctgagctttctcctggagcatgtgcagagagtttggcaacgttcgctctcttgaccagaccccttctccctgacctggctcttccagccagggcacgagccctccttctatacctgctccccttcccccagtggggactgagttatgggagaaggggacatatttgtggccaaaatgatactaaccaaaggggcttccttgtcagggcctggtggagttggtgggtcatcggggctcactgcctcctgcccttctctcctgtctgacccccacttagcccttctctccttgcagcctagcagtttatagttctgagatggaaagttgaagggggcaagcaagacctctcctcagcccatgcccagctgtcaggagagaggtgcagggaggaaggccttgtgctgggacaacctctctcttgccttacctcagagagggactatgccctgacccctcctttytgaaaatcagtgccctccctgttgctctaggaggctcctgctggcttggtagaagacagaattcgatctgcctgtccctttttcccctggggtttgacacacaggctcctctcagcatgaggtggagcagtgaccaggtggagcagtgaccaggacgcctctggcccagtgctgcccagcctccccgcccgctcccaggcgccccatgtcctcacaggccaggacgccatggcaggatggagaggacttggtggatttttktttcttkcctgacctcagtttcatgaaagaaagtggaagctacagaattattttctaaaataaaggctgaattgtctgaaaaat

SEQ ID NO: 533 - DNA, 1528 bp, Homo sapiens
atggacagccaggacaggaaggtggtggtgtacaacaacagcaccgggcttgtgaagtgtggttatatgcaggctctaactttccagaagacatcttcccagctttggttggaagacctattatcagatcaaccaccaaagtgggaaacattgaacaaggatcttatggttggtgatgaggcaggtgaattacgatcaatgttggaagttaattaccctatggaaaatggcatagtaagaaattaggatgacgtgaaamacctgtgggactacacgtttggaccagagaaacttaatatagataccagaaattgtaaaatcttactcacagaacctcctatgaacccaaccaaaaacacagagaagactgtagaggtaatgtttgaaacttagcagttttccggtgtatatgtagccatccagacggttctgactttgtacgctcaaggtttattgactggtgtagcggtagactctggagatagtgtgagtcatatttgcccagtatatgaaggcttttctctccctcatcttaccaggagactggatattgctgagagggatrtaactagataccaggttgcttctattgcgaggatatgccttcaaccaccctgctgattttgaaacggtttgcatgattaaagaaaaactgttacgtgggatataatattgagcaagagcagaaactggccttagaaaccaaagtattagttgaatcttatacattcccagatggacatatcatcaaagttggaggggagagatttgaagcaccagaarttttatttcagcctcacttgatcartgttgaaggagttggtgttgctgaattgcttttgaacacaattcaggcagctgacattgatacctgatctgaatcctacaaacacattgtgctttctggagggtctactatgtatcctggcctgtcatcaaggttggaacgagaacttaaacagctttacttagaacgagttttaaagggtgatgtggaaaaactttttaaatttaagatccgcatygaagacctacccctcagaaagcacatgggtggtgcagttctagcagataccatgaaagacaaagacaacttttggatgacccgacaagagtaccaagaaaggggtgtccgtgtgctagagaaacttggtgtgactgttcgataaactccaaagcttkttcccatcacacccgtaatgctttcttttttcctttattgccaatcttttgaactcattcaacgcctggacatggaagaggcctctgtgtgccttttgactggaaaggtcaagttttattctggtgtcttgaggaagctttgttaaatttttgttaatgtgggtaaatctgaatttagttcaactgcttccctacatagacaagcgggctaagggtcctgtctgctgctttgtttcttctaagtaggcatttagatcattcctgtaggcttcctattttcactttgctgctctaatgccgctagttgtagtctttagcacgctaggtggtatgcctttattagcat

SEQ ID NO: 534 - DNA, 2033 bp, Homo sapiens
atgggaatgcagagccgtactgtggcaccgcggtctaggcacttcttggacagcatgtctcacctgctgatgaaactcctgagcaaggaaatggagaagcagaacctcaaattgtggcagtggaacctaaagttgcagggggmctcaaatmtgaccctaccagaaactcaaaatggagatgtgtctgaagaaacaatgggaggtagaaaggttaaaaaatcaaaacattctataaatgtggccttatcagaasctcaaaatggagacgtgtctcaagaaacagtggaaaatgtaaaagttaaaaaatctccccagaaatccaccatattaaccaatggagatgcagaaatgcagtctcccaagtcagaatcaaaaaagaaaaagaagaagaaaaagagaaaaatggcgaatgaygctgggcctgataaaaaaaaagcaaaaactgaaaacaaaggagaatctgaagaataaagtgccgagacttctaaagaaacagaaaataatgtggagaagctagataatgatgaagatgacagtgaggtgcccagcctgctcctgggactgacaggagcttttgaggatacttcatttgcttctctatgtaatcttgtcaatgaaaacactctgaaggaaataaaagaaatgggctttaccaacatggctgaaattcagcataaaactatcagaccacttctggaaggcagggatcttctagcagctgtaaaaacaggcagtggtaaaaccttggctgttctcatccctgcwattgaactcgttgttaagttaaagttcatgcccaggaatggaacaggggtccttattctctcacctactagacaactagccrtgcaaacttttggtgttcttaaagagctaatgactcaccatgtgcacacctatgggttgataataggtggcagtaacagatmygctgaagcacagaaacttgctaatgggatcaacatcattgtggtcacaccaggccgtctgctggaccatacgcagaataccccagggtttatgtataaaaacctgcagggtctggctattgatgaagctgattgtatcttggacrttgggtttgaagataaattaaagcaaattattaaacttttgccaacacrcaggcagactatgctcttttctgccacctaaactcgaaaagttgaggacctggcaaggatttctccgaaaaaggagccattgtatgttggtgttgatgaagataaagctaatgcaactgtggatggtcttgagcagggacactttgtttgtccctctgaaaagagataccttctgctctttacattccttaagaagaaccaaaagaagaagctcatggtcttcttttcagcttgtatgtctgtgaaatacccctacgggttgctgaagtacattgatttgctgtcttggccattcatggaaagcaaaagcaaaataagcatacaaccacattcttctagtactgcaacgcagattcaggaacactattgtgtaaggatgtggcagcaagaggactggacattcctgaagtcaactggattgttcagtatgaccctccagatgaccctaaggaatgtattcattgtgtgaggagaacagccagaggcctaaatgggggaaggcatgccttgctcattttgcacccagaagaactgggtttccttcactacttgaaacaatccaaggttccattaagtgaatttgacttttcctgatctaaaatttctgacattcagtctcagcttgagaaactgattgaaaagaactattttcttcataagtcagcacaggaaacatataagtcatacatacgagcttatgattcctattctctgaaacagatctttaacattaataacttaaatttgcctcacattgctctgtcatttggcttcaagttgcctccctttgttgatctgaacatgaacagcaatgaaggcaagcagaaaaagcaaggaggatttggctaccagaaaaccaagaaagttgagaagtccataatctttaaacacattagcaaaaagtcatct

SEQ ID NO: 535 - DNA, 1068 bp, Homo sapiens
atggctgaaattcagcataaaactatcagaccacttctggaaggcagggatcttctagcagctgtaaaaacaggcagtggtaaaaccttggctgttctcatccctgcwattgaactcgttgttaagttaaagttcatgcccaggaatggaacaggggtccttattctctcacctactagacaactagccrtgcaaacttttggtgttcttaaagagctaatgactcaccatgtgcacacctatgggttgataataggtggcagtaacagatmygctgaagcacagaaacttgctaatgggatcaacatcattgtggtcacaccaggccgtctgctggaccatacgcagaataccccagggtttatgtataaaaacctgcaggttgaggacctggcaaggatttctccgaaaaaggagccattgtatgttggtgttgatgaagataaagctaatgcaactgtggatggtcttgagcagggacactttgtttgtccctctgaaaagagataccttctgctctttacattccttaagaagaaccaaaagaagaagctcatggtcttcttttcagcttgtatgtctgtgaaatacccctacgggttgctgaagtacattgatttgctgtcttggccattcatggaaagcaaaagcaaaataagcatacaaccacattcttctagtactgcaacgcagattcaggaacactattgttctcagcttgagaaactgattgaaaagaactattttcttcataagtcagcacaggaaacatataagtcatacatacgagcttatgattcctattctctgaaacagatctttaacattaataacttaaatttgcctcacattgctctgtcatttggcttcaagttgcctccctttgttgatctgaacatgaacagcaatgaaggcaagcagaaaaagcaaggaggatttggctaccagaaaaccaagaaagttgagaagtccataatctttaaacacattagcaaaaagtcatctgcagcaggcagttccctcactcaagagatgcctgtctttatcttgaataactttgtcctgaca

SEQ ID NO: 536 - DNA, 1080 bp, Homo sapiens
ctctctgctcctcccgtaagacagacagctgcatcttgtcatgcagcaccagctgtatccctgagacaccayggtgaaggtgaagaccaaagtaaatggatttggccatgttgggtgtctggtcaccagggctgcttttaactttggcaaagtggatactgtcaccatcaatgaccccttcgttgacttcaactacatgatccacatggtccagtatgattccacccatggcaagttccatggcaccattaaagctgagaataggaagcttgtcatcaatggaaatcccattaccatcttctaagagcgagatcccaccaaaatcaaatggtgtgatgctggtgctgattatgttgtgtagtccactggcatcttcaataccatgagaaggctggagatgtcttagaagagggagccaaaagggtcatcatctctgccctttctgctgacacccccttgttcatgataggcatgaatcatgagaagtacaaaaacagcctcaagatcatcagcaaagcctcctgtaccaccaacttcttagcccccctggccaaggtcatccgtgacaactttggcatcatagaagaacttataaccacagtccatgccatcactgccacagaagaccctggatggctcctctgggaaactgtggcatgatggccatgtggctctccaggacatcatccctacatctactagtggtgccaaggctgtgggccaggttactcccgagctgaatgggaagctcattggcatggccttccatgtctccactgccaamktgttggtcatggacctgacttgccatctggagaaagctgccaaatatgatgacatcaagaaggtggtaaagcaggaattggaggccccctcatgggcatcctgggccacacgagcaccaggttgtctcctctgactttaacagcaacttccactcttctgccttcaatgctggggctggcattgccctcaacaatcactttgtcaacctcatttcctggtatgacaatgaatttggctacagcaacagggtggtggacctcatggcccacaaagcctccaaggagtaagacccca

SEQ ID NO: 537 - DNA, 1549 bp, Homo sapiens
tcaaagttggaaaagtatgttgatatagatgctggaaagtataccattggcttgggccaggccaagatgggctcctgcacacatggagaagagatcaactctctttgcatgcctgtggttcagaatcttatggagagaaaaaatctttcctacgattgcactggscgactggaagttggaacagagacaatcaaggacaaatcaaagtcagtgaagactaatttgatgcagctgtttgaggagtctggggatatagatatagaaggaaccracacaactcatgcatgctatggagccccagctgctgtcttcagtgctgttaactggattgagtccagctcctgggatggacagtttgccctggagtttgtaggagatattgctgtatatcccacaggaaaagttagactgacaggtagagtcrgagcagtagctctgctaattgagccaaatgcaactttaatttttgaacgagggcttcgtgggacacatatgcaacgtgcctatgrctyttatgagcctgatatgctctctgaatgtcctatagtagatggaaaaccctccacacagtgctgcttcagtgcattagatcactgctattctgtcgactgcaaaacgatccgtgcccagtggcagaaagacggaaatgataaagattttaccttgaataattttggcttcttgatccttcactcaccatattgtaaactggtgagtttatctctagctcggatgttgcrgaatgacttccttaatgatcagaacagagataaaaatagtgtttagaatgtcctsraagcctttgggaatgttaaattagaagacatctattttgatacagatgtggagatggcatttatgaaggatagtyccgaactctcccatcagaaaacaaaggcatctttgctgtatccagtgaaaatggaaatacgtacacatcgtcagtatatggttccccgcaactgtcccagcgcagtactcacctcagcaatgatcagggaagagactggagtgttctcgtacggttctggttcagccgccaccctgtactctcttaaagttmcaccagatgccacaccatggtctgctgttgataaaataacagcaagcttatgggatcttaaatcaaggtgtagctcaagaacttgtgtggtaccagatgtctttgttgaaaacatgaagctcagagaggacacccatcacttggtcaactctgttccccggggcccaagagattcactctttgaagaaacatggtacttagctatggtgggtgaaaagcacagaagaagttacactccgtgtccttctccaaataatgacacttgggatgaaggagtcagacttgtgcattcaaacacagtaactgatcatattccaagccctgctaagacagtgccaagactccctgccacagcagcagaaacgggagcagctgtcattagtaatggggaacattaagatattctgtgaggtgcaaggctttggtgtgagggtggggatgggattacatgttgctcagatttttatgtgagtgacatggagcctg

SEQ ID NO: 538 - DNA, 1482 bp, Homo sapiens
attccggacggtatgtccagcaaaggctctatagttctggcctgcagtggcagcctggacaccttctgcatcctcgtgtggctgaaggaacaaggctatgacgtcattgcctacctggccagcattggccagaaggaagacttccaggaagccaggaagaaggcactgaagcctggggccaaaaagatgttaattgaggatgtcaacagggagtttgtggaggagttcatctggccggccatgcagtccagcacactgtatgaggaccgctacctcctgggaacctctctcgccaggccctgcatcacccacaaacaagtggaagtcgcccagcgggagggggccaaatatgtgtcccacggcrccacgggaaaggggaatgatcaggtctggtttgagctcacctgctactcgctggcccccacagataaaggtcattgctccctgaagtatgcccgaattctacaaccggttcaagggccacagtgacctgacggaatatgcaaagcaacgcgggattcccaccccggtcactcccaagaacccgtggagcatggacgagaacctcatgcacatcagctgcgaggctggaatcctggagaatcccgagaaccaagcgcctccagctctctacacgaagacccaggacccggccaaaacccccaacacccctgacattctcgagatcgagttcaaaaaaggggtccccgtgaaggtgaccaacgtcaaggatagtgccacccaccagacctccttggagctcttcatgtacctgaacgaagtcgcgggcaagcacagcgtgggcaatattgccatcgtggagaaccgtttcattggaacgaagtcccgaggtatctaccgggccccagcaggcaccatcctttgctacgctcatttagacatcgaggccttcaccatgtaccgggaagtgcacaaaatcaaacaatgccggggcttgaaatttgctgagctggtgtatactggtttctggctttcyggcacagccctgagtgtgaatttgtccgccactgcatcgccgagtcccaggagtgagtggaagggaaagtgcaggtgtctgtccttaaaggccaggtgtacatccttggctgggagtgccccactgtctacaacgaggagccggtgagcatgaacgtgcagggtgattatgagccaattgatgccaccgggttcatcaacatcaattccctcaggctgaaggaatatcatcgtctccagagcaaggtcactgcaaaatagacccccgtacaaggaggagctggggcctcctcaatttgcagatcgcccaagtaaaggcgctaattgttgtgataatttgtacttgtgactagttctccccggctggcagcatagtggggctgccaggccccagctttgttccctggtccccttgaagcctgcaaacgtcgtcatcgaagggaaggatggggggcagctgcggtggagagctgtaaaatgacaaaa

SEQ ID NO: 539 - DNA, 574 bp, Homo sapiens
atggtgagttaccaggagagccgcctatggtgtgagtgtgagctaatcatgcaagatgctgctgccgctgctgggatccccatmctgtcagccgtggtcaaccctgccgtgttcttcgacatcgctgtcgatyagaaggttccaaagacagcagaaaactttcatgctctgaactttcatgctttcatggagagaacggatttggttataagggttcctgctttcacagaaatattccagggttttatgtgtcagggtggtgacttcacataccataatgacactggtggcaagtccatctacagggagaaatttgatgatgagaacttcatcctaaagcatacaggccytggcatcttgtctatggcaaatgctggacccaacatgaatggctcccagtttttcatctgcactgccaagactgagtggttggatggcaagcatgtagtatttggcaaggtgaaagaaggcatgaagattatggaggccatggagcgctttgggtccaggagtggcaagactagcaagaagatcaccattgctgactgtggacarctccaataaattagacttg

SEQ ID NO: 540 - DNA, 2355 bp, Homo sapiens
aggcgcaagcgcgctggcccggcacggcggtggtcttgcgggaggcgtgggctgggattgcggtgcctgtgcttcccggtgccagggtgtcatggaagggctgctgacaagatgcagagcattgcccgccctggccacctgcagccgccagctctctgggtatgttccttgcagktttcaccactgtgccccaagaagagggcggcgcctgctgctgtctcgtgtgttccagccacagaaccttcgggaagaccgggtgctctccctgcaggacaaatctgatgacctgacctgtaagagccagcggctgatgctgcaggtgggcctgatctacccagcaagccccggctgttaccacctcctgccatataccgtccgtgccatggagaagctcgtgcgagtgatagaccaggagatgcaggccatcgggggccagaaagtcaacatgcccagcctcagcccggcagagctctggcaagccaccaaccggtgggacttgatgggcaaagagctgctaagacttagagacaggcatggcaaggaatactgcttaggaccaactcacgaggaagccattacggccttaattgcctcccagaagaaactgtcctacaagcagcttcccttcctgctgtaccaagtgacaaggaagtttcgggatgagcccaggccccgctttggtcttctccgtggccgagagttttacatgaaggatatgtacacctttgactcctccccagaggctgcccagcagacctacagcctggtgtgtgatgcctactgcagcctgttcarcaagctagggctgccatttgtcaaggtccaggccgatgtgggcaccatcgggggcacagtgtctcatgagttccagctcccagtggatattggagaggaccggcttgccatctgtccccgctgcagcttctcagccaacatggagacactagacttgtcacaaatgaactgccctgcttgccagggcccattgactaaaaccaaaggcattgaggtggggcacacattttacctgggtaccaagtactcatccattttcaatgcccagtttaccaatgtctgtggcaaaccaaccctggctgaaatggggtgctatggcttgggtgtgacacggatcttggctgctgccattgaagtcctctctacagaagactgtgtccgctggcscagcctactggccccttaccaagcctgcctcatcccccctaagaagggcagtaaggagcaggcggcctccgagctcatagggcagctgtacgaccacatcacagaggcagtgcctcagcttcacggggaggtgctcctggacgacaggacccatctgaccatcggaaacagactgaaagatgccaacaagtttggctacccctttgtgataatcgctggcaagagggccctggaggaccctgcacattttgaggtttggtgtcagaacactggtgaggtggccttcctcaccaaagatggagtcatggatttactgaccccagtgcagactgtctaaatgcccccagcccacccctgcccccatttgcagccttggtgttcgttctaacactgcattttcctacacccctttcctggactgctctctccagaaacagcacagctcatggagggtgagatcatgttagggaaatcaatttttatctagtcatttgttcagattatttgtatttaaagtcattaacttgatccctttctccagactggccatgcrrccatatacctttccttttgtattccattgtggaagcttctaggaggctgagaagcaggagatccaagctccagtcctgggtgttaccctgaggggggaagtcacttcccttctctcagctgagtttttcacgtgtaagatgagaatggctgatggctgagagcccaccaaccttccccaccccgtatcagtttgaccacgggccttttgctacattctatccagagagcaggcctgccagcccctctccactgagaagttgggctgagagtatggggaaaagaatcaagagacctgactgccgccaactcactagtgacttagatacatcccctccccctgctggggcctcagtttccccatctgtaacttgagaaaatagaactagatctgtaaagtctggaactagatctgtaacgtccttataggtgtcactagggggttccatgagaggtgtgtgacaggcagtctgattcctctcattctccatagtctgtttcctggaaagtcgatgtaattaactgatggcccaaaaactacctcaagagacctggccctgttaagacggcttaaccactgagatcccgttctattgatttaataaagtcaaactattggaa

SEQ ID NO: 541 - DNA, 1307 bp, Homo sapiens
atggccctgccgcactcaggctacatcacctcctggatcaccgctgccttccaactgggccttgccatggcagcctccaacaggactagcttctggcgggcccacgtggacatgggacttccagatcctatcctgggagtcaccaaagcctttaagagagacattgatagcaaaaaggtgaatctggtaattggtgccaaccaggacaacaacrgaaagctttatctgctgtctaacatctgcaaggcagaggcccagactgccacaaaaaatttggacaaggaatacctgctcattggggtactggctgaattttgcaagacatctgcaggactagccctgggtaagaacagcgaagtgttgaaaagcgactggtttgtcactgtgcaggctatttctcgaactggggccttaaggatcagaaccagttttctgtaaagagttttaaagttcagctgagatgtctttctgcccaaaccatcctagggaaatcacacacttcagggatgctggcacacagctacaagcttatcagtactatgaccccaagacttgtggttctgacttcacaggcactatggaggacatttcaaaaataccagygcaaagtgttcttctcctgcatgcctgggcccataatctcatggaagaggacccttgtccagagcagtggaaggaaatagcaatggggtgaagaaaaagaatctctacattatttgacatggcctatcaaggctttgccagaggtgacggtaacaaggatgccggggctgtgtaccacttcatcaaacagggcattaacatttgtctctgccaatcatatgccaaaacatgggcttatggagagcgtgtgggagactttactataatctgcaaagatgtggctgaagtcaaaagtgtggagtcacagttgaaaatcttgatccatcccacgtattgtgactctcctctcaatgaggcctggattgcctctaccattctgaacactccggatttgtaaaaacagtggttgcaagaagtgaaaatatggccgactgcatcattagcatgtggactcagctggttttcaacctcaagaggagaactcccacaatcctcctctgaagaaggaggattcctcccacaactggcaacatatcactgagcaagttggcaagttttgtttcacaggactaaagcctgaacagatggactggctgaccaaggagttctccatctagatgacaaaggatggccacatctctgtggcaggggtcacttctggcaacgtgggctaccttgcctatgctatttaccaggtcaccaag

SEQ ID NO: 542 - DNA, 1397 bp, Homo sapiens
atgacgcagacacagggcaccaggaggaaagtctgttactactacgacggggatgttggaaattaatattatagacaagaccatccaatgaagcctcaccaaatctactactcacaatttgctgcccagctrtggtctccactgaacaatagaaatctgtcaccctcacaaacccagtactgaggagatgaccaagtaccacagggatgactacattaaattcttgcgctccatctcttcagatacatgttcgagcacagcaagcagatgcagattcaacgtcagcaaggactgtccagtattcaatggcctgtttgaattcttacagttgtctactggtggctctctggcaagtgctgtgaaacttaataagcagcagatagacatcgctgtgaattgggctgggggcctgaaccatgccaagaagcctgaggcatctggcttctattacatcaatgacattgtcttggccatcctggaactgctaacctatcaccagagggtgctgtatattgacattgatawtcaccacggcgatgggatggaagaggccttctataccacagactgggtcatgactatgtcttctcctaagtagggagagaacttttcaggaactagggatctacaggatattggggctggcaaaggcaagtattatgctgttaactacctgctccgagatgggattgacgacaagtcctatgaggccatttcaagttcagtgctcttacagtgtggctcagactccttatctggggactggttaggttgcttcaatctgatcatcaaaggggggcatgccaagtgtatggaatttgtcaagagctttaacctgcctatgctgatgctgggaggaagtggttccaatttgtaatgttgcctagtgctggacatatgagacaggtgtggccctggatacagagatccctaatgagcttccatacagcgactacttggaatagtttggaccagatttcaggctccacatcagtccttccagtatgactaacmagaacacgaatggtacttggagaagataaacagcgactgtttgagaacctgagaatgctgccccacaaacctgggtccaaatgcaggtgattccagaggatctgtccctgaggagagtggcgatgagagcgaagaagaccctgacaaatggatctcgatctgttcctctgacaaacgaattgcctgtgaggaagagttctctgactctgatgaggtgagagagggtggccacaagaactcttccaacttcaaaaaagccaagagagtcaaaacaggatggaaaagagaaagacctagatgagaagagcaaagtcacagaagaggagaaaaccaaggaggagaagccagaagccaaaggggtcaaggaggaggtcaggttggcc

SEQ ID NO: 543 - DNA, 847 bp, Homo sapiens
accaggaggaaagtctgttactactacgacggggatgttggaaattaatattatagacaagaccatccaatgaagcctcaccaaatctactactcacaatttgctgcccagctrtggtctccactgaacaatagaaatctgtcaccctcacaaacccagtactgaggagatgaccaagtaccacagggatgactacattaaattcttgcgctccatctcttcagatacatgttcgagcacagcaagcagatgcagattcaacgtcagcaaggactgtccagtattcaatggcctgtttgaattcttacagttgtctactggtggctctctggcaagtgctgtgaaacttaataagcagcagatagacatcgctgtgaattgggctgggggcctgaaccatgccaagaagcctgaggcatctggcttctattacatcaatgacattgtcttggccatcctggaactgctaacctatcaccagagggtgctgtatattgacattgatawtcaccacggcgatgggatggaagaggccttctataccacagactgggtcatgactatgtcttctcctaagtagggagagaacttttcaggaactagggatctacaggatattggggctggcaaaggcaagtattatgctgttaactacctgctccgagatgggattgacgacaagtcctatgaggccatttcaagttcagtgctcttacagtgtggctcagactccttatctggggactggttaggttgcttcaatctgatcatcaaagcacatgctggcctgtcgtggtggctcatgcctgttctcagcattttgggaggcccaggcaggagaatcact

SEQ ID NO: 544 - DNA, 1637 bp, Homo sapiens
gctggagasagtgaggagaagaaaggggcgggacaagggcaaaggcgttagaagtcaccaccgacccagcccctcaacagcaagttggttcttcagcattaagatccaggtgtcagcctatgtctttatattgtcaagatgtctctttctaagaagttgactttagacaaactggatgttagagggaagcgagtcatcatgagagtagacttcaatgttcccatgaagaagaaccagattacaaacaaccagaggatcaaggcttccatcccaagcatcaagtactgcctggacaatggagccaaggcagtagttcttatgagtcatctaggtcggcctgatggtgttcccatgcctgacaaatattccttagcacctgttgctgttgagctcaaatccttgctgggcaaggatgttctgttcctgaaggactgtgtaggcgcagaagtggagaaagcctgtgccaacccagctcctggttcagtcatcctgctggagaacctgcgctttcatgtggaggaagaagggaagggccaagatccctstggaaagaagattaaagctgagccagataaaatagaagccttccgagcrtcactttccaagctaggggacgtctatgtcaatgatgcttttggcactgcacaccgcgctcatagttccatggtgggagtgaatctgccccataaagcatccggattcttgatgaagaaggaactagattactttgctaaagccttggaaaacccagtgagaccctttctggctatacttggtggagccaaagtggcagacaagatccaacttatcaaaaatatgctggacaaagtcaatgagatgattattggtggtggaatggcttataccttccttaaggtactcaacaacatggagattggtgcttccctgtttgatgaagagggagccaagatcgttaaagatatcatggccaaagcacaaaagaatggtgtaaggattacttttcctgttgattttgttactggggacaagtttgacgagaacgctcaggttggaaaagccactgtagcatctggcatatctcctggctggatgggtttggactgtggtcctgagagcaacaagaatcatgctcaagttgtggctcaagcaaggctaattgtttggaatgggccgttaggagtatttgaatgggatgcctttgctaagggaaccaaagccctcatggatgaaattgtgaaagccacttccaagggctgcatcactgttatagggggtggagacactgctacttgctgtgccaaatggaacactgaagataaagtcagccatgtcagcactggaggcggtgccagtctagagcttctggaaggtaaaatccttcctggagtagaggccctcagcaacatgtagttaatatagtgttacttccttctgttttctgtccatggcccttaagtcagcttaatgcttttacatctcgatgtgacttttgttaaaatctactcctagatcaagacctatgtaatggacaagcagcaggccatcaggaactcttaatatcagcacagcaattcattttagtttggtcacgcatttgcctgttcaagttctcatttgaacttcaccattgtgctatctagggaggacatattctt

SEQ ID NO: 545 - DNA, 1821 bp, Homo sapiens
atgggtagcgcagagaatggctctaagccaatgaccttgcggcatttggaagcagaaattcacagtgtttcaggcactgcaaaagtggcctcattttcaatggcaggtgttagcagagtggtcatcctgtctgtgtgtgttccatgtcacccctacctgctggtagcctcattaactctggcaygtagcagcagaagagggcattggaaagagtccagtggagcagagaaaggtggggagtggacgatcaagggcagccaggtcttgatttggaaaagatgcccgtggaagggacactcactgaaaagtgtgttctgtaccctggaaggctggaactggaaggctgactacatcagggacgactctcttgctgtagggcttctgttcggtccagccaatgccagacaaagcagggaatacgaaggtgggagaagagcgagatgtacatctgagtatgtcttaaatcctgaagggtggcccagacctggagaattaatcccagctggtctgggggctgtggtgagcagtgatcaagcaggacagcacacgagaaggagggtagaaggagactttggctctggtaaagacagctgggacgaggctgcccaggaagcacccctgccaggaagcacccctgccaatgcccttccagccctgggcattgggatagactcttgcatcatctcactgaggcatggaggcctgtcactggtgcagaccacggacktcttttaccccttggtggargatccctacatgaagggtgcattmataatgcctgataatgccgctattggggatgtgctggtattaaccaaacccttaggaacccaagttgctgtcaatgcccaccaatggctggaggatactgaaagatggaatcaggtgaagatggtggtctttggagaagaagtagatctggcctatcaggaagccatgctcaatatggctaccatcaacagaactgctgctggattaatgcacaaatttaatgcccatgtggccacagatatcacaggctttggcattctaggacactctcagaacctcgtgaagcaacaaagaaatgatgtgtcctttgtcatttgcaatctgccagtcattgccaagatggctgccatcagcaaggccagggggcaatcttccaagtacagagagggtcaccaagcatggattgttggcattgtggaaaagggaaatcggacagcctggatcattgacaagcctcgagttattgaggtccttcctcgaagcaacgacaacagtacttcatcacagaggctatgtggcaagcaacaagaatcctggaatgaccttttcatggaaacaagcttgaagctatgttctgggcttccatctgtggataaagatggctttttatggaatgaaggagtaacttgttcatcaatagacagtgttgctgccattggcaagtcttgctcacatgcagagtccagagaaggttcacacagtggtcaagtggctcttctggactgtgcagagggtcaggtggctctggtagctgaggtggaggcagagaaagcttgcagctgggggctgtctgctgatggggctccctcaaatgagggcaagtccctcctccgagggcgatctggtgagtgtgttcctgcctcaggtagagcagctgatgagaacatttatcctgggaagaaagaaggtaggaaggagggtgatgtgattgagatggtatcactggactggtctggttggctggatgggatctgctccctctctcgttcccgcatcaaaggaatcaacatcagtcatcatcatccagggtttgattcaacctccagtcac

SEQ ID NO: 546 - DNA, 1280 bp, Homo sapiens
gccatggcggcggcggaagtctcatcaagcccggcggccttgtctctgggctgggccttctcgagctactggccctkctagccccagttgtggggtctcagcctgagctggcgactgaccggcttctccggcaggaagggctgaggctgcaagctcccgcaggaggcactgcccaaactcctggccagactgacacggcccacacccagctgggacgaggctgcccaggaagcacccctgccaggaagcacccctgccaatgcccttccagccctgggcattgggatagactcttgcatcatctcactgaggcatggaggcctgtcactggtgcagaccacggacktcttttaccccttggtggargatccctacatgaaggggtgcatagcttgtgccaacgtgctgagtgacctctaggacataggcattactgagtgtgaaaacgtgttgacgttactcagccttagccagagtatgagtgaggaggaatgggaaaatataatgccactcatgatcaaaggctttcgggacgctactgaggagggaggaactgcagtgacaggtggacaaacgtggtcaactcttggcttatcatgggtggagttgccactgtggtgtgtcggccaagtgcattmataatgcctgataatgccgctattggggatgtgctggtattaaccaaacccttaggaacccaagttgctgtcaatgcccaccaatggctggaggatactgaaagatggaatcaggtgaagatggtggtctttggagaagaagtagatctggcctatcaggaagccatgctcaatatggctaccatcaacagaactgctgctggattaatgcacaaatttaatgcccatgtggccacagatatcacaggctttggcattctaggacactctcagaacctcgtgaagcaacaaagaaatgatgtgtcctttgtcatttgcaatctgccagtcattgccaagatggctgccatcagcaaggccagggggcagtttgggcttcttcaaggaacctcagctgaaacctcaggagattactgatttgtcttccaagagaacaggtggctcactttttttctgaaatcagatcttccaagtacagagagggtcaccaagcatggattgttggcattgtggaaaagggaaatcggacagcctggatcattgacaagcctcgagttattgaggtccttcctcgtggggccactgcccactgcccctgctcttgctcctgcacattccaatgtgtcctcagagcctagctca

SEQ ID NO: 547 - DNA, 516 bp, Homo sapiens
cgaatgaaccacccagctcctgtgaaagtcacatacaagaacatgagatttcctattacacacaatccaaccaatgtgaccttaaataaatttatagaggagcttaagaagtatggagctaccacaatagtaagagtatgtgaagcaacttatgacactactcttgtggagaaagaaggtatccatgttctcaattggccttttggtgatggtgcaccaccatccaaccagattgttgctgattggttacattttgtaaaaattaagttttgtgaagaacctggttgttatattgctgttaattgcattgtaggccttgggaaagctccagtacttgttgccctagcatcagttgaaggtggaatgaaacatgaagatgcagtacaattcataggacaaaagcggagtggagcttttaaaagcaagcaacttttgtatttggagaagtatcatcctaaaatgyggctgcgcttcaaagattccaatagtcatataaacaactgttgcattcaataa

SEQ ID NO: 548 - DNA, 2154 bp, Homo sapiens
atggtcaaccccactgtgttctctgacatcgctgtcaacggcgagcccttgggccgcatctccttcgagctgtttgcaracaagtttccaaagacagcagaaaactttcacgctctgagcactggagagaaaggagttggttataagggttcctgctttcacaggaacattccagggtttatgtatcagggtggtgacttcacacgccgtaatggcactggtggcaagtccatctatggggagaaatttgaagatgagaacttcatcctaaagcatacaggtcccggcatcttgtccatggcaaatgctggacccaacacaaacggttcccagttttccacacgcactgccaagactgagtggttgaacgcaagcacgtggtctccggcaagaagtgcggtgacayggaagagaccacacagtaagaagacaccaggggctggggctccctgctcctctgacctgactcagttcacccctgggatcctcacgcagcaccycccaccagaggtgtggtctgaagttcccagggaggaggcagaatctttggctgaacaaattcggttcagcccaagtctcccagggaaacggcgctgtgctaagccccccatggtcaatgcattaacttgctcctatcccaggcagatcaccaatcaattggatggcattggttttgtaatttcaaaagcatgtagccatcagattcattatgcaatcatggcccgttcacgagagcagcaaaatggattctggtcctgccgaacccggccgcttatgcagaacccctggctgccctggctgtcatttacaaccaacacgaccatcaccagccatgaagagccaatatacctcctgagcaatcggaggccctgggctccaggtgcagcgccagggggcagccagggagggcgcatctcgggccccgaggagaggcgggggtgcagccgcgcagagcactcaccgtggcggacgccaggctgttgtcggccagcgttaggtggtgcggctcccagcgcctcaggaatttcgagktgaggatcttgctgagaaagcccactgtggggtcaccccgggccacactggtggaggacccactcgatcaactcaatgctaggagctgggatgccaaactgaacagtaaagtgccttcatgggcacagtctcaactcgagttctctgaggtgtcccctgtagctaactcagaagggaaagacacacccgctacccaggctgccattaaggaatttgatgaggtggcaaagtacctgttggggaggagagcagtggagctgaggggcagcctaggagaggttgagctgaggcgccttccagcagccacacctcccctgccagaagaatgcggccaccgctacaggtgccagctggactcacccttggggcaggcaagatgcttcctggtgatgagtgccccacccttcggagggaaacactggagcctgcagggcagaggacaagcctcaggccatcggggagagcagagcatgaaacggggtggtggcagcctctggcacgaatgtctgacggtggagacgctgatcctgagaggaacctcaggcacgcaggttccaacccggagtcaggctggaaaagttgaggctcttcaaagagactacgactttgaacctgggtccattgtccagcgatcccttccgcaccggacctgcctgggaggggagaggacagcggccgctaccttcttcttcgccgcggccctcgtgggtttggggcgccctctgctggacgcttttatggcctgcggtctgatgccaggacggcctcaggggtttggtgacgggactgggaggaagtcacagggagaaggtggccggccgatcccctgccgtgagaactttgctgggcacacacggggcggctgtggcaactgctctctggccgtgctggaattggaagacagcaaggagacttatgctgacggcgatggagaggctcaggcagtcagcgatggagagactcaggcagtcagcgatggagagactcaggcagtcagcgatggagagactcaggcagtcagcgatggagaggctcaggcagtcagcgatggaagaggctcaggcagtcagcgatggaagaggctcaggcagtgactggggtgtggctgctaagggacggatc

SEQ ID NO: 549 - DNA, 2823 bp, Homo sapiens
gagccggcggcgcctgcgcactcgcgagtccggcctgggccgccggcccggcgcgggcgccatgaagctgctgcggcgggcgtggcggcggcgggcggcgctaggcctgggcacgctggcgctgtgcggggcggcgctgctctacctggcgcgctgcgcggccgagcccggggaccccagggcgatgtcgggccgcagcccgcctccccccgcgcccgcgcgcgccgccgccttcctggcagtgctggtggccagcgcgccccgcgccgccgagcgccgcagcgtgatccgcagcacgtggcttgcgcggcgcggggccccgggcgacgtgtgggcgcgctttgccgtgggcacggccggcctgggcgccgaggagcggcgcgccctggagcgggagcaggcgcggcacggggacctgctgctgctgcccgcgctgcgcgacgcctacgaaaacctcacggccaaggtgctggccatgctggcctggctggacgagcacgtggccttcgagttcgtgctcaaggcggacgacgactccttcgcgcggctggacgcgctgctggccgagctgcgcgcccgcgagcccgcgcgccgccgccgcctctactggggcttcttctcgggccgcggccgcgtcaagccgggggggcgctggcgcgaggccgcctggcaactctgcgactactacctgccctacgcgctgggcggcggctacgtgctctcggccgacctggtgcrctacctgcgcctcagccgcgactacctgcgcgcctggcacagcgaggacgtgtctctgggcgcctggctggcgccggtggacgtccagcgggagcacgacccgcgcttcgacaccgaataccggtcccgcggctgcagcaaccagtacctggtgacgcacaagcagagcctggaggacatgctggagaagcacgcgacgctggcgcgcgagggccgcctgtgcaagcgcgaggtgcagctgcgcctgtcctacgtgtacgactggtccgcgccgccctcgcagtgctgccagagaagggagggcatcccctgagccgccgcggcccggccctccgggacacctgcttcacccggcggcgccttggggcaggtgccgagcgggcgcactacgcccgggccccaaggcccccgtcccgcagccacgcttgtggtcgctgcgtcccggtctgcgtttgggagacccctgggggttgccggggcagcgcgccgtgtccaggtggaggtgcccgttcctggacctcagcgagcctgagccgggcccggccgcacgctgacccccgtgctgtccccgaccggctcacggggctgggctccgatcttccgtgtctcttatcagtggcgtttctcacgtctgcgtctcagatctaacgtggtttcacatcaatccgctttcatgggattttggtctctgtccagtgacttcgtggtaaatgtaactcagtgtttgcttgcgacttatttataaatattgtaagtttgtgtcgatgagtgtaagttggcagtgcgcacgtctcggtttttttacatgatttaaggaaagacttttatgtcagaacttggtgcctgtaccgtcaaccccgctgctgcccgtgtttaaacgcaggagaactttaaaactggccatctatcttttcagtgtacaagtcactgaacccattgtttctttctgaagagactttcctttcaaggcttcccatgggtccgcgccacacagggccggtgctgctttatttcagactctgccccaggttccaggaatccgaacyccggagtgctgacgcggttccccaacttccgccttaagaaaacaggaccagccggcaccaggcccgtctctcacgtactttaacacatccttgaaagcccctcgtttaatgagaaaagcgaacactgcggtccttgccaaagtaaaatgaagctgccccaggacaaggggttaccatgagctccctggagtccgacgcgggttttctctctgggggacctgggtggtccccgctgtggtctttgttgtcccactttgggaccgggtccagtctggggtctagtctcgagcatcagggtcaggctcggggcagggctgggttaggctccgggtcagtcttgccatgggtttgggagcaggtttgggttacttgcgtttgaaggcagcagtggtctcaggaggaagaaacgggggcgggagagagtggtgatctgtggtcagtgggtcagtgacctgcacggtgattctcccacctccaaaaggtaggggtgggactggaggcgtccctaggtcaggccgttgagttcgagctccgatgggccaccttgaatccaggactgaccgcccgtgtgtgcacagtttgttcttggacgaggactcgtgaggatcgagggctggggaccccggtgtgagcaggatggggccctgccctcccgtgggagttgtggactcgagcccaggggctgcccgtcacagcggtgtcccaggtccctgccatccgattttacctgggatgtcttctctggagtttggaattgcttgaggaaccctgcgtgtgcttggagaggccagagggcttgctgagaaccccatggacagtggagagcgggattcgaaccaagggctggactcccacacctctggcctgcgtcgcccagttctttgtggctctgaagaattggccgctgtggaaaagagcaaatgtccgagacccccaacaggaagagtctaaaaatccagtttgcaaccacttctgacctacaaaaaaatggaaatttagtgtttttcagcctaagacattaaatttcatatcagaacaa

SEQ ID NO: 550 - DNA, 4249 bp, Homo sapiens
ggccgaggcctctctgggtgggagtgttggcttcctttccggatcgctaaatggggaaagttctggccgctcggcgggatacgtctccaggccacggatggttcgttctccgtgccgcggccccgagctgggctccctgggtctccagcgcgggctcccggcattgggggctgcgggccggcccctccgccccgcccccgccccgccgcgcctcctcggccgagcggctcgcggtctccggcgcgggaggctccgagtctgcccactccgggccgagcgaggtctctggaggagaagagtggcgaggaggtgagggcacgccggccctcgcccggcgggtggcgccaggacttcaggtggcatggaatattcacatgggagagccgcatgaggccgcccaccacgcttcctgaaggatgcccgtgtggaagaattttgacgtgccagtgtcctcgttctacagggtgttccattcttccgcaatctcagaaaaatgggactaaaagaaactattttgtaaaataagaagacttccatttttaatgaccarcatgtattaagatggacacctactctacgaaacacraagttctatggtctcgaagaagcccgtgcctgtttaaaactgatcctaactaaaaacagacttgagtggatatgagaatgttggttagtggcagaagagtcaaaaaatggcagttaattattcagttatttgctacttgttttttagcgagcctcatgtttttttgggaaccaatcgataatcacattgtgagccatatgaagtcatattcttacagatacctcataaatagctatgactttgtgaatgataccctgtctcttaagcacacctcagcggggcctcgctaccaatacttgattaaccacaaggaaaagtgtcaagctcaagacgtcctccttttactgtttgtaaaaactgctcctgaaaactatgatcgacgttccggaattagaaggacgtggggcaatgaaaattatgttcggtctcagctgaatgccaacatcaaaactctgtttgccttaggaactcctaatccactggagggagaagaactacaaagaaaactggcttgggaagatcaaaggtacaatgatataattcagcaagactttgttgattctttctacaatcttactctgaaattacttatgcagttcagttgggcaaatacctattgtccacatgccaaatttcttatgactgctgatgatgacatatttattcacatgccaaatctgattgagtaccttcaaagtttagaacaaattggtgttcaagacttttggattggtcgtgttcatcgtggtgcccctcccattagagataaaagcagcaaatactacgtgtcctatgaaatgtaccagtggccagcttaccctgactacacagccggagctgcctatgtaatctccggtgatgtagctgccaaagtctatgaggcatcacagacactaaattcaagtctttacatagacgatgtgttcatgggcctctgtgccaataaaatagggatagtaccgcaggaccatgtgtttttttctggagagggtaaaactccttatcatccctgcatctatgaaaaaatgatgacatctcatggacacttagaagatctccaggacctttggaagaatgctacagatcctaaagtaaaaaccatttccaaaggtttttttggtcaaatatactgcagattaatgaagataattctcctttgtaaaattagctatgtggacacatacccttgtagggctgcgtttatctaatagtacttgaatgttgtatgttttcactgtcactgagtcaaacctggatgaaaaaaacctttaaatgttcgtctataccctaagtaaaatgaggacgaaagacaaatattttgaaagcctagtccatcagaatgtttctttgattctagaagctgtttaatatcacttatctacttcattgcctaagttcatttcaaagaatttgtatttagaaaaggtttatattattagtgaaaacaaaactaaagggaagttcaagttctcatgtaatgccacatatatacttgaggtgtagagatgttattaagaagttttgatgttagaataattgcttttggaaaataccaaatgaacgtacagtacaacatttcaaggaaatgaatatattgttagaccaggtaagcaagtttatttttgttaaagagcacttggtggaggtagtaggggcagggaaaggtcagcataggagagaaagttcatgaatctggtaaaacagtctcttgttcttaagaggagatgtagaaaaatgtgtacaatgttattataaacagacaaatcacgtcttaccacatccatgtagctactggtgttagagtcattaaaatacctttttttgcatcttttttcaaagtttaatgtgaacttttagaaaagtgattaatgttgccctaatactttatatgtttttaatggatttttttttaagtattagaaaatgacacataacacgggcagctggttgctcatagggtccttctctagggagaaaccattgttaattcaaataagctgattttaatgacgttttcaactggtttttaaatattcaatattggtctgtgtttaagtttgttatttgaatgtaatttacatagaggaatataataatggagagacttcaaatggaaagacagaacattacaagcctaatgtctccataattttataaaatgaaatcttagtgtctaaatccttgtactgattactaaaattaacccactcctccccaacaaggtcttataaaccacagcactttgttccaagttcagagttttaaattgagagcattaaacatcaaagttataatatctaaaacaatttatttttcatcaataactgtcagaggtgatctttattttctaaatatttcaaacttgaaaacagagtaaaaaagtgatagaaaagttgccagtttggggttaaagcatttttaaagctgcatgttccttgtaatcaaagagatgtgtctgagatctaatagagtaagttacatttattttacaaagcaggataaaaatgtggctataatacacactacctcccttcactacagaaagaactaggtggtgtctactgctagggagattatatgaaggccaaaataatgacttcagcaagagtgactgaactcactctaaggcctttgactgcagaggcacctgttagggaaaatcagatgtctcatataataaggtgatgtcggaaacacgcaaaacaaaacgaaaaaagatttctcagtatacacaactgaatgatgatacttacaatttttagcaggtagctttttaatgtttacagaaattttaatttttttctattttgaaatttgaggcttgtttacattgcttagataatttagaatttttaactaatgtcaaaactacagtgtcaaacattctaggttgtagttactttcagagtagatacagggttttagatcattacagtttaagttttctgaccaattaaaaaaacatagagaacaaaagcatatttgaccaagcaacaagcttataattaatttttattagttgattgattaatgatgtattgccttttgcccatatataccctgtgtatctatacttggaagtgtttaaggttgccattggttgaaaacataagtgtctctggccatcaaagtgatcttgtttacagcagtgcttttgtgaaacaattatttatttgctgaaagagctcttctgaactgtgtccttttaatttttgcttagaatagaatggaacaagtttaaatttcaaggaaatatgaaggcacttcctttttttctaagaaggaagttgctagatgattccttcatcacacttacttaaagtactgagaagagtatctgtaaataaaagggttccaaccttttaaaaaagaaggaaaaaactttttggtgctccagtgtagggctatctttttaaaaaatgtcaacaaagggaaaataaactatcagcttggatggtcacttgaatagaagatggttatacacagtgttattgttaaaatttttttaccttttggttggtttgcatcttttttccatattgttaattttataccaaaatgttaaatatttgtattacttgaattttgctcttgtatggcaaaataattagtgagtttaaaaaaaatctatagtttccaataaacaactgaaaaattatcatg

SEQ ID NO: 551 - DNA, 4098 bp, Homo sapiens
cccgccggggaagcgagcccagtccagcgctgcccgtccagtcctcgcccaagatttaaagcccgcaagttttgttcttgagaccagcgactttagctccgatgcgggaaggaaagccgacctccgatttggacatttaaagagctgggcttgaacttcgtgagtttcgctctaaactgcccttgaaatgaagctggacttggaggtggcatggaatattcacatgggagagccgcatgaggccgcccaccacgcttcctgaaggatgcccgtgtggaagaattttgacgtgccagtgtcctcgttctacagggtgttccattcttccgcaatctcagaaaaatgggactaaaagaaactattttgtaaaataagaagacttccatttttaatgaccarcatgtattaagatggacacctactctacgaaacacraagttctatggtctcgaagaagcccgtgcctgtttaaaactgatcctaactaaaaacagacttgagtggatatgagaatgttggttagtggcagaagagtcaaaaaatggcagttaattattcagttatttgctacttgttttttagcgagcctcatgtttttttgggaaccaatcgataatcacattgtgagccatatgaagtcatattcttacagatacctcataaatagctatgactttgtgaatgataccctgtctcttaagcacacctcagcggggcctcgctaccaatacttgattaaccacaaggaaaagtgtcaagctcaagacgtcctccttttactgtttgtaaaaactgctcctgaaaactatgatcgacgttccggaattagaaggacgtggggcaatgaaaattatgttcggtctcagctgaatgccaacatcaaaactctgtttgccttaggaactcctaatccactggagggagaagaactacaaagaaaactggcttgggaagatcaaaggtacaatgatataattcagcaagactttgttgattctttctacaatcttactctgaaattacttatgcagttcagttgggcaaatacctattgtccacatgccaaatttcttatgactgctgatgatgacatatttattcacatgccaaatctgattgagtaccttcaaagtttagaacaaattggtgttcaagacttttggattggtcgtgttcatcgtggtgcccctcccattagagataaaagcagcaaatactacgtgtcctatgaaatgtaccagtggccagcttaccctgactacacagccggagctgcctatgtaatctccggtgatgtagctgccaaagtctatgaggcatcacagacactaaattcaagtctttacatagacgatgtgttcatgggcctctgtgccaataaaatagggatagtaccgcaggaccatgtgtttttttctggagagggtaaaactccttatcatccctgcatctatgaaaaaatgatgacatctcatggacacttagaagatctccaggacctttggaagaatgctacagatcctaaagtaaaaaccatttccaaaggtttttttggtcaaatatactgcagattaatgaagataattctcctttgtaaaattagctatgtggacacatacccttgtagggctgcgtttatctaatagtacttgaatgttgtatgttttcactgtcactgagtcaaacctggatgaaaaaaacctttaaatgttcgtctataccctaagtaaaatgaggacgaaagacaaatattttgaaagcctagtccatcagaatgtttctttgattctagaagctgtttaatatcacttatctacttcattgcctaagttcatttcaaagaatttgtatttagaaaaggtttatattattagtgaaaacaaaactaaagggaagttcaagttctcatgtaatgccacatatatacttgaggtgtagagatgttattaagaagttttgatgttagaataattgcttttggaaaataccaaatgaacgtacagtacaacatttcaaggaaatgaatatattgttagaccaggtaagcaagtttatttttgttaaagagcacttggtggaggtagtaggggcagggaaaggtcagcataggagagaaagttcatgaatctggtaaaacagtctcttgttcttaagaggagatgtagaaaaatgtgtacaatgttattataaacagacaaatcacgtcttaccacatccatgtagctactggtgttagagtcattaaaatacctttttttgcatcttttttcaaagtttaatgtgaacttttagaaaagtgattaatgttgccctaatactttatatgtttttaatggatttttttttaagtattagaaaatgacacataacacgggcagctggttgctcatagggtccttctctagggagaaaccattgttaattcaaataagctgattttaatgacgttttcaactggtttttaaatattcaatattggtctgtgtttaagtttgttatttgaatgtaatttacatagaggaatataataatggagagacttcaaatggaaagacagaacattacaagcctaatgtctccataattttataaaatgaaatcttagtgtctaaatccttgtactgattactaaaattaacccactcctccccaacaaggtcttataaaccacagcactttgttccaagttcagagttttaaattgagagcattaaacatcaaagttataatatctaaaacaatttatttttcatcaataactgtcagaggtgatctttattttctaaatatttcaaacttgaaaacagagtaaaaaagtgatagaaaagttgccagtttggggttaaagcatttttaaagctgcatgttccttgtaatcaaagagatgtgtctgagatctaatagagtaagttacatttattttacaaagcaggataaaaatgtggctataatacacactacctcccttcactacagaaagaactaggtggtgtctactgctagggagattatatgaaggccaaaataatgacttcagcaagagtgactgaactcactctaaggcctttgactgcagaggcacctgttagggaaaatcagatgtctcatataataaggtgatgtcggaaacacgcaaaacaaaacgaaaaaagatttctcagtatacacaactgaatgatgatacttacaatttttagcaggtagctttttaatgtttacagaaattttaatttttttctattttgaaatttgaggcttgtttacattgcttagataatttagaatttttaactaatgtcaaaactacagtgtcaaacattctaggttgtagttactttcagagtagatacagggttttagatcattacagtttaagttttctgaccaattaaaaaaacatagagaacaaaagcatatttgaccaagcaacaagcttataattaatttttattagttgattgattaatgatgtattgccttttgcccatatataccctgtgtatctatacttggaagtgtttaaggttgccattggttgaaaacataagtgtctctggccatcaaagtgatcttgtttacagcagtgcttttgtgaaacaattatttatttgctgaaagagctcttctgaactgtgtccttttaatttttgcttagaatagaatggaacaagtttaaatttcaaggaaatatgaaggcacttcctttttttctaagaaggaagttgctagatgattccttcatcacacttacttaaagtactgagaagagtatctgtaaataaaagggttccaaccttttaaaaaagaaggaaaaaactttttggtgctccagtgtagggctatctttttaaaaaatgtcaacaaagggaaaataaactatcagcttggatggtcacttgaatagaagatggttatacacagtgttattgttaaaatttttttaccttttggttggtttgcatcttttttccatattgttaattttataccaaaatgttaaatatttgtattacttgaattttgctcttgtatggcaaaataattagtgagtttaaaaaaaatctatagtttccaataaacaactgaaaaattatcatg

SEQ ID NO: 552 - DNA, 4056 bp, Homo sapiens
aaaaataaacagccgtatgcctctgctaagtactaactacctcatcaccttttgtgcagacagggcaggttacatttggttttaaggaattaggaatatgtttctttccagcaccttagtaacccacgcgattgtgattcttttctcttcttgactgtgataggtggcatggaatattcacatgggagagccgcatgaggccgcccaccacgcttcctgaaggatgcccgtgtggaagaattttgacgtgccagtgtcctcgttctacagggtgttccattcttccgcaatctcagaaaaatgggactaaaagaaactattttgtaaaataagaagacttccatttttaatgaccarcatgtattaagatggacacctactctacgaaacacraagttctatggtctcgaagaagcccgtgcctgtttaaaactgatcctaactaaaaacagacttgagtggatatgagaatgttggttagtggcagaagagtcaaaaaatggcagttaattattcagttatttgctacttgttttttagcgagcctcatgtttttttgggaaccaatcgataatcacattgtgagccatatgaagtcatattcttacagatacctcataaatagctatgactttgtgaatgataccctgtctcttaagcacacctcagcggggcctcgctaccaatacttgattaaccacaaggaaaagtgtcaagctcaagacgtcctccttttactgtttgtaaaaactgctcctgaaaactatgatcgacgttccggaattagaaggacgtggggcaatgaaaattatgttcggtctcagctgaatgccaacatcaaaactctgtttgccttaggaactcctaatccactggagggagaagaactacaaagaaaactggcttgggaagatcaaaggtacaatgatataattcagcaagactttgttgattctttctacaatcttactctgaaattacttatgcagttcagttgggcaaatacctattgtccacatgccaaatttcttatgactgctgatgatgacatatttattcacatgccaaatctgattgagtaccttcaaagtttagaacaaattggtgttcaagacttttggattggtcgtgttcatcgtggtgcccctcccattagagataaaagcagcaaatactacgtgtcctatgaaatgtaccagtggccagcttaccctgactacacagccggagctgcctatgtaatctccggtgatgtagctgccaaagtctatgaggcatcacagacactaaattcaagtctttacatagacgatgtgttcatgggcctctgtgccaataaaatagggatagtaccgcaggaccatgtgtttttttctggagagggtaaaactccttatcatccctgcatctatgaaaaaatgatgacatctcatggacacttagaagatctccaggacctttggaagaatgctacagatcctaaagtaaaaaccatttccaaaggtttttttggtcaaatatactgcagattaatgaagataattctcctttgtaaaattagctatgtggacacatacccttgtagggctgcgtttatctaatagtacttgaatgttgtatgttttcactgtcactgagtcaaacctggatgaaaaaaacctttaaatgttcgtctataccctaagtaaaatgaggacgaaagacaaatattttgaaagcctagtccatcagaatgtttctttgattctagaagctgtttaatatcacttatctacttcattgcctaagttcatttcaaagaatttgtatttagaaaaggtttatattattagtgaaaacaaaactaaagggaagttcaagttctcatgtaatgccacatatatacttgaggtgtagagatgttattaagaagttttgatgttagaataattgcttttggaaaataccaaatgaacgtacagtacaacatttcaaggaaatgaatatattgttagaccaggtaagcaagtttatttttgttaaagagcacttggtggaggtagtaggggcagggaaaggtcagcataggagagaaagttcatgaatctggtaaaacagtctcttgttcttaagaggagatgtagaaaaatgtgtacaatgttattataaacagacaaatcacgtcttaccacatccatgtagctactggtgttagagtcattaaaatacctttttttgcatcttttttcaaagtttaatgtgaacttttagaaaagtgattaatgttgccctaatactttatatgtttttaatggatttttttttaagtattagaaaatgacacataacacgggcagctggttgctcatagggtccttctctagggagaaaccattgttaattcaaataagctgattttaatgacgttttcaactggtttttaaatattcaatattggtctgtgtttaagtttgttatttgaatgtaatttacatagaggaatataataatggagagacttcaaatggaaagacagaacattacaagcctaatgtctccataattttataaaatgaaatcttagtgtctaaatccttgtactgattactaaaattaacccactcctccccaacaaggtcttataaaccacagcactttgttccaagttcagagttttaaattgagagcattaaacatcaaagttataatatctaaaacaatttatttttcatcaataactgtcagaggtgatctttattttctaaatatttcaaacttgaaaacagagtaaaaaagtgatagaaaagttgccagtttggggttaaagcatttttaaagctgcatgttccttgtaatcaaagagatgtgtctgagatctaatagagtaagttacatttattttacaaagcaggataaaaatgtggctataatacacactacctcccttcactacagaaagaactaggtggtgtctactgctagggagattatatgaaggccaaaataatgacttcagcaagagtgactgaactcactctaaggcctttgactgcagaggcacctgttagggaaaatcagatgtctcatataataaggtgatgtcggaaacacgcaaaacaaaacgaaaaaagatttctcagtatacacaactgaatgatgatacttacaatttttagcaggtagctttttaatgtttacagaaattttaatttttttctattttgaaatttgaggcttgtttacattgcttagataatttagaatttttaactaatgtcaaaactacagtgtcaaacattctaggttgtagttactttcagagtagatacagggttttagatcattacagtttaagttttctgaccaattaaaaaaacatagagaacaaaagcatatttgaccaagcaacaagcttataattaatttttattagttgattgattaatgatgtattgccttttgcccatatataccctgtgtatctatacttggaagtgtttaaggttgccattggttgaaaacataagtgtctctggccatcaaagtgatcttgtttacagcagtgcttttgtgaaacaattatttatttgctgaaagagctcttctgaactgtgtccttttaatttttgcttagaatagaatggaacaagtttaaatttcaaggaaatatgaaggcacttcctttttttctaagaaggaagttgctagatgattccttcatcacacttacttaaagtactgagaagagtatctgtaaataaaagggttccaaccttttaaaaaagaaggaaaaaactttttggtgctccagtgtagggctatctttttaaaaaatgtcaacaaagggaaaataaactatcagcttggatggtcacttgaatagaagatggttatacacagtgttattgttaaaatttttttaccttttggttggtttgcatcttttttccatattgttaattttataccaaaatgttaaatatttgtattacttgaattttgctcttgtatggcaaaataattagtgagtttaaaaaaaatctatagtttccaataaacaactgaaaaattatcatg

SEQ ID NO: 553 - DNA, 4184 bp, Homo sapiens
cgctgcccgtccagtcctcgcccaagatttaaagcccgcaagttttgttcttgagaccagcgactttagctccgatgcgggaaggaaagccgacctccgatttggacatttaaagagctgggcttgaacttcgtgagtttcgctctaaactgcccttgaaatgaagctggacttggaggtccagattccagcttgcactggaatatttattgaccctttgatagaagagctacacctgaaacatctctgaagtctttttagcatcctatcctgcccatggcctactacacagtggcatggaatattcacatgggagagccgcatgaggccgcccaccacgcttcctgaaggatgcccgtgtggaagaattttgacgtgccagtgtcctcgttctacagggtgttccattcttccgcaatctcagaaaaatgggactaaaagaaactattttgtaaaataagaagacttccatttttaatgaccarcatgtattaagatggacacctactctacgaaacacraagttctatggtctcgaagaagcccgtgcctgtttaaaactgatcctaactaaaaacagacttgagtggatatgagaatgttggttagtggcagaagagtcaaaaaatggcagttaattattcagttatttgctacttgttttttagcgagcctcatgtttttttgggaaccaatcgataatcacattgtgagccatatgaagtcatattcttacagatacctcataaatagctatgactttgtgaatgataccctgtctcttaagcacacctcagcggggcctcgctaccaatacttgattaaccacaaggaaaagtgtcaagctcaagacgtcctccttttactgtttgtaaaaactgctcctgaaaactatgatcgacgttccggaattagaaggacgtggggcaatgaaaattatgttcggtctcagctgaatgccaacatcaaaactctgtttgccttaggaactcctaatccactggagggagaagaactacaaagaaaactggcttgggaagatcaaaggtacaatgatataattcagcaagactttgttgattctttctacaatcttactctgaaattacttatgcagttcagttgggcaaatacctattgtccacatgccaaatttcttatgactgctgatgatgacatatttattcacatgccaaatctgattgagtaccttcaaagtttagaacaaattggtgttcaagacttttggattggtcgtgttcatcgtggtgcccctcccattagagataaaagcagcaaatactacgtgtcctatgaaatgtaccagtggccagcttaccctgactacacagccggagctgcctatgtaatctccggtgatgtagctgccaaagtctatgaggcatcacagacactaaattcaagtctttacatagacgatgtgttcatgggcctctgtgccaataaaatagggatagtaccgcaggaccatgtgtttttttctggagagggtaaaactccttatcatccctgcatctatgaaaaaatgatgacatctcatggacacttagaagatctccaggacctttggaagaatgctacagatcctaaagtaaaaaccatttccaaaggtttttttggtcaaatatactgcagattaatgaagataattctcctttgtaaaattagctatgtggacacatacccttgtagggctgcgtttatctaatagtacttgaatgttgtatgttttcactgtcactgagtcaaacctggatgaaaaaaacctttaaatgttcgtctataccctaagtaaaatgaggacgaaagacaaatattttgaaagcctagtccatcagaatgtttctttgattctagaagctgtttaatatcacttatctacttcattgcctaagttcatttcaaagaatttgtatttagaaaaggtttatattattagtgaaaacaaaactaaagggaagttcaagttctcatgtaatgccacatatatacttgaggtgtagagatgttattaagaagttttgatgttagaataattgcttttggaaaataccaaatgaacgtacagtacaacatttcaaggaaatgaatatattgttagaccaggtaagcaagtttatttttgttaaagagcacttggtggaggtagtaggggcagggaaaggtcagcataggagagaaagttcatgaatctggtaaaacagtctcttgttcttaagaggagatgtagaaaaatgtgtacaatgttattataaacagacaaatcacgtcttaccacatccatgtagctactggtgttagagtcattaaaatacctttttttgcatcttttttcaaagtttaatgtgaacttttagaaaagtgattaatgttgccctaatactttatatgtttttaatggatttttttttaagtattagaaaatgacacataacacgggcagctggttgctcatagggtccttctctagggagaaaccattgttaattcaaataagctgattttaatgacgttttcaactggtttttaaatattcaatattggtctgtgtttaagtttgttatttgaatgtaatttacatagaggaatataataatggagagacttcaaatggaaagacagaacattacaagcctaatgtctccataattttataaaatgaaatcttagtgtctaaatccttgtactgattactaaaattaacccactcctccccaacaaggtcttataaaccacagcactttgttccaagttcagagttttaaattgagagcattaaacatcaaagttataatatctaaaacaatttatttttcatcaataactgtcagaggtgatctttattttctaaatatttcaaacttgaaaacagagtaaaaaagtgatagaaaagttgccagtttggggttaaagcatttttaaagctgcatgttccttgtaatcaaagagatgtgtctgagatctaatagagtaagttacatttattttacaaagcaggataaaaatgtggctataatacacactacctcccttcactacagaaagaactaggtggtgtctactgctagggagattatatgaaggccaaaataatgacttcagcaagagtgactgaactcactctaaggcctttgactgcagaggcacctgttagggaaaatcagatgtctcatataataaggtgatgtcggaaacacgcaaaacaaaacgaaaaaagatttctcagtatacacaactgaatgatgatacttacaatttttagcaggtagctttttaatgtttacagaaattttaatttttttctattttgaaatttgaggcttgtttacattgcttagataatttagaatttttaactaatgtcaaaactacagtgtcaaacattctaggttgtagttactttcagagtagatacagggttttagatcattacagtttaagttttctgaccaattaaaaaaacatagagaacaaaagcatatttgaccaagcaacaagcttataattaatttttattagttgattgattaatgatgtattgccttttgcccatatataccctgtgtatctatacttggaagtgtttaaggttgccattggttgaaaacataagtgtctctggccatcaaagtgatcttgtttacagcagtgcttttgtgaaacaattatttatttgctgaaagagctcttctgaactgtgtccttttaatttttgcttagaatagaatggaacaagtttaaatttcaaggaaatatgaaggcacttcctttttttctaagaaggaagttgctagatgattccttcatcacacttacttaaagtactgagaagagtatctgtaaataaaagggttccaaccttttaaaaaagaaggaaaaaactttttggtgctccagtgtagggctatctttttaaaaaatgtcaacaaagggaaaataaactatcagcttggatggtcacttgaatagaagatggttatacacagtgttattgttaaaatttttttaccttttggttggtttgcatcttttttccatattgttaattttataccaaaatgttaaatatttgtattacttgaattttgctcttgtatggcaaaataattagtgagtttaaaaaaaatctatagtttccaataaacaactgaaaaattatcatg

SEQ ID NO: 554 - DNA, 2416 bp, Homo sapiens
acggatcgaagcggctgggttgggcggtaaacaggccgtgggtagggaggacagagaggcggcgttcgctcctctgggacttttcacgcctcgttttgttttttttcttcagatgtggctttttcctgacgcagggtccaagcagtcagcttgagcttactcttctgtgaaagcggaaagtctcctctgaggaaagcggttgaacttgtggagggcgtgcgagacgggcgttctcccccatgccaggcgaatggtgcsgccttgagctggtccagcagccggctcgatgacaggtctgagggaggccccagaggcggcrggraggtggcccgcagaacgcgggttctgtaaagacacgtggagaagattcgattccgagaacaggaagaggcggatggaaagacagccaggcggctgccgggaagggggctgccaagatggcgtcggcctcctcccaaccgtcgttggcggtcggtttttcatcctttgatcccggggccccttcctgtaccgcrtcctcagcatctggaatcttgagccccacggcatctgaggtgccttatgcctctggcatgcccatcaagaaaacaggccatcgaggtgtcgattcctcaggagagacaacatataaaaagacaacctcaacagccttgaaaggtgccatccagttaggcattacttacactgtggggagcctgagtaccaaaccagagcgtgatgtcctcatgcaagatttctacgtggtggagagtatcttcttccccagtgaagggagcaacctgacccctgctcatcactacaatgccttccgtttcaagacctatgcgccggttgccttccgctactttcgggagctatttggtatcccgcccgatgattacttgtgctccctctgcagtgagccgctgattgaactctgtagctctggagctagtggttccctgttctatgtgtccagcgacgatgaactcattattaagacactccaacataaagaggcggagtttctgcagaagctgcttccaggatactacttgaayctcagccagaaccctcggactttgctgcctaaattctttggactgtactgtgtgcagacaggtggcaagaacattcggattgtggtgatgaacaatcttttaccaagatccgtcaaaatgcatatcaaatatgacctcaaaggctcaacctacaaacgccgggcttcccagaaagagcgagagaagcctcttcccacatttaaagatctagacttcttacaagacatccctgatggtctttttttggatgctgacacgtacaatgctctctgtaagaccctgcagcgtgactrtttggtgctgcagagcttcaagataatggactatagcctctggctgtcaatccacaatatagatcatgcacaacgagagcccttaagcagcgacactcttcaagtgtcaatcgacactcaaagactggctccccaaaaggctctgtattccacagccatggaattcatccagggagaggctcggctgggcgacaccatggaggccgatgaccatatgsgtggcatccctgctcagaatagtaaaggggaaaggctkctgctttatattggcatcattgacattctacagtcttacacgtttcttaagaagttggagcactcttggaaagccgtggtacatgatggggacgctgtctcagtgcatcgcccaggcttctacgctgaacggttccagcacttcatgtgcaacgcagtatttaagaagatccccttgaagccttctccttccaaaaagtttcggtctggcttatctttctctctgcatacgggctccagtggcaactcctgcattacttaccagccaytggtctctgaggaacacaagtcacaagtgataaasgtgcaagtggagccaggtgttcaccttggtcgttctgatgttttacctcagacctcagaatccacctttggaggaaatcagtgagggctcactattactgaccacagtttctcacctgtagttggaaagactttgcatatgctaactacaagtataaccttggaaaaacttgaatgtacagagtcagagttcacccattaagcgcaaagcctcagaagacctggaacaagattctgcttctctgtgatcccaagatgtcagcccttgccccagcaatgttgaattttcttctacttggtcatcaaaaaaggagtgtaaaagaagcgaggtgcactctccatcttcttcctgaagaagagcctcctattcttctctgtcctcataaatgggcattagtgccttggacagttgaggaccactccatcctctccacagcatcccctccactccagagttgggtggcacggattttcaactggctaaccttggyttccacaactgaatttttttcagacccccattct

SEQ ID NO: 555 - DNA, 1941 bp, Homo sapiens
tcttacctacggatgacactcctgtgcaagaagatggagaggcagaatttcaaatggtggcagtgaaacctaaagccaccgggggctttggatgtgagcctatcagaggctcaaaatggaaatgtgtcagaagaaacagtggggcatggaaaagttaaaaaaatccctaaaacatgttatgattgtgggcttgtcagaagccccaaatggagacatgtctaaagaaatagtagaaaatgtaaaagttaaagaaaactagaaatctatcatactaaccagtgcagaagcagcaattcagtctctagattcgaaatcaaaaaagaaaagaagaacaagagaaaaatagtgactaatgctgggcgtgatacaaaaaaagcaaaaactgaaaacaaaggggaatccgaagaagatggtatcgaggctcctgaagaaacagaaaactggggggaagccagacaatgrgaragatgagaatacttcatttcttctctaattttgtcagtgaaaacactttgaaggcaataaaagaaatgggctttaccaacatgactgaaatttagcataaaaatgatgggccacttatggaaggcaggatcttccagcagctacacaaaccagcagtggcaaaaaccctggcatttctcatccctgcatttgaactaattgttaagttaaaattcatgtccagaaatggaacaggagtctttattctctcactaattaaacagcttgtcctgagactcttggtgttcttaaggagctaatgactcaccatatgcacatgcatgggttgataatgggtggcagtaacagatctgctgaagtacagaagcttgcaaatgggatcagcactggtggtcacaccaggccatctcctgggctgtatgcagaattctgcaggatttaagtataaaaacctatggcgtctggttatggatgaggctaatgatatcttggatgctgggtttgaagagaaattaaagcaaattattaaacttctttgaacatggagactatgcccttttccgccacacaaactcaaaaacttgaagacctggcaaggatttctccaaaaaaaaaaaaaaaggaacaaatgtatgctggtgttgataatgataaagctactgcaacagtggatagtctcaagcggggatatgttgttcgtccctctgaaaaaggattccttttgctctttatattccttaagaactgaaagaagaaactgatggtcttcttttcatcctgtaggtccrtaaaataccactatgagttgcggaactacattgacttgcctacctcagccattcatttccagaagcaaaattacgtgtagaattacattttttccagttctgtaatgcagattcagggatattgtgtacagatgaggcagggagagagctagatattcctggctggattgttcagtattatcctccagatgaccctaaggaatatgttcatcgtsgggggacaatagccagggacctaaacgaaagagggcatgccttgctcagtttttgcccagaagaattgggttttgtttgttacctgaagcaacccaaggttccattaagtgaatttgacttttcctggcctaaaatttctgacattcagtcttggtttgtaaaattaatgaaaaagaactactttcttcataagtcagcccaggaagcatataagtcatacatacgagtaaatgattctcattctctgagacagatttttaatgttaataacttaaatttgcctcaagttgctctgtcattcggtttcaaggtgcctccttctgttgatgtgaatgtgaacagcaatgaaggcaagcataaaaagagaggaggcgagagtagattcagctaccagaaaaccaagaaagttaagtccataatctttaaaaacattagcamgaaatcatctgatagcaggcagttctgtcactga

SEQ ID NO: 556 - DNA, 762 bp, Homo sapiens
atgggatcagcactggtggtcacaccaggccatctcctgggctgtatgcagaattctgcaggatttaagtataaaaacctatggcgtctggttatggatgaggctaatgatatcttggatgctggccattcatttccagaagcaaaattacgtgtagaattacattttttccagttctgtaatgcagattcagggatattgtgtacagatgaggcagggagagagctagatattcctggctggattgttcagtattatcctccagatgaccctaaggaatatgttcatcgtsgggggacaatagccagggacctaaacgaaagagggcatgccttgctcagtttttgcccagaagaattgggttttgtttgttacctgaagcaacccaaggttccattaagtgaatttgacttttcctggcctaaaatttctgacattcagtcttggtttgtaaaattaatgaaaaagaactactttcttcataagtcagcccaggaagcatataagtcatacatacgagtaaatgattctcattctctgagacagatttttaatgttaataacttaaatttgcctcaagttgctctgtcattcggtttcaaggtgcctccttctgttgatgtgaatgtgaacagcaatgaaggcaagcataaaaagagaggaggcgagagtagattcagctaccagaaaaccaagaaagttaagtccataatctttaaaaacattagcamgaaatcatctgatagcaggcagttctgtcac

SEQ ID NO: 557 - DNA, 920 bp, Homo sapiens
gcaacaaagcctgtggccgatgtggcgctcctcggcccgcgcttcagtggttatgacagtgttcgctctaaggggagaaggaatgtgtgaccatttccaacggttaacttgcattccccagatagtttggatgagttacaacctaaatctgcaaactcaatacagccagaccctgggaagtgactctctccaagcctcctgtacaagtcccaggaaaagagcctgttttcccttggacatgtgagcagtgaattactgctcattcagaatttcatgtgtcagtcaccacgaacaggggcactcggcatgctgccccagcactggagaagcagcgctgtgggggcaatctgtcacactctcagagtctgggacttgacttgctaccaacaactgctgtgcaattctgctgagcaggaatatcatgagctgttcaataatgacggacgcattggttgagatgaagtttccagtaaggaagtgacagtgcaatgtggatatttatggctgtaaaataggaagagctttagttcccaggctgaacctgccactgctggagccatttcaacaaggcatcctcacaacaaagaagagatgtgatttggtaccatttcacaccagcaggtgtctggacgaaaacatcaatgtgaataagggccaagtgcagtcctgtcttgattaaattacttaataatattattaaataataataggtctgggcagtattgtttttaacctgactcatccagctgtccttcaaatagctccgtctccctctacccagaactgatttttaaaaagaagtaatttttctccctgggctgggaaaaccctaatgaactgaaacacacttttactttaaaatttttctrtctggcgtttttgtaatcatactattaaatgactctggagtcatgttaatg

SEQ ID NO: 558 - DNA, 2352 bp, Homo sapiens
ccaataggcggctctccggctgctaagccgagagggcaggggcgccgtcagtagcaccaccgccttccaagtttccccttgtggatgcgcggccccgcggctctgctcctcccggcgcagaggggccgggagaggccacaggagcggacctggcacgggatttctgaggaacgggagaagactggcgcccgacccgctctggagggtcggtgaacgatgaagggccggcggcggcgacgccgagagtactgcaagttcgcgctgctgttggtgctgtayacgctggtgctgttgctcgtcccctccgtattggacggcggccgcgacggggacaagggcgccgagcactgccccggcctgcagcgcagcctgggagtgtggagcctggaggcggcggcggccggcgaacgcgagcagggagcggaggcgcgggccgccgaggaagggggcgcgaaccagtctcctcggttcccaagcaacctcagcggcgctgtcggggaggcagtgtctcgcgagaagcagcacatctacgtgcatgccacctggcgcaccggctcgtccttcctgggcgaactctttaaccagcacccggacgttttctacttgtatgagcccatgtggcatctatggcaggcgctgtatccgggcgacgccgagagcttgcagggcgcgctgcgcgacatgctgcgttcgctcttccgctgcgacttctccgtgctgcggctgtacgcsccgccgggggaccccgctgcgcgcgccccggacacggccaatcttaccacggccgccctcttccgctggcggactaacaaggtcatctgctcgccgccactgtgtcctggcgcaccccgtgcccgggccgaggtgggcctcgtcgaggacaccgcctgcgagcgcagctgcccacccgtggcgatacgcgccctggaggccgagtgccgaaagtacccggtggtggtcatcaaggacgtgcgcctgctcgatctgggcgtgctggtgcccctgttgcgtgatccaggcctcaacctgaaggtggtgcagcttttccgcgacccgagggcggtgcacaactcgcgcctcaagtctaggcagggactgctgcgcgagagcatccaggtgctgcgcacccgccagaggggcgaccgcttccaccgtgtgctgctggcgcacggcstgggtgctcgccccgggggccagtctcgcgcgctgcccgccgcgccgcgcgccgatttcttcctgaccggtgcgctcgaggtgatctgcgaagcctggctgcgcgatctgcttttcgcgcgcggcgcgcccgcctggctgcggcgccgctacctgaggctgcgctatgaggacctggtgcggcagccacgcgcccagctgcgccgcctgctgcgcttctccgggctacgcgcgctcgcagcgctcgatgccttcgcgctcaacatgactcgcggcgcggcctacggcgccgaccggcccttccacctgtcagcgcgcgacgcccgggaggcggtgcacgcctggcgcgagcgcctgagccgagagcaggtgcgccaggtggaggccgcctgcgctccagccatgcgtctgctcgcctaccctcgcagcggagaggagggcgacgcggagcagcccagggaaggggagacgccgctggagatggatgccgacggcgccacgtagcctcccatccctgtccccggcacggatccgggtcagtcaccacgaacaggggcactcggcatgctgccccagcactggagaagcagcgctgtgggggcaatctgtcacactctcagagtctgggacttgacttgctaccaacaactgctgtgcaattctgctgagcaggaatatcatgagctgttcaataatgacggacgcattggttgagatgaagtttccagtaaggaagtgacagtgcaatgtggatatttatggctgtaaaataggaagagctttagttcccaggctgaacctgccactgctggagccatttcaacaaggcatcctcacaacaaagaagagatgtgatttggtaccatttcacaccagcaggtgtctggacgaaaacatcaatgtgaataagggccaagtgcagtcctgtcttgattaaattacttaataatattattaaataataataggtctgggcagtattgtttttaacctgactcatccagctgtccttcaaatagctccgtctccctctacccagaactgatttttaaaaagaagtaatttttctccctgggctgggaaaaccctaatgaactgaaacacacttttactttaaaatttttctrtctggcgtttttgtaatcatactattaaatgactctggagtcatgttaatga

SEQ ID NO: 559 - DNA, 415 bp, Homo sapiens
gacctggctcgcttcatactgagatggctgagcagtcagacaagggcataaaatactacaccctgggagagattaagaagcacaatcacagcaaaagcacctgggtgatcttgcaccacaaggtatatgatgtgaccagattttttgatgagcatttctgtggggaagaagtcttcagggaacaagctgtaggtgatgctcctgaaaactgaggatatcatgcactctacggatgctagagaattgtccaaaacatatatcattgggggggctttatccagatgacagatcaatcacaaatctttcagaaaccctttttactactgttgattctcactctagttagtggactaattgggtgatcccggcyatctcagcactcaccgtagccctgagatatcacctctacatggcc

SEQ ID NO: 560 - DNA, 486 bp, Homo sapiens
agcccagaccagagtgtggcccctggagtcataatgatgaaggtcatgtacatgttgaagggccagagcccggtgcagggcaccatccactttgagcagaaggaaaatgaaccatttatggtgtcagaatgcattacaggattgactgaacgccagcacagattccatgttcatcagtttggagataatacaccaggctgtaccagggcagttccttactttaatcctttaaccaaaaaccacagtgggccaaggatcaagagaggcaggttggagacctgggwaatgtggccgctggcaaagatgtgtcgccaacatgtctgttgaagattctctggtctcactctcaggacactattccatcactgcccacacaatggtgtccatgacaaaccagatgacttgggcaaaggtgaaaatgaagaaagtacaaacacaggaaatgctagaagttgtttggtttgtggtgtaattgggattgcccaa

SEQ ID NO: 561 - DNA, 1011 bp, Homo sapiens
ggtctggggagtgcggcagccatggcgagccaccttgtcctcaccgacagcaccaagatgcccatcctggggcttggcacctggaagtcccctcctggctaggtaaccaaggctgtgaaggtggcgatcgatgtcaggtactgccatattgactgtgcctacatgcaccagaataagaacgaggtaggggtggccattcagaagcagcttagggagcaggtggtgaagcatgaggctcatcagcaaggggtggtgcacataccataagaaggtcctggtgaaaggagcctgccagaagacgctcagcaacctgaagctggactacctggacctccaccttattcactggctgaccgactttaagcctggaaaggaatttttcccattggatgagtcagacaacgtggatcccagtgacaccaacattgtgaacacatgggcagccatggaagagctggtggatgaagggctggtgaaagctattggcatctccaactgtaatcatctccaggtggagaggatcttaaagaaacctggcttaaggtataagccggcagttaaccagattgagttccacctgtacctcactcagaagttaatccagtactgccagtccaaaggcatcttggtgaccacctatagcccccttggctctcctgwtaaaccctgggccaagcctgaggccccttctatcctggaggatcccaggatcaaggtgatcacagccaagcacaataaaaccacagcccagattctgatccacttcccccaggcagaggaacttggaggtgatccccaagtctgtgacaccagaatgcattgctgagaactttaaggtctttgactttgaactaagcagccaggatatgaccaccttactcagctacaacaggaactggagggtctgtgccttggtgagctgttcctcccacaaggactaccccttccatgaagttttgaagctgcgggtgcctgctcatccccaagtgacatatacctgtgtttccaatc

SEQ ID NO: 562 - DNA, 752 bp, Homo sapiens
atggctgcctacaagctggtgctgatccaccacagagagagcatgtggaacctggagaacagcttcagtgggtggtacaatgccaacctgagcccagcaggccacgagaaggcaaagtgctacaggcaggcactgggagacgctggctctgaatttgacacctgcttcacctcagtgcagaagagagtgatctggaccgtccggacagtgctagatgttattgatcagatgtggctgccagtaatgaggacttgacacctcaataagggcactatgggtgtctgaccagagtcaataaagcagaaactgctgcaaagcatggcgaggcccaggtaaagatctggaggtgcacctgtgatgtcccaccacctctaatgaagcccaaccatcctttctacagcaacatcagtaaggatggcaggtatgcagacctcactgaagatcagctaccttcctgtgagcatmtgaaggacactaccaccagagctctactcttttggaatgaagaaatagctccccagatcaaggaggggaaatgagtactgattgcagcccatggaaacagccttccaaccattgtcaagcatgtggaaggtctctgaagaggctatcatggagctgaacctgtcaactggttattcccattgtctatgaattggacaaggacttgaagcccatcaggcgcatgcagttcttgggggatgatcggtaaagccatggaagctgcggctgccgagggtaaggccaagaag

SEQ ID NO: 563 - DNA, 1589 bp, Homo sapiens
aacactggtgattactgtgatctgtgtggaggggagaaattttccactttggctgagttggtccggcattacacagaacatcacgggcaatkaaaagagaagaatggagatgttattgagcttaaatatcctctgaactgtgcagatcctgcctctgaaaggtggtttcagggacacctctctgggaaagaagcagagaaattattaactgaaaaaggaaaacatggtagttttcttgtatgagagagccagagccaccttggagattttgttctctctgtgcgcaccagtgatgacaaaggggagaacaataacggcaagtctaaagtggcccatgttatgatttgctgtcaggaactgaaatacgatgttggtggaggagaacggtatgattctttgacagatcttgtggaacattacaagaagaatcctatgatggaaacatggggtacagtactacaactcacgtagccccttaacacgactcgtataaatgttgctgaaatagcagaattcgagaactaagcaaattagctgagaccacaataaagtcaaacaaggcttttcggaagaatttgagacactacaacaacaggagtgcatacttctctacggccgaaaagagggtaaaaggcaagaaaacaaaaacaaaaatagatataaaaataacctgccctttgatcataccagggttgtcctacacgatggtgatcccaacgagcctgtttcagatgacatcaatgcaaatatcatcatgcccaaatttgaaaccaagtgtaacaattcaaagcccaagaagagttacattgccacacaaggctgcctgcaaaacatggtgaacgacttttggcggatggtattccaagaaaactcctgagtgattgtcatgacaacgaaagaagtggagagaggatagagtaaatgtgtcaaatactggcctgatgagtatgctctaaaagaatatggcatcatgcgtgttaggaatatcagagaaagcaccgctcacaactatatgctaagagaacttaaactttcaaaggttgggcaagggaatatggagagaatggtctggcaataccacttttggacctggccggaccacggagtgcccattgaccccaggggtgtgctggacttcctggaggaggtgcaccataagcaggaacgcatcatgcatgcaaggccagtcgtggtgcacggcagtgctggaattggccggacagggacatacgttgtgattgatattctgagaaaggtgttgactgcaacattgacgttctcaaaactatccagatggtgcagtctcagaggtcagggatggtccagacagaaacacagtaccgatttatctatatggcggtccagcattatactgaaacactacagcgcaggattgaagaagagcagaaaagcaagaggaaaggtcatgaatatacaaatattaagtattctctagcggaccagacgagtggagatcagagccccccsccccgccttgtactccaactccaygctgtgcagaaatgagagcagacagtgctagagtgtatgaaaacgtgggcctgatgcaacagcagaagagtttcaga

SEQ ID NO: 564 - DNA, 1855 bp, Homo sapiens
ggcgagtctccatggcggtggcggcggcagctgcggcgggacccgtgttctggaggcgactgctgggcctcctgcctggccgcccagggctggccgcgctcctgggacgcctgtccgaccgcctcggcaggaaccgggaccgccagcgcaggaggtcaccatggctgttattggctcccttgctgtccccagctgttccccaggtcacctccccaccttgctgcctgtgtccagaaggcgtgcaccggttccagtggatcagaaacctggttccagaatttggagtctccagttctcacgttagggtgctttcttccccggcagagtttttcgagctcatgaaggggcagataagagtagccaagaggcgggtcgtgatggcatccctctacctggggacaggtcctttggaacaggagctggtggactgcctggaaagtactctagaaaagtcactccaagcaaagtttccttcaaatctcaaggtctccattctcttagacttcacgcggggctcacgaggycggaagaactcccgcacaatgctgctcccactcctgcggaggttcccagagcaggtccgagtctccctctttcacacgccgcacctccgtgggctgcttcggctcctcatccctgagcgcttcaacgagaccatcggcctccagcacattaaggtgtacctcttcgacaacagcgtcatcttgagcggtgcaaacctgagtgactcctacttcaccaaccgccaggaccgctacgtgttcctgcaggactgtgcggagattgccgacttcttcacggagctggtggacgcggtgggggatgtgtccctgcagctgcagggggacgacacggtgcaggtggtggatgggatggtgcatccttacaaaggggaccgggccgagtactgcaaggcagccaataagagggtcatggatgtgatcaactcagccaggacccgccagcagatgctgcatgcccagaccttccacagcaactctcttttgacccaggaagatgcagcagctgctggggatcgcagaccagcccctgacacctggatttatccrctgattcagatgaagcccttcgagattcaaatcgatgagattgtcactgagaccctgttgactgaggcggagcgcggggcaaaggtctacctcaccactggctatttcaacctgacccaggcctacatggacctggtcttgggcactcgggctgagtaccagatcctgctggcctcaccagaggtgaatggcttctttggggccaagggggtggccggcgccatcccagcggcctatgtgcacatcgagcgacagttcttcagtgaggtgtgcagcckgggacagcaggagcgggtccagcttcaggagtactggcggaggggctggacgttccacgccaaaggcctctggctgtacctggcagggagcagcctgccctgtctcacgctgattggctctcctaattttgggtacaggtcagttcaccgggacctggaggcccagattgcgatcgtgacggagaaccaggccctgcagcagcagcttcaccaggagcaagagcagctctacctgaggtcaggtgtggtgtcctctgccaccttcgagcagccgagtcgccaggtgaagctgtgggtgaagatggtgactccactgatcaagaacttcttctgaggacagacaggtgctgtctctagcatcacctctcagcacgattttcccgagagttcacagccttccaccatgggatgacacagcaagaaggcccttgccagatgccagcactttcatatggaacttcccagaccccaggaccatgagaaataaatttctattgtttatagatt

SEQ ID NO: 565 - DNA, 2112 bp, Homo sapiens
ggcgagtctccatggcggtggcggcggcagctgcggcgggacccgtgttctggaggcgactgctgggcctcctgcctggccgcccagggctggccgcgctcctgggacgcctgtccgaccgcctcggcaggaaccgggaccgccagcgcaggaggtcaccatggctgttattggctcccttgctgtccccagctgttccccaggtcacctccccaccttgctgcctgtgtccagaaggcgtgcaccggttccagtggatcagaaacctggttccagaatttggagtctccagttctcacgttagggtgctttcttccccggcagagtttttcgagctcatgaaggtggactgcctggaaagtactctagaaaagtcactccaagcaaagtttccttcaaatctcaaggtctccattctcttagacttcacgcggggctcacgaggycggaagaactcccgcacaatgctgctcccactcctgcggaggttcccagagcaggtccgagtctccctctttcacacgccgcacctccgtgggctgcttcggctcctcatccctgagcgcttcaacgagaccatcggcctccagcacattaaggtgtacctcttcgacaacagcgtcatcttgagcggtgcaaacctgagtgactcctacttcaccaaccgccaggaccgctacgtgttcctgcaggactgtgcggagattgccgacttcttcacggagctggtggacgcggtgggggatgtgtccctgcagctgcagggggacgacacggtgcaggtggtggatgggatggtgcatccttacaaaggggaccgggccgagtactgcaaggcagccaataagagggtcatggatgtgatcaactcagccaggacccgccagcagatgctgcatgcccagaccttccacagcaactctcttttgacccaggaagatgcagcagctgctggggatcgcagaccagcccctgacacctggatttatccrctgattcagatgaagcccttcgagattcaaatcgatgagattgtcactgagaccctgttgactgaggcggagcgcggggcaaaggtctacctcaccactggctatttcaacctgacccaggcctacatggacctggtcttgggcactcgggctgagtaccagatcctgctggcctcaccagaggtgaatggcttctttggggccaagggggtggccggcgccatcccagcggcctatgtgcacatcgagcgacagttcttcagtgaggtgtgcagcckgggacagcaggagcgggtccagcttcaggagtactggcggaggggctggacgttccacgccaaaggcctctggctgtacctggcagggagcagcctgccctgtctcacgctgattggctctcctaattttgggtacaggtcagttcaccgggacctggaggcccagattgcgatcgtgacggagaaccaggccctgcagcagcagcttcaccaggagcaagagcagctctacctgaggtcaggtgtggtgtcctctgccaccttcgagcagccgagtcgccaggtgaagctgtgggtgaagatggtgactccactgatcaagaacttcttctgaggacagacaggaatggccttgatgaagatgacaggcatggccggggtcagctctttcagccgcgcttcagcgatgactccagtctgggtgtcccagcgagcccctgcagggacagtatggctgagggtcaggtgtgctgccagtaagtgagggaggggctggcaggaagggtggggtcctcacactccccgccctctgcagagctgggctctaccccaaaaggcttcaggccagctgccacagctggaagcagaggccttcgtaggtgatggcctgcatgttgtaactaccccgtcccgctgggctcaaggaacagctcagctaaagccctcgggttccatccgtttaaatctgtggcattttcagagcctcatctgtcagccttaatgtcagtggcaggaagtcataactccagctaaaaattacagagtaaagttccctgattcttaatgtgtaatgtctgccctatgtgtacatacacaatataattatacatctgtgcatataa

SEQ ID NO: 566 - DNA, 2190 bp, Homo sapiens
ggcgagtctccatggcggtggcggcggcagctgcggcgggacccgtgttctggaggcgactgctgggcctcctgcctggccgcccagggctggccgcgctcctgggacgcctgtccgaccgcctcggcaggaaccgggaccgccagcgcaggaggtcaccatggctgttattggctcccttgctgtccccagctgttccccaggtcacctccccaccttgctgcctgtgtccagaaggcgtgcaccggttccagtggatcagaaacctggttccagaatttggagtctccagttctcacgttagggtgctttcttccccggcagagtttttcgagctcatgaaggggcagataagagtagccaagaggcgggtcgtgatggcatccctctacctggggacaggtcctttggaacaggagctggtggactgcctggaaagtactctagaaaagtcactccaagcaaagtttccttcaaatctcaaggtctccattctcttagacttcacgcggggctcacgaggycggaagaactcccgcacaatgctgctcccactcctgcggaggttcccagagcaggtccgagtctccctctttcacacgccgcacctccgtgggctgcttcggctcctcatccctgagcgcttcaacgagaccatcggcctccagcacattaaggtgtacctcttcgacaacagcgtcatcttgagcggtgcaaacctgagtgactcctacttcaccaaccgccaggaccgctacgtgttcctgcaggactgtgcggagattgccgacttcttcacggagctggtggacgcggtgggggatgtgtccctgcagctgcagggggacgacacggtgcaggtggtggatgggatggtgcatccttacaaaggggaccgggccgagtactgcaaggcagccaataagagggtcatggatgtgatcaactcagccaggacccgccagcagatgctgcatgcccagaccttccacagcaactctcttttgacccaggaagatgcagcagctgctggggatcgcagaccagcccctgacacctggatttatccrctgattcagatgaagcccttcgagattcaaatcgatgagattgtcactgagaccctgttgactgaggcggagcgcggggcaaaggtctacctcaccactggctatttcaacctgacccaggcctacatggacctggtcttgggcactcgggctgagtaccagatcctgctggcctcaccagaggtgaatggcttctttggggccaagggggtggccggcgccatcccagcggcctatgtgcacatcgagcgacagttcttcagtgaggtgtgcagcckgggacagcaggagcgggtccagcttcaggagtactggcggaggggctggacgttccacgccaaaggcctctggctgtacctggcagggagcagcctgccctgtctcacgctgattggctctcctaattttgggtacaggtcagttcaccgggacctggaggcccagattgcgatcgtgacggagaaccaggccctgcagcagcagcttcaccaggagcaagagcagctctacctgaggtcaggtgtggtgtcctctgccaccttcgagcagccgagtcgccaggtgaagctgtgggtgaagatggtgactccactgatcaagaacttcttctgaggacagacaggaatggccttgatgaagatgacaggcatggccggggtcagctctttcagccgcgcttcagcgatgactccagtctgggtgtcccagcgagcccctgcagggacagtatggctgagggtcaggtgtgctgccagtaagtgagggaggggctggcaggaagggtggggtcctcacactccccgccctctgcagagctgggctctaccccaaaaggcttcaggccagctgccacagctggaagcagaggccttcgtaggtgatggcctgcatgttgtaactaccccgtcccgctgggctcaaggaacagctcagctaaagccctcgggttccatccgtttaaatctgtggcattttcagagcctcatctgtcagccttaatgtcagtggcaggaagtcataactccagctaaaaattacagagtaaagttccctgattcttaatgtgtaatgtctgccctatgtgtacatacacaatataattatacatctgtgcatataa

SEQ ID NO: 567 - DNA, 2037 bp, Homo sapiens
ggttttgctccgctttagcagcggcgaagggaggacccccgggagccggtccccggcgtccggtcgcccagcccttttcaggcttgggcccgcatggaggggaccgtggagtcccagacgcctgacctgcgggatgtggagggtaaggtgggcaggaagacccctgaagggctgctccgcgggctgcgaggcgagtgtgagctgggaacctctggcgccctgctgctcccaggggcgtctagcaccggccacgacttgggggacaagatcmtggcgctgaagatggagctggcttacctgcgagccatcgatgtgaagatcctgcagcagctggtgaccttgaatgagggcatcgaggcagtgcgctggctgttggaggagcgggggacgttgaccagtcattgcagcagcctcaccagcagtcaatatagcctgacaggcgggagcccaggccgctcaaggcgaggcagctgggacagcctgccagacaccagcaccaccgaccggctggacagtgtctctattggcagcttcctggacacagtggcccccagcgagctggatgaacagggcccacctggggctccacgttccgagatggactgggcaaaagttatagctggtggagagagggccaggactgaggtggatgtggcagccaccaggctagggagcttgagagctgtgtggaagcccccaggggagaggcttcraggtggaccacctgagtcaccagaggatgagagtgccaagctgggcttcgaggcccactggttctgggagcagtgccaggatgatgtgaccttcttgtaacaactattccacccttttgtaatcctgtggctcttttatccattagatgtggtctcccccaaaattgattctccctcagtctgagactaggaagaggctgcactgaaatcagttaccatggaaacctggctcatcatttctctagtccctagggagtctctgcctttatccctcaattattgggtccctagagctagcttgctctttctttctttctttctttttttgagacagggtcttatgctgttacccaagatagagagcagtggcatgatcacagctcactgcagccttgacctcctgggctcaagcgatcctcctatttcagcctcccccatagttaggaccacaggcatgcaccaccatgcccagctaattgtttatttatttattttttttttgtagagatagggtttccctgtgttgcccaggctggtctcaaactcctgggctcaagggatcctcccgcctcagcctcccaaagtgctgggattatgcccagcccctagagatacttctatagagatattgactctaaaggattgacctatggcttttggtatttagtatctctcactactccccccagctaagtaaggatttaaggaatttaggactccctggagttaacagatgaagagatgggggcataattacttcacccaaagtctagaagccttggcctctctcttggccaagatggaggattgaggagggacatggaccttcaggactaaccctctatggattggccctcccagaagcgtttgggctggtagacccaccccttcctacctgctgagtgatgtcatttcctgccaggatgggtagccctttgtacgggtccttggatggtagtaggtcatataggggcatctgagcccctgctgctaagtgagatcacattatttatcgtccataccattacttcttgtgaacagtaacatgtcactcctcctggcaggaaagtttctcattgtcagatgtttgtgcttcttttcaggtcttactttttaaatagagtgttctcattttatcctaggggatctcacttcctctgtggctccatccctgcatccctgtctgggccagcactcctgactgcttttagggagagaagctttcaggggcctccatttatttctctcaagtctgtttggctcaccctgccatggtcccctgtcttaccctgtccctgtgttgcccctattcctgtattccatt

SEQ ID NO: 568 - DNA, 519 bp, Homo sapiens
atggccctgcaagcagcrcggagcatgcgggccgtgctctgcagcctgcgcgcgctctgggcacccgccgtgccctgcctgccaaggccctggcagctgggggcgggcgccatctggacgctgctcacaggacccgttctgctctgggtgtgtaaattcacagagaagcatgaatggataacaacagaaaatggtattggaacagtgggaatcaataattttgcaaacgaagctttgggagatgttgtttactgtagtctgtctgaagttgggacaaaattgaacaaacaagatgagttttgtgctttggaaagtgtgaaagctgctagtgaaatctattmtctttaatcaggagaagtaactgaaattaatgaagctcttgcagaaaatccaggacttgtcaacaaatcttgttgtgaagatggttggctgataaagatgacactgagtaactcttcagaactggattaacttatgagtgaagaagtgtatgagacatacataaaatctattgaggar

SEQ ID NO: 569 - DNA, 3281 bp, Homo sapiens
actttggtggccactgaaagtcagcggcgcggactgccctgagggcgggaaagggtggtcactgggtcagcccgaagcacctgacatgagggcggggaccccgaaatgcacacgaagtccggaactggtcttctgtgattttcattcgccctggtctctgttccctttcgtactcaaagctcgtgcatccagggaggggaaaccggagatagggtcttcgggcccmgggcagaccctctgtgccgctgcaaaccgttgcagcctgaggctgtcaggtcctcccccagacacctgcggaccctccctctcctggcttcccrtctggtcatggcgagattctgggtctgcgtagccggtgctggcttctttcttgcatttttggttttgcattcgcgtttttgtggctctccagttttgaggaactttacttttgcagtttcctggagaactgagaaaattckttaccggctggatgtgggttggcctaagcacccagaatattttaccggaacaacattttgtgttgcagttgactccctcaatggattggtttacataggtcaaagaggggataacatcccaaagatattagtgttcacagaggatggatatttcctacgagcctggaattatacagttgacacacctcatggtatatttgcagccagtactctatatgaacaatccgtctggatcacggatgtaggaagtggattctttggtcatactgttaaaaaatacagttcttttggtgatcttgttcaagtcttgggtactccaggcaaaaaaggcactagtttgaatcctttgcagtttgataacccagcagaattatatgtagaggacacaggagatatttacattgtggatggagatggaggattgaataacagattgatcaaactgtcccaagatttcatgatcctttggctgcatggagaaaatgggacagggcctgctaagttcaacatacctcacagtgttacacttgattcagctggtcgggtgtgggttgctgaccgaggaaataaaagaatccaagtatttgataaagacactggggagtggttaggagcatggaataattgtttcacagaagagggaccttcttcagtcaggtttactcctgatgggaagtacttgattgtggcccagctgaatcttagcaggctctcagtcgtagcagcacccccagtgggaagcattggggagtgttctgtgatcagcacaatccaactagcagatcaagttttgccacatctcctagaagtcgacagaaagactggagcagtctatgtagcagaaattggagcaaaacaagtacaaaaatatgtccctttgaatagctatgttccttcatttggttcataatgtttctttccygggaatatttcaagtggcagttcagattctcaattcacyaagtgcttaaaaatgatgttcaagcacaagaatttatttttctagtataaaagatctagtatcagaaagatttgtttttgtatcattaagaatcttatattttgttgccctcttgggacttagttttatttgtaagtgcataaggatattttaatgaaaggaaagtaactaaaaaatggggttgggaagagggactaaggtggtaacctcattatttgccctggtagactgattctccctgggtaaaaaaaatgggaataaaaatgagcttgcatgataatttattaaatttcatgtgaagaactccagacctccagattgtgcaactaacataaartgagctgcttgagagattgtaaataagatgaactattgattaatttgagtacccacagagtgctgtgtcttgacgacttaaaaatgaaaaagcaggattgccttttgagtagcttgcagtctagtggggagacaagcaggcaaacagtcacaacacagcaaaagcgaccttggagcatagtgggacttttggagtaggagtgctgcatttgactgagggaatcatggatacttcgcaggagaagtgaatttgagctcagacttgaaaactgaggaggagcttaccaagggacaaggaggagaaaacaataatttccaagtaaagaaggtataaaaagttagaagtgtactgtaaactttgataggcttttaggccttttttaaagcccaacttggcttctgtccattacctataagatatttaatgtcagtcagcctttaaatgtaggaataaaatggctggcatctaagcactttagtaaaagaggtttttacaaataactaaggattgtagagcttccttctctttttttttctttttctttcttttgttttacatgaactcaacttattcctaacatttgtctacctcaaagaaatttcaagattatttagataacatggatatgtgccaaatcctttgagctgttaagatgataatttcctgctttcctcctacatcttctcctcccactccctcctttggtgtgaatattggcttcccaattaagacctttttttttttttttccagtttgttttagcttattataggttttggaggaactttgccattttgtaatctttcaaatcattcttcacccttcctcacatcagcttcctgcttttcccagtgttttactgtaaattgtgtagcatatgacaaatcttgagctgactttcctcttcacctgttatggctggagtattttccagacctgaagggactcacacttgttttgatacttggatcacatctccgtgaggttaggaaggtaaatctaccaacaggaagccctgtactctgtattccaaggccattggtaaatgtgttggtgccactgatcggactgtatgaccttaaacaagtcaccttagttttcagtgaaatgggaatatcattgtctcctctttcatgaatgctgtgagaatcagatgtgcaacaggtacakacttgccctttgaaatctatacctctggatacattagaggcattttattaacaaaggcccttctaaatgtgctatttatttgacaataactatcagatttgccttaattttgtgtttatagcatttatcaaaacgtatcctcatagactttatgcagattaatatggtcaattgatttggataaaagaaagtaatttcagggtttgtttttaagccaggacaagaagtgcaaatgcctctttgaagcaatttaggctaaactgattttgaaatttcaaaatgttttattttactttgttttattaagccaggacaagaagtgcaaatgcctctttgaagcaattcaggctag

SEQ ID NO: 570 - DNA, 3212 bp, Homo sapiens
ctgaaagtcagcggcgcggactgccctgagggcgggaaagggtggtcactgggtcagcccgaagcacctgacatgagggcggggaccccgaaatgcacacgaagtccggaactggtcttctgtgattttcattcgccctggtctctgttccctttcgtactcaaagctcgtgcatccagggaggggaaaccggagatagggtcttcgggcccmgggcagaccctctgtgccgctgcaaaccgttgcagcctgaggctgtcaggtcctcccccagacacctgcggaccctccctctcctggcttcccrtctggtcatggcgagattctgggtctgcgtagccggttttgaggaactttacttttgcagtttcctggagaactgagaaaattckttaccggctggatgtgggttggcctaagcacccagaatattttaccggaacaacattttgtgttgcagttgactccctcaatggattggtttacataggtcaaagaggggataacatcccaaagatattagtgttcacagaggatggatatttcctacgagcctggaattatacagttgacacacctcatggtatatttgcagccagtactctatatgaacaatccgtctggatcacggatgtaggaagtggattctttggtcatactgttaaaaaatacagttcttttggtgatcttgttcaagtcttgggtactccaggcaaaaaaggcactagtttgaatcctttgcagtttgataacccagcagaattatatgtagaggacacaggagatatttacattgtggatggagatggaggattgaataacagattgatcaaactgtcccaagatttcatgatcctttggctgcatggagaaaatgggacagggcctgctaagttcaacatacctcacagtgttacacttgattcagctggtcgggtgtgggttgctgaccgaggaaataaaagaatccaagtatttgataaagacactggggagtggttaggagcatggaataattgtttcacagaagagggaccttcttcagtcaggtttactcctgatgggaagtacttgattgtggcccagctgaatcttagcaggctctcagtcgtagcagcacccccagtgggaagcattggggagtgttctgtgatcagcacaatccaactagcagatcaagttttgccacatctcctagaagtcgacagaaagactggagcagtctatgtagcagaaattggagcaaaacaagtacaaaaatatgtccctttgaatagctatgttccttcatttggttcataatgtttctttccygggaatatttcaagtggcagttcagattctcaattcacyaagtgcttaaaaatgatgttcaagcacaagaatttatttttctagtataaaagatctagtatcagaaagatttgtttttgtatcattaagaatcttatattttgttgccctcttgggacttagttttatttgtaagtgcataaggatattttaatgaaaggaaagtaactaaaaaatggggttgggaagagggactaaggtggtaacctcattatttgccctggtagactgattctccctgggtaaaaaaaatgggaataaaaatgagcttgcatgataatttattaaatttcatgtgaagaactccagacctccagattgtgcaactaacataaartgagctgcttgagagattgtaaataagatgaactattgattaatttgagtacccacagagtgctgtgtcttgacgacttaaaaatgaaaaagcaggattgccttttgagtagcttgcagtctagtggggagacaagcaggcaaacagtcacaacacagcaaaagcgaccttggagcatagtgggacttttggagtaggagtgctgcatttgactgagggaatcatggatacttcgcaggagaagtgaatttgagctcagacttgaaaactgaggaggagcttaccaagggacaaggaggagaaaacaataatttccaagtaaagaaggtataaaaagttagaagtgtactgtaaactttgataggcttttaggccttttttaaagcccaacttggcttctgtccattacctataagatatttaatgtcagtcagcctttaaatgtaggaataaaatggctggcatctaagcactttagtaaaagaggtttttacaaataactaaggattgtagagcttccttctctttttttttctttttctttcttttgttttacatgaactcaacttattcctaacatttgtctacctcaaagaaatttcaagattatttagataacatggatatgtgccaaatcctttgagctgttaagatgataatttcctgctttcctcctacatcttctcctcccactccctcctttggtgtgaatattggcttcccaattaagacctttttttttttttttccagtttgttttagcttattataggttttggaggaactttgccattttgtaatctttcaaatcattcttcacccttcctcacatcagcttcctgcttttcccagtgttttactgtaaattgtgtagcatatgacaaatcttgagctgactttcctcttcacctgttatggctggagtattttccagacctgaagggactcacacttgttttgatacttggatcacatctccgtgaggttaggaaggtaaatctaccaacaggaagccctgtactctgtattccaaggccattggtaaatgtgttggtgccactgatcggactgtatgaccttaaacaagtcaccttagttttcagtgaaatgggaatatcattgtctcctctttcatgaatgctgtgagaatcagatgtgcaacaggtacakacttgccctttgaaatctatacctctggatacattagaggcattttattaacaaaggcccttctaaatgtgctatttatttgacaataactatcagatttgccttaattttgtgtttatagcatttatcaaaacgtatcctcatagactttatgcagattaatatggtcaattgatttggataaaagaaagtaatttcagggtttgtttttaagccaggacaagaagtgcaaatgcctctttgaagcaatttaggctaaactgattttgaaatttcaaaatgttttattttactttgttttattaagccaggacaagaagtgcaaatgcctctttgaagcaattcaggctag

SEQ ID NO: 571 - DNA, 2830 bp, Homo sapiens
gatgggacaaggaccagaaacgatccagtttctcctggccgaggaaaagactttaaatctcggaaggatggagactctaagaaggatgaagaggatgaacatggtgataagaagcctaaggcccagctgttatccctggaggaacttctggccaagaaaaaggctaaggaagaagctgaggttaagcccaagttcctctccaaagcagaacaagaggctgaagctctaaagcaacggcagcaggrggtggaagagcagcagaggatgcttgtagaggagaggaagaaaaggaaacagttccaagacttgggcaggaagatgttggaagattctcaggaacacagggagaggatggagccagagaccagtggaaatgaggatgagaaagggcagcagaagataygggaagagaaggataagagcaaagaactgcatgccattaaggagcattacctgggtggcatcaaaaagcggcaccaaacaagacatctcaatgaccgaaagtttgtttttgagggggatgcatctgaggasacatccattgactacaaccccctgtacaaagaacggcaccaggtgcagttgttagggcaaggtttcattacaggcattgacctcaagagcagtcaygtttctgtggagacctaatggaaaagaggcgaaccctgraagaaaaggagcaggaggaggcaagactcygcaaacttcataagaaggaagccaagtgcgctgggatgatcgtcattggtctcagaaaaagttagatgagatgacggacagggactggtggctcttccgtgagggctacagcatcaccaccaaaggtggcaagatccccaatcccatcygatcctggaaagagtcttyctgctgccacacatcttggaggtcattgataagtgtggctacaaggaatcaacacctatmcagcgtcaggcaattccctttgggctacagaatcgtgacatcattggtgtggctgagactggccgcagcaagacaacagccttcctcatcccactgctagtctagatcaccacacttcccaaaattgacaggatcgaagagtcagactaaggcccttatgccatcatcctggctcccacccatgagttggctcaacagattgaggaagagaccgtcaagtttgggaagctgctagatatccaactgtggctgtcattggtggcatctccagagaagactggggcttcaggctgctcatgggttgtgagattgtgatcgccacccctgggcatttgattgatgtgctggagaawcrctacctggtgctgagctgctgtacctacgtggttctggatgaggcagataggatgattgacgtgggcttcgagccagatgtccagaagatcctggagcacatgcctgtcagcaatcagaagccagacacgatgagtctgaggaccctgagaagatgctggccaactttgagtcaggaaaacgttaagtaccatcaaagtcatgttcatggccaccaagcccccagcagtggagtgtctggccaggagctatcttcggcgacctgctgtggtgtacmttgaccccgcaggcaagccccatgagcgtgtggaacaggtcttcctcatgtcagagtcagaaaagaggaaaaagctgctggaaatcttgaagcaaggctttgacccagccatcactatttttgtcaaccagaagaagggctgcgacgtgttggccaaatccctggagaagatggggtacaatgcctgtacactgcacggtggaaaaggccaggagcagcgagagtttgcattgtccaacctcaagcctggggccaaggatgtcttggtgactacagatgtggctggtcatggtattgacatccaagatgtgtctatggttgtcaactatgatatggccaaaaatattgacgattacatccaccgcattggccgcatgggacaagcaggcaagagtggggtggccatcaccttcctcacaaaagaggactctgcagttttctacgagctgaagcaagccatcctggaaagcccagtgtcttcctgtcccccmaaactagccaatcacccagatgcccagcataagccaggcaccatcctcaccaagaagcgccrgggagagaccatctttgcctgacacagcattcttcctgttcactgagggcatttccaaagctgcctcatgyctgttcttcagaaccctcacatccctttttccaggtcctcactcttgggttatggaggcttaggaaaacaatccgactccctagcccagaccctcaggtcgggaagcctscatgtggggctgcaaaaggagaagacgatgctgtaggaggcagggagagcaaattaccacagctttttggcccagctctgcccttctttgcttygggattgcactgggccataagctcatgccaggctatgggggcagccagttggcattgctccccagactgaacagaaacctggctgtctgatgggacctcctttggcacagacttgactgtgtaagtgtataaactgcagcagcatcgttgccctagatgccccaggagacctggcaccatgaggattatggacagtggaatcttactgtcatctggacagccgttttcctgtttggatggtaaaggaagttgagaacctttagacctgtgcacagccctgcaccaaggagtgctgtgtgctctaggcatcccttccccaggggattttctaagtagatggggggacagggtgaactgactgtgtccyttgtcactgaatgaaatctctgttttctattctctgagaagatgtttgtatgttctgagaataaatatatgaatatt

SEQ ID NO: 572 - DNA, 1536 bp, Homo sapiens
gtggtggactacctgatcagcggtggtaccggctacatgcccgaggacgggctcatcgcgcagcagctcttcgccagcgcctaaggcctcacctaggacgccttcctgattctcccaggactcatagacttcatagctgaggtggaccttacctcagccctgacccggaagatcacgctgaagacaccgctgatctcctcccccatggacactgtgacagaggctgacgtggccatcgcgatggctctgatgggagatactggtttcattcaccacaactgcaccccagagctccaggccaaggagctacggaaggtcaagaagtttgaacagggcttcatcacggaccccacggtgctgagcccctcccacactgtaggtgatgtgctggaggccaagatgcggcatggcttctctggcatccccatcactgagacgggcaccatgggcagcaagctggtgggcatcgtcacctcccgagacatcaactttcttgctgagaaggaccacaccaccctcctcagtgaggtgatgacgccaaggctcgagctggtggtagctccagcatgtgtgacgttgaaagaggcaaatgagatcctgcagcgtagcaagaaagggaagctgcctatcatcaatgatcgcaatgagctggtggccattatcaccggcagcgacctgaagaagaaccaagactaccctctggcctccaaggattcccacaagcagctgctgtgcggggcagctgtgggcacccgtgaggatgacaaatatcgcctggacctgctcacccaggtgggcgtcgacatcatagtcttggactcgtcccaagggaacttggtgtatcagatcgccatggtgcattacatcaaacagaagtacccccacctccaggtgattggcaggaacgtggtgacagcagcccaggccaagaacctgattgacgctggtgtggacgggctgtgtgtgggcatgggctgcggctccatctgcgtcacccgggaagtgatggcttgtggtcagccccagggcactgctgtgtacaaggaggccaagtatgccyggcgctttggtgtgcccatcatagccaatggcrgcatccagaccatggggcacatagtcaaggccctggcccttggagtctccacagtgatgatgggctccctgctggccatcaccatggaggcccctggtgagtasttctcagacgaggtgcggctcaagaagtactggggcatgggctcactggatgccatggagaagagcagcagcagccagaaacgatacttcagcaagggggataaggtgaagatcgtgcagggtgtcttgggctccatccaggacaaagggtccattcagaagttcgtgccctacctcatagtgggcatccagcacggctgctaggatatcggggcccacagcctgtctgtccctcggtccatgatgtactcaggagagctcaagtttgagaagcggatcatgtcggcccagatcgagggtggcgtccatggtctgcacttttatgaaaagcggctgtac

SEQ ID NO: 573 - DNA, 2296 bp, Homo sapiens
cctggcagactacctgatcagcagcggcaccagctacgtgcccgaggacgggctcaccgcgcagcagctcttcaccagcaccaacggcctcacctacaatgacttcctgattctcccaggattcatagacttcatagctgatgatgaggtggacctgacctcagccctgacccacaagggctgaagacgccgctgatctcctcccctrtggacactgacagaggctgacatggcaatcgggatggctctgatgggaggtattggtttcattcaccacaactgcaccccagagttcgaggccaatgaggtgckgaaggtcaagaagtttgaacagggcttcatcacggaccctgtggtgctgagccccttgcacaccgtgggtgatgtgcttggaggccaagatgctgcatggcttctctggtatccccctcactgagacgggcaccatgggcagcaagctggtgggcatcatcacctcccgagacgtcgactttcttgctaagaaggagcacgccaccttcatcagtgaggtgatgacgccaaggatggaactggtggtggctgacgttgaaaggtgtgacgttgaaagaggcaaatgagatcctgcagcgtarcaagaaagggaagctgcctatcgtcagtgatcgcgatgagctggtggccatcattgcccgcactgacctgaagaagaatcgagactaccctctggcctccaaggattcccacaaacagctgctgtgcagggcagctgtgggcacccgtgaggatgacgaatgccacctggacctgctcacccaggcgggtgtcaatgttgtagtcttggactcatcccaagggagctcggtgtatcagatcaccatggtgcattacatcaaacagaagtacccccacctccaggtgattggggggaacgtggtgacagcagcccaggccaagaacctgatggacgctcgtgtggacgggctgcatgtgggcatgggctacggctccatctgcattacccagaaagtgatggcctgcggttggccccagggcactgctgtgtacaaggtggccaagtatgcccagtgctttggtgtgcccatcatagtcgatggtggcatccagactgtggggcacgtggtcaaggccctggcccttggagcctccacagtgatgatgggctcctgctggccaccaccacggaggcacctggtgagtacttcttcttagaaagggtgcagctcaagaagtaccagggcatgggctcactggatgccatggagaagagcagcagcagccagaaacgatacttcagcaagggggataaggtgaagatcgcacagggtgtctcgggctccatccaggacaaagggtccattcagaagttcgtgccctacctcatagcgggcatccagcacagctgccaggatatcggggcccgcagcctgtctgtcctttggtccatgatgtactcaggggagctcaagtttgagaagcagaccatgtcggcccagatcaagggtggtrtccatggcctgcactcgtatgagaagcagctgtgatgaggacagcggtggaggctgaggtggtggagggggtgcaccccagtgtccaccttggggcacagtctccctccatcactgagtggtacacagatttgcactatgggttccccagctcctttccagggagagaagaggggaggtcctgaggggtctgcggccccttgcttggcatcccctgcagagtcaggactgcttcctgggccaggctgccctgggagccccccctgctcagctagctgggctctcaggccctgcacctgcctcaggtctttcttgctgcagcctgctgcagcctccttcagcctggcccccaccccaggggcaggcaacccctcctggcttcttctctagggcagcttcctgcccccagacccccaggaaatggtgctgtcctggccctgcctctggcccttccagggtcctgtcccctcagccatgtggcacttctgagctcctgacctaggccaaggggaggtctctgcccccttccccggccctgggctacccttgggtcctgctcctcaggctactcccctgttcctggccctggggaggaagctgccctggtcatggctacctgcctgtcattcctgactcaccaccgtcccgaggtgtaccattcctgccctcttcctcagctgcagttgaaggctttaactttgcactctttgggatcacagttgcgtcagtgtgtattaaataatcagaataaatcaagcaggtttcaatgcctccaaatatatatctat

SEQ ID NO: 574 - DNA, 875 bp, Homo sapiens
gttcttgccatggaaaattcagagaagacagaagtggctctctktgcttgtggttcctttaattctatcaccaacaagcacctcaggttgtttgagctggccaaggattrcatgaatggaacaggaagatatagagttgtcaaaggcataatctctcctgttggcgatgcatacaagaagaaaggactcattcctgcccatcaccaggtcatcacggcagaacttgccacccaaaattccaaatgggtagaagttgayacatgggaaagtcttcagaaggagtggatagagactgttaaggtgctaaggcaccatcaagagaaacygaaggccagtaactgtgatcaccagcagaactcacctacattaggaaggcctggacgaaagaggaagtggactgaacaaagacaagattctgatcaagaggaatcccctagagccaaaaatgaaaggtgcgccaaaggtccatctgctgtgygggggtagatttactggagtctttggtgttctcagtttgtggatgagtgaagatatcatccaaatcgtggcagattatgagctcatatgtattacttgatatatattatcatggaaaattcagattaaattggaaatgatgctcagaaattcatctatgaatctgatgtgttgttgaaacatcagagcaacattcacatggtgaatgaatggatgactattgagatctcattsacaaaaatctggagagtcctcagaagggatcagagcatttgctagttggcaccagatcttgtccaataataccttgaaaagcagaatttgtacagctccgagagtgaaaacaggaatgttgggatcatcctgcccctttgcagagaaacactgcagaagctaag

SEQ ID NO: 575 - DNA, 582 bp, Homo sapiens
ctagaggaagaggtagctccacaggaggtacagctgcttacacatctctcctcagagctgtcccttgacttgggggtgaatttcaggccaacaggscttcctgggatacargagcgttctccatggatctgccttactaccatggacgtctgaccaagcaagactgtgagaccttgctgctcaaggaaggggtggatggcaactttcttttaagagacagcgagtcgayaccaggagtcctgtgcctctgtgtctcgtttaaaaatattgtctacacataccgaatcttcagagagaaacacgggtattacaggatacaggtaagaacaaaaaggacgacaacaacaacaacacaaaagttgggggagaagaacctgggaacatgtcttttacctgagccatgactgtgcgaaagcattctaaaaaggaaagcacaatgcagagatgagagtcagatcgagttaacctggtttttccctgaagagaaataggaaggttctaggcttgggttctactttttttgttgttgttttgttttttttagacggagtctcgctctgtcgyccaggctggagtgcagtg

SEQ ID NO: 576 - DNA, 2380 bp, Homo sapiens
aaactgccaaactgtttyccaaagtgatcatgcgatctcactattcccatgggcattacatgagttctgattgctctacatccttaccaacatgtggaacggtttaaaaatattgtctacacataccgaatcttcagagagaaacacgggtattacaggatacagactgcagaaggttctccaaaacaggtctttccaagcctaaaggaactgatctccaaatttgaaaaaccaaatcaggggatggtggttcaccttttaaagccaataaagagaaccagccccagcttgagatggagaggattgaaattagagttggaaacatttgtgaamagtaacagcgattatgtggatgtcttgccttraagataaggctgccggacaaagcaagttgaagagatgagtaacagttctcactgatgacccacttctgcaggcataggtccagagcaccaaactctagtggacaattcagactctcctggttgtgtaactgaagatgttctgcccaccagcaccagaggtcactctccacatccccgcctcccagacatataccaggagcaatttcaaaaccctctccagtttcactcttctttcttggaatgggacagcctgaacattttccctttgacttgttaaaggtaccaccctacatcatggttgacaccctcctttggaccatgcagtcagaggggcagctttatacagaggaggggcacacttgtctgtgagtttgaagccctgagttccagtcctgtggctgtgtgactttgaacacgtttctgcccatctccaggtcttagtttctttgtctctgtggttgggtgggatgataaacattgccccagtctctctgttgagcctgcttgtgtcaggtgaaggtgagggatcgggagtgatggagatgcatacagatcagcaccttctctgtacctgctggacccccatgtgcacccttctccctccagcctgggctactctcctcctggttctttctaatcttaaacttcctggtgagcattgccccagccacactttctccctggttttgcttaattccacttatgcatcagtcatttcaacagcatgaatgtggttctgtacagtgatgtatgtggagatttctaaaatattctatgtgtgatttctgttcccaactaggttctaagtgccatcaaagcacggttgggtctcccttgtatcttccacagtgtgtagaaatttgtgctgcccagagctgtgcctagttcatagaaactgactggaagcacattgctgagggaggtttgttgaattggtttttaaggtttaytgaaattgatttgctgaatttttctgctagttcaaaatgtgaattaggacctggtcagtttgaaatataccaaattctatgccctttctcttacctatcatcaaattgtagtaatgtatttcaccccactggacttatcttcagagttttaaaagagaggagctctcgacttagaggtaatatgaacagatgaacagacwctgtggctggagccccaaagtgtggagcattgtgagatttggggtcacagcaatttatggctactattccctgggtctggtaggtaggacaaatgtcctcttttacttttcaaaactggcttaggtattcatggaccttgattcttctatatacattttataataaatacgtgaaattgcttamaacctctttttggaatttttaatgaacttgcaacaaatttgtaaataggagagaactgacgttcttgtgatgttttcycatgcataaacatgccacatccatgttcttgggtcatcttttttgccctttcatggagtcataaattttcccaactgaagtcttgtatattctgttagattaattcctatttctagttgctgtaaatgatatcttatgttttattacatttctaataggatatggtgttggtgaaatgttaaccctctcattagatctactagtttacctgttgattctattgtgttttctatgtaaatgattttgtcagctataaataataacattttattttctctttccttgcaatacctatgctcatttattttttatgtttacccattggttagggcctcctgtatacattaaacagttcatagtcatgatagtgagtattcttacactgttcccagtattacagggaatgcttagaaattttctttatttaaacattatgtttgttgtagccttgttaaaggctattttataatttttactagaaatattttgacatttattgtgatttttttctatctctaatctattgagatagtcacattccttttgtcttcactccattataaaggtaagttaccttaataaaattgttgatatcatttcatc

SEQ ID NO: 577 - DNA, 2535 bp, Homo sapiens
ctagaggaagaggtagctccacaggaggtacagctgcttacacatctctcctcagagctgtcccttgacttgggggtgaatttcaggccaacaggscttcctgggatacargagcgttctccatggatctgccttactaccatggacgtctgaccaagcaagactgtgagaccttgctgctcaaggaaggggtggatggcaactttcttttaagagacagcgagtcgayaccaggagtcctgtgcctctgtgtctcgtttaaaaatattgtctacacataccgaatcttcagagagaaacacgggtattacaggatacagactgcagaaggttctccaaaacaggtctttccaagcctaaaggaactgatctccaaatttgaaaaaccaaatcaggggatggtggttcaccttttaaagccaataaagagaaccagccccagcttgagatggagaggattgaaattagagttggaaacatttgtgaamagtaacagcgattatgtggatgtcttgccttraagataaggctgccggacaaagcaagttgaagagatgagtaacagttctcactgatgacccacttctgcaggcataggtccagagcaccaaactctagtggacaattcagactctcctggttgtgtaactgaagatgttctgcccaccagcaccagaggtcactctccacatccccgcctcccagacatataccaggagcaatttcaaaaccctctccagtttcactcttctttcttggaatgggacagcctgaacattttccctttgacttgttaaaggtaccaccctacatcatggttgacaccctcctttggaccatgcagtcagaggggcagctttatacagaggaggggcacacttgtctgtgagtttgaagccctgagttccagtcctgtggctgtgtgactttgaacacgtttctgcccatctccaggtcttagtttctttgtctctgtggttgggtgggatgataaacattgccccagtctctctgttgagcctgcttgtgtcaggtgaaggtgagggatcgggagtgatggagatgcatacagatcagcaccttctctgtacctgctggacccccatgtgcacccttctccctccagcctgggctactctcctcctggttctttctaatcttaaacttcctggtgagcattgccccagccacactttctccctggttttgcttaattccacttatgcatcagtcatttcaacagcatgaatgtggttctgtacagtgatgtatgtggagatttctaaaatattctatgtgtgatttctgttcccaactaggttctaagtgccatcaaagcacggttgggtctcccttgtatcttccacagtgtgtagaaatttgtgctgcccagagctgtgcctagttcatagaaactgactggaagcacattgctgagggaggtttgttgaattggtttttaaggtttaytgaaattgatttgctgaatttttctgctagttcaaaatgtgaattaggacctggtcagtttgaaatataccaaattctatgccctttctcttacctatcatcaaattgtagtaatgtatttcaccccactggacttatcttcagagttttaaaagagaggagctctcgacttagaggtaatatgaacagatgaacagacwctgtggctggagccccaaagtgtggagcattgtgagatttggggtcacagcaatttatggctactattccctgggtctggtaggtaggacaaatgtcctcttttacttttcaaaactggcttaggtattcatggaccttgattcttctatatacattttataataaatacgtgaaattgcttamaacctctttttggaatttttaatgaacttgcaacaaatttgtaaataggagagaactgacgttcttgtgatgttttcycatgcataaacatgccacatccatgttcttgggtcatcttttttgccctttcatggagtcataaattttcccaactgaagtcttgtatattctgttagattaattcctatttctagttgctgtaaatgatatcttatgttttattacatttctaataggatatggtgttggtgaaatgttaaccctctcattagatctactagtttacctgttgattctattgtgttttctatgtaaatgattttgtcagctataaataataacattttattttctctttccttgcaatacctatgctcatttattttttatgtttacccattggttagggcctcctgtatacattaaacagttcatagtcatgatagtgagtattcttacactgttcccagtattacagggaatgcttagaaattttctttatttaaacattatgtttgttgtagccttgttaaaggctattttataatttttactagaaatattttgacatttattgtgatttttttctatctctaatctattgagatagtcacattccttttgtcttcactccattataaaggtaagttaccttaataaaattgttgatatcatttcatc

SEQ ID NO: 578 - DNA, 505 bp, Homo sapiens
ggaagggggccttgggacgcatgcgaggctgcaggaccgtgtcctccaccgagcgtgaccccgatagtggaatcagctcacccaaagctcaggcttctgaggcccgggcgggggactcgaaaacggctgcttcttggtgaaaacgggtgctaaatggctgttcgagtgctgaggtcttgatgggaggcagtccctgttcgcagaggacgagtgagccagtscgtgagcgggtgggcagcaggggccctgtagcctctgggttggactcgtcagggtgaaggtcaggcgttgactcgcattaacataaagagcgggaacagcagattacctaaaacctcgggcagaagaggagaggaggatagcagcagaagagaagaagaagcaggatgaactgaaacggattgccagagaattggcagaagatgacagcatattaaagtgagtgaccctgcgacccactctttggaccagcagcggatgaataaagcttcctgtgttgtgtgat

SEQ ID NO: 579 - DNA, 1326 bp, Homo sapiens
ggcgggggtctgggaagctcagcagccatggccagccacctcaagctcaacaacactgccaaaatgcccatcctgaggctgggcacctggaagtcccctccaggccaggtmaccgaggctatgaagatggcgattggcattgggtaccaccacactgactgcacctacaccagaacaagcatgaggtgcaggtggcccaggagaagctcagggagcaggtggtgaagcgtgaggacctcctcatcgtcacaagctgtggtgcacataccatgagaaggggctggtaaaaggagcctcccagaagatattcagcaacctaaagctggactacatggccctctatcttattcactggccagctggctttaagcctgggaaggaatttttcccattggatgaatcaggcaacatggttcccagtgacactgacatgtggacacatgggcagccatggaagagctggcgaacgctattggcatctccaccttcaaccatctgcaggtcgagaggatcttaaacaagcctggctcaaagtgtaagctggcagttaaccagattcagtgtcacccgtacctaactcaggagaagtttatccagtactgccagtccaaaggtatcacagtgactgcctgtagctgccttggctctcctgacaagccccgggccaagcccaaggacccttccctactggaagatcccaggatcgaagcaatcacagccaaccggaataaaactacagcccagattctgatccggttccccatgcagaggagcttggtggtgattccctagtctgtgacaccaaaacacattgctgggaacttcaaggtcttcaactttgaactgggcagccaggatatgactaccttactcagctacagcaggaactggagggtctgtgcctttgtgagctgagccttccacaaggattacctcttccatgaagagttttgaggctgtgggcttgcttgtccacaagtgacctacacctgtttttcccacctcattttttcttgcaaatatatatggcctgtgtcactcagaggtggaacagcaacctgaagacagaccattgagggctttcctagcttgatgttgcgtttggagagcagtacccacagagtacaagtctcttccagttttctttgcccttattgttgcccagcyggggaaartacaacttgaatacccttttctgaccaaggaaaagcaaaatgtacaaagtcaaaatagtgccactaatagttgagttttgatgcttggaactgtaatcctttcagcaagacttctctttacctcaaataaaaatgcttttgtaaaaaaaaa

SEQ ID NO: 580 - DNA, 1509 bp, Homo sapiens
agctccaattgctctatgtttagaattgcctctttttcaagatggatttccttcacaggaatggagtgctcataattcagcatttgcagaaggactaccgagcttactacacttttytaaatkttatgtccaatgttggagaccccaggaatatctttttcatttattttccactttgttttcaatttaatcagacagttggaaccaagatgatatgggtagcagtcattggggattggttaaatcttatatttaaatggatattatttggtcatcgaccttactggtgggtccaagaaactcagatttacccaaatcactcaagtccatgccttgaacagttccctactacatgtgaaacaggtccaggaagtccatctggccatgcaatgggcgcatcctgtgtctggtatgtcatggtaaccgctgccctgagccacactgtctgtgggatggataagttctctatcactctgcacagactgacctggtcatttctttggagtgttttttggttgattcaaatcagtgtctgcatctccagagtattcrtagcaacacattttcctcatcaagttattcttggagtaattggtggcatgctggtggcagaggcctttgaacacactccaggcatccaaacggccagtctgggcacatmcctgaaraccaacctctttctcttcctgtttgcasttggcttttacctgcttcttagggtgctcaacattgacctgctgtggtccgtgcccatagccaaaaagtggtgtgctaaccccgactggatccacattgacaccacrccttttgctggactcgtgagaaaccttggggtcctctttggcttgggctttgcaatcaactcagagatgttcctcctgagctgccgagggggaaataactacacactgagcttccggttgctctgtgccttgacctcattgacaatactgcagctctaccatttcctccagatcccgactcacgaagagcatttattttatgtgctgyctttttgtaaaagtgcatccattcccctaactgtggttgctttcattcyctactstgttcatatgttaatgaaacaaagcggaaagaagagtcagtagagtggtgcctagagttagtgctctgtrtcacagatcacccttctccatccaccagtagagccacagagtaggcacagaccagaggcttctaatccgacttcacagaatagcggcacaggccccattccccataragatgtttagtttggccttcgcactggtctttttttttaatccttcagttaccaatatttagatacaagaatatttgacataaaaatcggaagttctgtatttcttgaaaaatctgatagtatgacaacacagagcctgcatccccagctggagacaactgaccagagctgcatactaacartccccaktaggaggcaaggactccattttctcacagtcttcarcatcccagcaggagccccactatgattcctttatcttctta

SEQ ID NO: 581 - DNA, 2327 bp, Homo sapiens
atgaactgctgtgacaatgggaagcggaagtggtggtttaagtgtgttgttgatgctttcatcaaagcgtcgtgctcccacctcatgctaagtaaagcagctggtgaatgttatgtcgtgcactgcagatggattggtggtggcaggcccagagctcrccacatctacttaaacaggtgtttgattctgcattttccaggtagccagaaggaacctgattattcgaaccacacatccaccttcatgaacagagggcagtgtgagggatcctttctagtcaccgggaatgacagacatmatcaacagttagccaggaaatcacaaataaaacagctacccctaagaaggcagaaaccaaaaaagcatcaaagcagctttttgcagcaagaagatccacaaacttcagggggcaggaaggcagctgtcagctttcacatggcactcgctcctggcaagcaagcaagtccagtggcagccaaatccttgtcatgttccaatcagccccacaatggtggagcctccactgactggtggcagggatgctgtgtgtacattaccagcgtatggagaaggtgcagaaaggcccaggcagccattaggaatggagtgttgttgatgatgaaaaggcactttgccgggaaagtgactgggtccacaaacagttccaaggaggtgactcctgtgtcagcagttctggagaggctaaccagaccagtcatgcctcggggatccatgagactctatgctgggactacagcttctaaagaccaccctgagctactaaccattcgggcagaacttcaaaaagtcagattccagattccagtggcatcagactctcagaaagaatcccttgccatgtgcccaagcagtcccagaggatcaatcaatgtgctctttctctgcttcaattctactatcctaaaagtattagccatcccacagttctactgtattcaactgaaaaccacagaagggtcttcagtaccagaacatgctagaggagaacctgaacccagcctgaattatcgcccaatctccttaataaatgtggacagggaaatctcagtaaaggtgctgrctaataggctggaacagatattcccacaccaaatccatcccaatcagcccagcaaccccacatcccccactgtcgttaccacacctgagcctgtggggactgaggctgggaacaagtacatcaaagcaggtgacgatgaaccagagtacaaggacagctggggctttggcaatggggagctggccaaagccgagcagctgaaggcacccrctgtgtcatgtggcttggagagaccacctataatacaacaagcagcccatgtaccacaaagccatctacgaagtcctgccrgtggccagcagtgtacaggggagcwgttctcagggagccatgacagtgatgagagtgacactgccaaggatacagaggtgcagagcaagcagatattcagatggacctttggggggttccagccttctgcccccaagagactggagccacaagaagaggagaagaatcccagcaaagaagtttatgcacacgaatatgacgacattgcaagaactgcttcctggaatatgcataccagtatgatgaagaaggctatcagttctgctgcaccatctgctgctgtgggcacgaggtgcttttgcgtggagtgtatagacctcttggttgggccagaggttgttgcccaggtgaccattaaggaagatccctggaactgctacatgtgtgaacacaagggcatctgtgagctgctgcagtggcgggatgactggccctctcagctccagatgttcttccccaataaccctaaccaggaatttgaccctctggaagtctactcgcctgtcccagytgagaaaaggaagccgcccatccaggggaggatcatgcacatcagggatacccgaaccatcatacagaagcacaaccaggatgtggtggccatgggcactagtcaaaagagagacatctcacaatttttttattcgaattccatgatgattaatgccaaggaagtgtcagctgcacaccagaactactacatctgtggtaaccttcccagtaagagcaggccattggcattcactaygaatgtaagctggagctgcaggagtgtgtggagcatggcagaaaagccaaggtcagcaaagcgaggaccattactaccaggtcaaactccataatgcagggcaaagaccagcgtctccctgtcttcatgaatgagaaggacaccttaggtgcattgaaattgaaagggtatttggactccctgtccattatactgacatctccaaca

SEQ ID NO: 582 - DNA, 1138 bp, Homo sapiens
ttaaattccagtccctccatgtgaggtcctcaatttcctcctttataaaacacagatgaaaatgagatgtccttcaagtctacagtggatctgaagggagggctattattttctgtgagacgaagaagaatgtaactgacatggccatgaatccgcacaaaacagaatgcactgtgtttacatggggacattgcacagtcacaaagagaaattacactaaaaggcttcagagaggtaattataaagttttggtggcaaccaatgtggctcctcgtggtttggacattcctgtagttgacctggtgattcaaagttctcctcctcaggatattgagtcctatatccatctctctggatgcgtgggtaaagctggacagacaggggtttgtatatgtttttatcaaccaagagaaaggtcaactaagacatgtggaacaaaaaacacaaattacttttaaatgtgtaggtgttccttctacaatggatttagttaaatttaaaagcatggatgccataaggtctctggcttccatttcttatgctgctgttgatttttttccaaccatcagctcagatactgatagaagagaaaggggcgatagatgcattggctgcagctttagcccacatttctggtgtatcaagctttgaaccatgatctttaatcaactctgataaggggtttgtgaccatgactctggaaagcctagaggaaatacaggatgtcagctgtgcttggaaagaacttagaaagctgaatagtaatgcagtgtctcagattaccagagtgtgcctcctgaaaggaaatatgggtgtttgctttgatattcctccaattgagtcaaaggttacaggcaaagtggcatgattccggctggatactctcagtgccagctaaattacctgaaattaaagaatattatgatggaaacatcttttaattccagacagaggagtggctggtcaggccagtcaggtkgtcgatctggcaattggtcaggtagagagagtcgacaaagcagttgctcaggaaagtcggcaagatggtagaagacgaagtggaacagaaatagatcaagaagtgggggccacaaatggagttttgactgagtatttgatagttaatttagcagtgtga

SEQ ID NO: 583 - DNA, 1428 bp, Homo sapiens
agaaggggtcctggtgatgagtgctgcgttctctccctgagtccactcgcccgcctgccaccctccaccgtcgcaccctgcaaacccacccctctcctgtgctagaacttgctaacaccagtaccatgccctaccaatatccattgctgaccccggagcagaaggagctgtctgacatgactcatcgcatcgtagctctgggcaagggcatcccggctgcagatgagtccactgggagcactgccaagtggctgcagtccattggcaccgagaataccgaggagaaccggtgcttctaccgccagctgtggctgacagctgacaaccgcgtgaacccctgcatcaagggtgtcatcctcttccatgagacgctgtaccaaaaggcggatgatgggcgtcccttcccccaagttatcaaatccaagggcaatgttgtgagcatcaaggtagacaagggggtggtacccctggaaagggcaaatggtgagaccaccacccaagggctggatgggctgtctgagcgctgtgccccatacaagaaggatggagcccactttgccaagtggcatcatgtgctgaagattgggaaacacaccccctcagccctcaccatcattgaaaatgccaacatcagctgggcgcgtgtgtcaatgtcctggcccactatgccagcatctgccagcagaatggcattgtgctcwtcgtggagcctgaggatcctccccagtggggaccatgacttgtagtactgccagtatgtaaccgagaaggtgtggctgctctacaaggctctgagtgaccatgacatctacctggaaggcaccttgctgaagtccaatatggtcaccccaggccatgcctgcatccagaagttttctcatgaggagattgccatggcaacttgctgcactgcacagtgycccccactgtccctgggatcaccttcctgtctggaggccagagcaaggaagtgtccatcaacctcaatgccattaacaagtgccccctcctgaagccctggggcctgaccttctcatatagctgagccctgcaggcctctgccytgaaggcctggggcaggaagaaggagaacctgaaggctgtgcagaaggagtatgtcaagtgagccctggcagatagccacgcctgtcaaggaaagtatactccaagcggtcaggctggggctgctgccagtgagtccctcttcatctttaaccatgcctagtaagcggaggtgttcccaggctgccccccaacaccccaggccccatcccctcccacgctctcttgaagagggggactcctcttcggggctccaggctggcttgcccgcgcgcttgcctccctcgtgacagcggtgtgtgttgtctgtgaatgctaactccatcaccctttctagcacattgctaataaacagctatttaaggg

SEQ ID NO: 584 - DNA, 654 bp, Homo sapiens
atggttaaggtgaaggccagagtcaacagatttggccacattgggcaccagatcaccagggctgcttttaactctggtaaagtggatattgttgccatcagtgaccccttcactggcctcaactacatggtctacgtgttccagtgtggttctacccatggcaaattccatggcactgtcaaggctgasaatgggaagcttgtcattaacggaaatctcatcaccatctttcaggagcgagatcccaccaaaatcaaatgggacaatgytgacgctgagtacatttgggtgtccaccgcctccctggccaagctcatccatgacaactttggtattgtggaaggactcatgaccacgayccacaccatcactgccacccagaagactgtagatggaccctccaggaaactgtggtgtgatggccacggggctctccagatcatcatccctgcatctactggtgctgccaaagctgtaggcaaggtcatcccygagmtgaatgggaagattactagcatggccttccgtgtccccaccaccaatgtgtcggtcatgcatctgacctgccrtctggaaaatcctgccaaatatgatgacatcaagaaggtggtgaaasaggcatcagaggcccctcaagggcatcctggactacac

SEQ ID NO: 585 - DNA, 1098 bp, Homo sapiens
atggttaaggtgaaggccagagtcaacagatttggccacattgggcaccagatcaccagggctgcttttaactctggtaaagtggatattgttgccatcagtgaccccttcactggcctcaactacatggtctacgtgttccagtgtggttctacccatggcaaattccatggcactgtcaaggctgasaatgggaagcttgtcattaacggaaatctcatcaccatctttcaggagcgagatcccaccaaaatcaaatgggacaatgytgacgctgagtacatttgggtgtccaccggtgtcttcaccaccacagagaaggctggggctcacttgcagcagggagccaaaagggtcataatctctactccctctgctgacgyccccatgttcatgatgggcgtgaaccataagaaatatgaaaacagcctcaagatcatcagcaattgcctcctgtaccaccaacttcttagcctccctggccaagctcatccatgacaactttggtattgtggaaggactcatgaccacgayccacaccatcactgccacccagaagactgtagatggaccctccaggaaactgtggtgtgatggccacggggctctccagatcatcatccctgcatctactggtgctgccaaagctgtaggcaaggtcatcccygagmtgaatgggaagattactagcatggccttccgtgtccccaccaccaatgtgtcggtcatgcatctgacctgccrtctggaaaatcctgccaaatatgatgacatcaagaaggtggtgaaasaggcatcagaggcccctcaagggcatcctggactacactgagcaccasgttgtctcctccagctttaacagtgacacccactcttccaccttcaatgatggggctggtattgccctcaatgaccattttgtcaagytcatttcctgttatgacaatgcatttggctacaacaacagggcagtggacctcatggcccacatggcctccaagaagtaagacccccagaccaccagcctcaggccctcagctgctaggaatcccctattgcactaggtctcctaccacactgagaatctcccctcctcac

SEQ ID NO: 586 - DNA, 901 bp, Homo sapiens
aaagtgaagacaggagtaaatggatttggccatattgggtgcctggtcaccagggcaccagagctgcttttaactctggcagaatggatgttgtcacctcaatgaccccttcattgacctcaactacatggtctacatgttccaatatgattctacccacggcaagttccgcggcaccatcaaagctgagaaagaagggaagcttgtcatcaataggaaatgggaatctcatccccatcttctagaagccagatcccagcaaaatcaaattgggtgacgatgctggcactggttatgtcatggagtccaccagcagcatcttcacgaccatggggaaggctggggctcgcttaggatgggcagccaaagggatcaccatctctgccccctctgcccatgcccccatgtttgtgatggacatgaaccatgagagatacaaaaacctcatgatcgtcagcaatgcctcctgcaccaccaactgcttaccctccggccaaggtcatccgtgacaacgtttttttttgattacaggctgagccactgaccctggtcatccatgacatctttggcaacatggaggggctcatgaccacagcccctctgggaaactggcgtgacaaacatcatccctgcatctactggcacggccaaggctgtgggcaaattcctgcactgaacaggaagctcactggcacagccttccgagtccctgccaccaatgtgttggtggttgacccgacctgccatctggagaaacctgccaaatatsatgacctcaagaaggtggtgaaacaggcattgggggggccccctcaagggcatcccgggctacattgagaacaaggttatatcctccgcctttgtttttaaattatatttatttatttttttgatagggagt

SEQ ID NO: 587 - DNA, 909 bp, Homo sapiens
atgctgacagtagccagtggctctgtgaaggcaattttccaacctaccattcttggctactcctgggatattttacttggctgtgagatccccctgagaagcttctctttttctcacacaattcctccatcagcgaagtgtggtgggcagcacacagtgactatgattcctggagatggcactgggactgaacttatgctgcctgtcaagattatgttcagacatsttagcgttaaaactgacgacaccctgccaccatcatacaaatccttcaacaacatgttgcataccaccctagatctctatgccagtgtcattcatttaaaaaatttgccaaacgtggagaccyggcacaaagatgtagacatcctagttgtttgggaaaacacagagggtgagtatagcaatctggagcatgagagtgtgaaaggagtgacagagagcctaaagatcatgactaaggccaagtctttgygcattgctgaatatgccttccagctggcccagaagatgggatgcaaaaaagtgatggctgtgcacaaggtcaacatcacgaaactgggagatggtctcttcctccagtgctgtgggggagtgtttgagacagcttcaaggcaatgtgacaatttagtcaatacaaatctggcaaaccctaccgccatgctgctggcaatttgtatcatgctggattacctcaaactccactcctatgccacccacattaatactgcagtcttggcatccttggacaacaaaagtgtccacactgcagaccttggaggccaggtagtagcaggatgtataccatctggaccattcggtgccatcaggaaatggtcaaaatatttgcatgcccctcaggttcaagtaaataaacagcagcagcagcagcaacaacaacatttccag

SEQ ID NO: 588 - DNA, 1002 bp, Homo sapiens
atgccctggcagcccgcccctttcccacaccgcctccccggcacacgccgcacctgtcagccctctgagctccgaggtgcggtgcaggctgagccrctgcctgagccgctgctccacgtcctgggccttagcttcccgctgcagacctgccggccgattcttcgctgccctcccsgtctcatgaagccgctggtcgtgtttgtccacggcggtcccggcgcgctggcatccttgagaaagatggctacacacacctttctgcaggagagttacttcatgatgaaaggaagagcccagattcacagtatgaccagtgagaacattgtcatggaaaccaccacttgcaccaccagaaagatgcagaagaaaagaagtgagacgttagagactgtcagaggaggggaagaagaggagaatggggcctgcagcgggtgtgagcagcccagagggtggggctggattatcccgaaggcgtcctcgccctccacgtccctcctccgcsggggtggcctggggcgccgggtcacgtggccggggaagaggttttatcccgcggcccctcggaaccccgccgctgctctgccgcccaggcccatggccgcagccctggcgctcgtggcgggggtcctgtcgggggcggtgctgcccctctggagcgcgcttccgcaatataaaaagaaaatcacagacaggtgcttccaccactctgagtgctacagtggctgctgcctcatggacttggactccggtggagccttctgtgcccccagggccagaataaccatgatctgcttgccccagaccaagggagctaccaacatcatctgcccttgccggatgggcttgacgtgcatatccaaggacttgatgtgttcccgccggtgccatatgatttagaggaagatgcaggctggtcactgctcccttggggccataggccctggttgccaccaacttgctccaaatccagctcctgagacattaaagtcacttcctgtcctt

SEQ ID NO: 589 - DNA, 1113 bp, Homo sapiens
atgccctggcagcccgcccctttcccacaccgcctccccggcacacgccgcacctgtcagccctctgagctccgagacctgccggccgattcttcgctgccctcccsgtctcatgaagccgctggtcgtgtttgtccacggcggtcccggcgcgctggcatccttgagaaagatggctacacacacctttctgcaggagagttacttcatgatgaaaggaagagcccagattcacagtatggtgaactcactgaaaattacattaaagaaggaaacatgggaccagtggagataaccatcagtttattaaagagggaaatggatcagacaatggctgtcagtgctcaaaagagtacatctttgatcgatggatgggtttmcaagaaatcaagacaaccttcaagggcaggaaagctaaacactagagtggtagacctaggtgtgattgctgatcacatgcactgcctaaagcctaatcttcatggaggtcaggcagctcagggattcccggcgctggagaccctggtgatcttgttcctactcccccgcaatgcagaggtaccctggacatgtgcctgtgaccggtgctggcaggccatggcgtcctcgccctccacgtccctcctccgcsggggtggcctggggcgccgggtcacgtggccggggaagaggttttatcccgcggcccctcggaaccccgccgctgctctgccgcccaggcccatggccgcagccctggcgctcgtggcgggggtcctgtcgggggcggtgctgcccctctggagcgcgcttccgcaatataaaaaggagagggtggccccgccgccggggcactggagcccgaaggcgccgggcagcctgaaagggagaggtgggtccggaaccacacccaggcggaaaatcacagacaggtgcttccaccactctgagtgctacagtggctgctgcctcatggacttggactccggtggagccttctgtgcccccagggccagaataaccatgatctgcttgccccagaccaagggagctaccaacatcatctgcccttgccggatgggcttgacgtgcatatccaaggacttgatgtgttcccgccggtgccatatgatt

SEQ ID NO: 590 - DNA, 1234 bp, Homo sapiens
agggcgcccctcggcctcctccctttcggaggtggggacaaggtggaggaagggctgcaggaggaggagctctagcatcgcgacccgccccgtcccgtccagtctggcctgggcgccgcgggaacgctgtcctrgctgccgccacccgaacagcctgtcctggtgccccggctccctgccccgcgcccagtcatgaccctgcgcccctcactcctcccgctccatctgctgctgctgctgctgctcagtgcggcggtgtgccgggctgaggctgggctcgaaaccgaaagtcccgtccggaccctccaagtggagaccctggtggagcccccagaaccatgtgccgagcccgctgcttttggagacacgcttcacatacactacacgggaagcttggtagatggacgtattattgacacctccctgaccagagaccctctggttatagaacttggccaaaagcaggtgattccaggtctggagcagagtcttctcgacatgtgtgtgggagagaagcgaagggcaatcattccttctcacttggcctatggaaaacggggatttccaccatctgtcccagcggatgcagtggtgcagtatgacgtggagctgattgcactaatccgagccaactactggctaaagctggtgaagggcattttgcctctggtagggatggccatggtgccagccctcctgggcctcattgggtatcacctatacagaaaggccaatagacccaaagtctccaaaaagaagctcaaggaagagaaacgaaacaagagcaaaaagaaataataaataataaattttaaaaaacttatttgcattcttcatctgatattttctgagactgcctttgaaagtgggaatgaggtaaagggctgaggaaaaaagcattgtgaattgcatcttgcctggcatgggggtggttgtaggccctggatcacctcttcccctggcctcctcttgctgtcctaactgactttaaggacctggtcttgagtcttcccataggatctctaggtccttaaggtatgggttttggctctcatggtgccctgattctgaggagggatgcttaattgagcagtgagcctcctggtagttgcctagctgttctctctgttccctgggaccacagtgttcctagtgtcctcaaagagaactgctctgtccaatatggaaaagatataaagagctcataaactccatggaaatttttaatagcaac

SEQ ID NO: 591 - DNA, 2412 bp, Homo sapiens
agttctttattttatttatgctatctatttcttttccttttttttttttttttttttttttgagatgaagtcttactctgttgcccaggctagagtgtagtggtgtgatctcggctcactgcaaccactgcctcctgggttcaagtgattctcctgacttaacctcctgagtagctgggactacaagagcatgccatcatgcccagctaatttttgtatttttagtagagatggggtttcaccatattggccagaatggttttgcattcctgacctcaagtgatctgcctgcctcagcctcccaaaatgttgggttacaggggtgagccaccgtgccttgctatttatgccatctatttcactgaagattccgcctctcatttcttgagtcattttttttaaatttccttaaattggacttcacatttttctgatgcctccttgtttagcttaataactgaccttctgaattcttttttaggaaaatcaggaatttcttcttggtttggagccattgctggacatcctttgccattcaacctctgatttgcacaaggtgactaaaggaccagcagcaaacaaaagcaaaggtcttctagagtgcactaaagcagaagataacrtaacatttttatcttaccrtgaaagtattatctgaaggacagttaaagctttgtgttgttcaaccagtacatctcacttcatggctccttatattttttattctaaagtctatctcttgtctaaaacctgctcgacttccaatttatcaaaggaaaccttttatagctgcttggaatgctccaacagatcagtgtttgataaaatataatttaagactaaatttgaaaatgtttcctgtgattggaagcccactggccaaggccagggggcaaaatgtcactatattttatgtcaacagattgggatactatccgtggtatacatcacaaggggtccccattaatggaggtctcccacagaacataagtttacaagtacatctggaaaaagctgaccaagatattaattattacatccctgctgaagatttcagtggacttgctgttatagattgggaatattggcgaccacagtgggcccggaactggaactcaaaagatgtttacagacagaagtcaagaaagcttatttccgatatgggaaagaatgtatcagctaccgatattgaatatttagccaaagtgacctttgaagaaagtgcaaaagctttcatgaaggaaaccatcaaattgggaattaagagccgacccaaaggcctttggggttattatttatatcctgattgccacaattataacgtttatgccccaaactactctgggtcatgcccagaagacgaagtcttgaggaacaatgagctctcttggctctggaacagcagtgctgctttatatccttctatcggtgtctggaaatcccttggagacagtgaaaacattttgcgcttctccaaatttcgggtgcatgaatccatgaggatctccaccatgacatctcatgattatgctctgcctgtatttgtctacacaaggctagggtacagagatgaacctttatttttcctttctaagcaagatctagtcagcaccataggagaaagtgctgccttgggagctgcaggcattgttatttggggagacatgaatttaactgcatccaaggccaactgtacaaaggtgaagcagtttgtgagttctgatttagggagctacatagccaatgtgaccagagctgctgaggtatgcagccttcacctctgcaggaacaatggcaggtgcataaggaagatgtggaacgcgcccagttaccttcacttgaaccctgcaagttaccacatagaggcctctgaggacggggagtttactgtgaaaggaaaagcatctgatacagacctggcagtgatggcagatacattttcctgtcattgttatcagggatatgaaggagctgattgcagagaaataaagacggctgatggctgctctggggtttccccttctcctggttcactaatgacactttgtctactgcttttagcaagttatcgaagcattcagttgtgagataattgagtttaaagggaattgtgtggcctctagcctagtcatttaaagaaggatgtaacttataacattttttttctcttatgaattctattgagagatattataagtagacattatgtatgtcacttaacataaacagaaacattattttatttgcctccagtctggctaggaaaccagatctggggtaaagtcaatgtacacttcctccttattggaatatttaagttgcatttaaactaaaactagtataatttagtcttttcatgaatgtacatacataaaattatacataaaaatattaaattattcatttcaaaga

SEQ ID NO: 592 - DNA, 1276 bp, Homo sapiens
atggctcctctgcgctccagctgcgtcgtctccgggatcgccgccgccttccacccgggctcgcctctgatgcccctgccagagccagctcctggtggacccatgtggagatgggaccaccagatcccatccttggagtcaccgaaggctttaagagggacaccaatagcaaaaagatgaatctgggagttagtgcctacagggaccacaacggaaagccttacagcatccacaaggcagaggcccagattgcagccaaaaatttggacgaggactacytctccattgggcggctggctgaattttgcaaggcatctgcagaagyagccttrggcgagaatagcgaagtctcgaaaagtggccggtttgtcactgtgcagaccatttctggaactagtgccttaaggatcagagctagttttctgcaaagatttcttaagttcagccaagatgtctttctgcccraaccaacctggggaagtcgcacacccatcttcagggatactggcatgcagctacaaggttatcgatactatgaccgcaagacttgcggttttgacttcacagacactgtggaggacatttcaaaaacaccagagcaaagtcttcttcttctgcatgcttgctcccataatcccacaggagtggaccctggtcccaagcagcagaaggaaatagcaacagtggtgaagaaaacaaaaatctctttgcactcttcgacatggcctaccaaggctttgccagtggcaatggtaacaaggatgcctgggctgtgcgccactctgccaattatacrccattgtcgctgccaatcatacaccaagaacatggtcttacacagtgagrgtgtggcaggcttcaccatggtttgcaaagacgcagatgaagccaagagggtagagtcacatttgaagatcttgatstgtcccatgtattccaaccctcccctcaatgggacccgtttgcttctaccattctgaatgctccagatttgtgaaaacaatggttgcaagaagtgaaaggcaaggcccatcgcatcattagcatgcaractcagctggtstctaacctcaagaaggagggttctacccactactggccacacatcactgcccaaattgacatgttttgtttcacagggttaaagcccgaacaggtggaaaggatgagcaaggagtcctccatctacgtgacaaaggacagctgcttctctgaggcaggggtcacctccagcaatgtgggctaccttgtccataccattcaccaggtcaccaag

SEQ ID NO: 593 - DNA, 3263 bp, Homo sapiens
cactctctttacagtcagccttctgcttgccacagtcatagtgggcagtcagtgaatcttccccaagtgctgacaattaatacctggtttagcggcaaagattcagagaggcgtgagcagcccctctggccttcagacaaaaatctacgtaccatcagaaactatgtctctgcagatggtaacagtcagtaataacatagccttaattcagccaggcttctcactgatgaattttgatggacaagttttcttctttggacaaaaagkctggcccaaargatcctgscccactggagttttccatctggatgtaaagcataaccatgtcaaactgaagcctacaattttctctaaggattcctgctacctccctcctcttcgctacccagccacttgcacattcaaaggcagcttggagtctgaaaagcatcaatacatcatccatrgagggaaaacaccaaacaatgaggtttcagataagatttatgtcatgtctattgtttgcaagaacaacaaaaaggttacttttcgctgcacagagaaagacttggtaggagatgttcctgaagccagatatggtcattccattaatgtggtgtacagcygagggaaaagtatgggtgttctctttggaggacgctcatacatgccttctacccacagaaccacagaaaaatggaatagtgtagctgactgcctgccctgtgttttcctggtggattttgaatttgggtgtgctacatcatacattcttccagaacttcaggatgggctatcttktcatgtctctattgccaaaaatgacaycatctatattttaggaggacattcacttgccaataatatcyrgcctgccaacctgtacagaataagggttgatcttcccctgggtagcccagctgtraattgcacagtcttgccaggaggaatctctgtctccagtgcaatcctgactcaaactaacaatgatgaatttgttattgttggtggctatcagcttgaaaatcaaaaaagaakgatctgcaacatcatctctttagrggacaacaagatagaaattcgtgagatggagaccccagattgraccccagacattaagcacagcaagatatggtttggaagcaacatgggaaatggaactgtttttcttggcataccaggagacaataaacaagttgtttcagaaggattctatttytatatgttgaaatgtgctgaagatgatactaatgaagagcagacaacattcacaaacagtcaaacatcaacagaagatccaggggattccactccctttgaagactctgaagaattttgtttmagtgcagaagcaaatagttttgatggtgatgatgaatttgacacctataatgaagatgatgaagaagatgagtctgagacaggctactggattacatgctgccctacttgtgatgtggatatcaacacttgggtaccattctattcaactgagctcaacaaacccgccatgatctactgctctcatggggatgggcacwgggtccatgctcagtgcatggatctggcagaacgcacactcatccatctgtcagcaggaagcarcaagtattactrcaatgagcatgtggagatagcaagagctctacacactccccaaaragtcctacccttaaaaaagcctccaatgaaatccctccgtaaaaaaggttctggaaaaatcttgactcctgccaagaaatcctttcttagaaggttgtttgattagttttgcaaaagcctttcagattcaggtgtatggaatttttgaatctatttttaaaatcataacattgattttaaaaatacatttttgtttatttaaaatgcctatgttttcttttagttacatgaattaagggccagaaaaaaktgtttataatgcaatgataaataaagtcattctagaccmtatacattttgaaaatattttacccaaatactcaatttactaatttattcttcactgaggatttctgatctgattttttattcaacaaaccttaaacacccagaagcagtaataatcatcgaggtatgtttatatttattatataagtcttggtaacaaataacctataaagtgtttatgacaaatttagccartaaagaaattaacacccaaaagaattaaattgattattttgtgcaacataacaattcggcagttggccaaaacttaaaagcaagatctactacatcccacattagtgttctttatataccttcaagcaaccctttggattatgcccatgaacaagttagtttctcatagctttacagatgtagatataaatataaatatatgtatacatatagatagataatgttctccactgacacaaaagaagaaataaataatctacatcaagtttgacatgttttcctgaattacttgtatgcattttctttaaggatttcccctccccattatatgatgcatgaatgatgtgccaaagtcagtcatttgaactaattatttgtgagaattttcatggaaaactggagcccattgctacttagtactctggaaaaaggaagtgagtaagaatacaataagaaaggaccaccaaataaatctcatggagaagaataatattatttcccaaaataatgtaagtttaaagaatttcatgacatttacaggcagaagatttaaatggaggaaaagaaatgtatttgtgtgagtgtgtgtgtgtgtgtgtgtgtgtgtgtagttaacatgtggagattgctgccagygaatattataaaatcagtgatcttgccaaggtctaattagacactcgctaggatgaaactagttaaaatgactgttaattttaagggttcaagacatcagttgataactagatgaccttagaaacaaatgtctttcctcctgaaatattttccggaaaaaaaaattttctggaaaaaccttatcttaagagcttcagccacagttacagtgaagactcttactcytcactgaaagtctacagtgtgtaaggtacaactaacaaatttacgggaaacatgaattatgcaagagatgaaacgctggagtacaagttcttctgctgaaagttccatgtccccagatactgaaattaactttgataaactgaatcatattcactctgtttcaataatgttgctcgctgaatattcctgttgaacarttgttgcacattgatttgatcttttgttgtttccatcacctatataaaaataataaaatataaaaatcttctatttatatt

SEQ ID NO: 594 - DNA, 4927 bp, Homo sapiens
cctggagtgaggcgcagcggcagcggcagcagcggcaacaagtgccggaggctagcagagccaagccggagcagtccctgccgccgacaccgccgggccgcccgtccggggcgccgcgcatggagcgtgagctgcggcggtcgccgggctgagccgcgcggagcggccgggacgtggatgtggccgcgatctcccgcccttgcccccgccccgccgagctggagctgctcccggacaagatatgagaaatgagtgttggacgtcgaagaataaagttgttgggtatcctgatgatggcaaatgtcttcatttattttattrtggaagtctccaaaagcagtagccaagaaaaaaatggaaaaggggaagtaataatacccaaagagaagttctggaagatatctacccctcccgaggcatactggaaccgagagcaagagaagctgaaccggcagtacaaccccatcctgagcatgctgaccaaccagacgggggaggcgggcaggctctccaatataagccatctgaactactgcgaacctgacctgagggtcacrtcggtggttacgggttttaacaacttgccggacagatttaaagactttctgctgtatttgagatgccgcaattattcactgcttatagatcagccggawaagtgtgcaaagaaacctttcttgttgctggcgattaagtccctcactccacattttgccagaaggcaagcaatccgggaatcctggggccaagaaagcaacgcagggaaccaaacggtggtgcgagtcttcctgctgggccagacacccccagaggacaaccaccccgacctttcagatatgctgaaatttgagagtgagaagcaccaagacattcttatgtggaactacagagacactttcttcaacttgtctctgaaggaagtgctgtttctcaggtgggtaagtacttcctgcccagacactgagtttgttttcaagggcgatgacgatgtttttgtgaacacccatcacatcctgaattacttgaatagtttatccaagaccaaagccaaagatctcttcataggtgatgtgatccacaatgctggacctcatcgggataagaagctgaagtactacatcccagaagttgtttactctggcctctacccaccctatgcagggggaggggggttcctctactccggccacctggccctgaggctgtaccatatcactgaccaggtccatctctaccccattgatgacgtttatactggaatgtgccttcagaaactcggcctcgttccagagaaacacaaaggcttcaggacatttgatatcgaggagaaaaacaaaaataacatctgctcctatgtagatctgatgttagtacatagtagaaaacctcaagagatgattgatatttggtctcagttgcagagtgctcatttaaaatgctaraatagatacaaactcaattttgcatagaaaggtgtattttgaatagttcccatgttgtgttctcacattagagtaatttctrtattaaaccatgaaaattgcctttatgagtgatacccrtttgagggcctctaaacccttcaatttggtactcacgtgaagagggaaagcggaagatggtaatttttttttayggatgatatggcaggatgattggttctgatcttaccggctagtggtcatttttaaaaaacttgtaccctcttatctgaaatcctgtttctggaatttggccattttaagtgattttgtttgccctcttctataatattcytacttcccataataatgactgatttatttgtaattcaggtatttataaacctattggctacaaagactttgttaaacattatccagtggttttcgtgaaatggaattatgtttatttttatgggatttgggtaaattttaaattgtctagaaaactgaaatttcagttgtcagttgtggaattcagtttttcaattgtggaaatttcctgccaccccaacagtatttttgtgtgttaattaattttgcaaaatgagaatcatggtgtgacactcatctaatttatcttgttgtgatgttatggtcataataaggagaaagagggtttaatttttcttgtatttggtttcctggtggtatcatagtgtaattttagtatttgaaaatcagtgtgattccttaatggccaactgaagattgaattgccgctaacaaccatatcgtgttagtgaattttcaatatggaccaggaaggcatatgtattttgaacttgagtgaaaaggttgaagttacagacttttgcatagatggtttgtcaatttaaaattccagaatttattattgccatattttcacatgctgcttatacaagattattattgagtagtaactgcttccctgtctatgtagaagtgcctgtgtttttatttattgttcagatcaaagaccaaaacattttcttaaatatattttatgtaatattttatttgtatacagtgttgttgatgaaatatttaactagagcatgatattttaaatgttaaggtgtaacatatgttaaataaaactgttatttttgaattttaaaatttgttttttgggggtatgaactactagagtttaaaattctgccaaactattacttatatgtactattgtgtaacatactttcttgaaatatttttgtttatagaattgaaggttcttatcagatgggatactggggactataaacaatggaaataaagccactgtatttttaattttttgtgtaatgtgtaatctataatccttttgtttcccatatttgagaacatttttccctgaaagaggccagtttcctccccagaaaccattacagtagtgttgaactatcactgtctctcagtgcgtcatccatctttgcatttaaaatccccaaagtgctttcccatttaaagtctttaaagaaaagtgagaatatttatttatgcttccattttcagtgagtataaataatttaattagggagtggtgtggcattgtaaagattgtgttatcctaagccatttctattttggagtttgtagccacaaagatgaaatatagaatcagccttgactactcaatttcctttcatagacccatgttgagaagacactactaacgtccagtgggaaacaagtagacaattgatgaagctcaaaaaacagaagggttagtgttgtaagagcaaacagtctaatcctgtttggaatgtggaagccatttctgagcaagtatgaggacacaggtgcttgatttgagattgaagactgttttcagcctggtcttcctgaaggtttcctggggcctgcatctgccttctactcccatggctgctagcacacacctcccagagggccatattgccacattatggctagagaagagtaaagaagaaaagaagctctgagaacattcacaggtaattggatcacatttgcatttgtccaaaaaacctgaccacgcattctcaggtaataggtttctcctctcagaggaatttcaattttttttcttgttagagattccccttytctgaggtttcaagtctcttgtagagaaagaagagatggagcaggttttgaatgaggtgtggagggccactggggggccttttgtgagccttcagtccacatgtgtgctgttgtttgaacatgagttcttggtgctgatgacatttggatgagatgatctctggcccttcttcatttggcagaagttcttgtgcaatggctgcccaagcccaccacactggtcattgctgccctgtgagatggacctcatgggctttttagcagagcacgttaggttttagagctttacgcatgcttgggctctgttatggcgcaaacccttaaatccaggaaggcctctcttggtgcccacaatatgggttctcacctgatcccccatctcacggatggaactgctgtaagtctaacttattctttgagaactgtttaacaattaggcctcaagggaaactggtattttgggcccttttcttggctattcccaagtcatgttgattttgagtttgaaggtcaaaaaggctgaaagcattgccagggtttggactattcaaaaacccaagcaggtcttaaaaaaaggatgcaagagacaagaatggctcattccccttcctgatcctggttatacccatgtcctttcttgagatggtcaagagaggctggaaagaagaacaggaaattgggggagtgctttgttacacttggaaattgagtcaagaattaaagacacccaaagtgggccatctcctacttgtccacacctgattggtggtgatgcggaatatttgatgtcccgggtcatcttgactttctcagatgcaaaaagggagggtgactttactaatggaaaggatgggaagctgaaatgaatgaagccttcagttgggccaaagtttaacttccccgtgatttgccttctgatgaaaaatgccagatgaagtgaaaattcttgtttcttgcctagaacaggaaaatacatactttacatgctgggctattgaggctatgaaattaggttttccttaatgtaaatccaattgctagaaacatttgccaaataagattttttgaactgaactttgtttgcattaatctgaaaaactgaagtattctgactcatgaagttctcaaagtaatacactaaaaaagttttgcccttaataccattatatcttgtagaggccaagaatgagggacttctgtctttaaagagccctaaaaatctygtttgctcacatgatatgaattaccgtatttgttgtaaatgcgcaactttgtatacactaaaagcactgccaatatgattttttatcagttgtgcctcagttagagatattaaaatgtgacatcttaaatattacatattagaataattg

SEQ ID NO: 595 - DNA, 2706 bp, Homo sapiens
cctggagtgaggcgcagcggcagcggcagcagcggcaacaagtgccggaggctagcagagccaagccggagcagtccctgccgccgacaccgccgggccgcccgtccggggcgccgcgcatggagcgtgagctgcggcggtcgccgggctgagccgcgcggagcggccgggacgtggatgtggccgcgatctcccgcccttgcccccgccccgccgagctggagctgctcccggacaagatatgagaaatgagtgttggacgtcgaagaataaagttgttgggtatcctgatgatggcaaatgtcttcatttattttattrtggaagtctccaaaagcagtagccaagaaaaaaatggaaaaggggaagtaataatacccaaagagaagttctggaagatatctacccctcccgaggcatactggaaccgagagcaagagaagctgaaccggcagtacaaccccatcctgagcatgctgaccaaccagacgggggaggcgggcaggctctccaatataagccatctgaactactgcgaacctgacctgagggtcacrtcggtggttacgggttttaacaacttgccggacagatttaaagactttctgctgtatttgagatgccgcaattattcactgcttatagatcagccggawaagtgtgcaaagaaacctttcttgttgctggcgattaagtccctcactccacattttgccagaaggcaagcaatccgggaatcctggggccaagaaagcaacgcagggaaccaaacggtggtgcgagtcttcctgctgggccagacacccccagaggacaaccaccccgacctttcagatatgctgaaatttgagagtgagaagcaccaagacattcttatgtggaactacagagacactttcttcaacttgtctctgaaggaagtgctgtttctcaggtgggtaagtacttcctgcccagacactgagtttgttttcaagggcgatgacgatgtttttgtgaacacccatcacatcctgaattacttgaatagtttatccaagaccaaagccaaagatctcttcataggtgatgtgatccacaatgctggacctcatcgggataagaagctgaagtactacatcccagaagttgtttactctggcctctacccaccctatgcagggggaggggggttcctctactccggccacctggccctgaggctgtaccatatcactgaccaggtccatctctaccccattgatgacgtttatactggaatgtgccttcagaaactcggcctcgttccagagaaacacaaaggcttcaggacatttgatatcgaggagaaaaacaaaaataacatctgctcctatgtagatctgatgttagtacatagtagaaaacctcaagagatgattgatatttggtctcagttgcagagtgctcatttaaaatgctaraatagatacaaactcaattttgcatagaaaggtgtattttgaatagttcccatgttgtgttctcacattagagtaatttctrtattaaaccatgaaaattgcctttatgagtgatacccrtttgagggcctctaaacccttcaatttggtactcacgtgaagagggaaagcggaagatggtaatttttttttayggatgatatggcaggatgattggttctgatcttaccggctagtggtcatttttaaaaaacttgtaccctcttatctgaaatcctgtttctggaatttggccattttaagtgattttgtttgccctcttctataatattcytacttcccataataatgactgatttatttgtaattcaggtatttataaacctattggctacaaagactttgttaaacattatccagtggttttcgtgaaatggaattatgtttatttttatgggatttgggtaaattttaaattgtctagaaaactgaaatttcagttgtcagttgtggaattcagtttttcaattgtggaaatttcctgccaccccaacagtatttttgtgtgttaattaattttgcaaaatgagaatcatggtgtgacactcatctaatttatcttgttgtgatgttatggtcataataaggagaaagagggtttaatttttcttgtatttggtttcctggtggtatcatagtgtaattttagtatttgaaaatcagtgtgattccttaatggccaactgaagattgaattgccgctaacaaccatatcgtgttagtgaattttcaatatggaccaggaaggcatatgtattttgaacttgagtgaaaaggttgaagttacagacttttgcatagatggtttgtcaatttaaaattccagaatttattattgccatattttcacatgctgcttatacaagattattattgagtagtaactgcttccctgtctatgtagaagtgcctgtgtttttatttattgttcagatcaaagaccaaaacattttcttaaatatattttatgtaatattttatttgtatacagtgttgttgatgaaatatttaactagagcatgatattttaaatgttaaggtgtaacatatgttaaataaaactgttatttttgaattttaaaatttgttttttgggggtatgaactactagagtttaaaattatttttgtttatagaattgaaggttcttatcagatgggatactggggactataaacaatggaaataaagccactgtattttt

SEQ ID NO: 596 - DNA, 2583 bp, Homo sapiens
cgcagcggcagcggcagcagcggcaacaagtgccggaggctagcagagccaagccggagcagtccctgccgccgacaccgccgggccgcccgtccggggcgccgcgcatggagcgtgagctgcggcggtcgccgggctgagccgcgcggagcggccgggacgtggatgtggccgcgatctcccgcccttgcccccgccccgccgagctggagctgctcccggacaagaataaagttgttgggtatcctgatgatggcaaatgtcttcatttattttattrtggaagtctccaaaagcagtagccaagaaaaaaatggaaaaggggaagtaataatacccaaagagaagttctggaagatatctacccctcccgaggcatactggaaccgagagcaagagaagctgaaccggcagtacaaccccatcctgagcatgctgaccaaccagacgggggaggcgggcaggctctccaatataagccatctgaactactgcgaacctgacctgagggtcacrtcggtggttacgggttttaacaacttgccggacagatttaaagactttctgctgtatttgagatgccgcaattattcactgcttatagatcagccggawaagtgtgcaaagaaacctttcttgttgctggcgattaagtccctcactccacattttgccagaaggcaagcaatccgggaatcctggggccaagaaagcaacgcagggaaccaaacggtggtgcgagtcttcctgctgggccagacacccccagaggacaaccaccccgacctttcagatatgctgaaatttgagagtgagaagcaccaagacattcttatgtggaactacagagacactttcttcaacttgtctctgaaggaagtgctgtttctcaggtgggtaagtacttcctgcccagacactgagtttgttttcaagggcgatgacgatgtttttgtgaacacccatcacatcctgaattacttgaatagtttatccaagaccaaagccaaagatctcttcataggtgatgtgatccacaatgctggacctcatcgggataagaagctgaagtactacatcccagaagttgtttactctggcctctacccaccctatgcagggggaggggggttcctctactccggccacctggccctgaggctgtaccatatcactgaccaggtccatctctaccccattgatgacgtttatactggaatgtgccttcagaaactcggcctcgttccagagaaacacaaaggcttcaggacatttgatatcgaggagaaaaacaaaaataacatctgctcctatgtagatctgatgttagtacatagtagaaaacctcaagagatgattgatatttggtctcagttgcagagtgctcatttaaaatgctaraatagatacaaactcaattttgcatagaaaggtgtattttgaatagttcccatgttgtgttctcacattagagtaatttctrtattaaaccatgaaaattgcctttatgagtgatacccrtttgagggcctctaaacccttcaatttggtactcacgtgaagagggaaagcggaagatggtaatttttttttayggatgatatggcaggatgattggttctgatcttaccggctagtggtcatttttaaaaaacttgtaccctcttatctgaaatcctgtttctggaatttggccattttaagtgattttgtttgccctcttctataatattcytacttcccataataatgactgatttatttgtaattcaggtatttataaacctattggctacaaagactttgttaaacattatccagtggttttcgtgaaatggaattatgtttatttttatgggatttgggtaaattttaaattgtctagaaaactgaaatttcagttgtcagttgtggaattcagtttttcaattgtggaaatttcctgccaccccaacagtatttttgtgtgttaattaattttgcaaaatgagaatcatggtgtgacactcatctaatttatcttgttgtgatgttatggtcataataaggagaaagagggtttaatttttcttgtatttggtttcctggtggtatcatagtgtaattttagtatttgaaaatcagtgtgattccttaatggccaactgaagattgaattgccgctaacaaccatatcgtgttagtgaattttcaatatggaccaggaaggcatatgtattttgaacttgagtgaaaaggttgaagttacagacttttgcatagatggtttgtcaatttaaaattccagaatttattattgccatattttcacatgctgcttatacaagattattattgagtagtaactgcttccctgtctatgtagaagtgcctgtgtttttatttattgttcagatcaaagaccaaaacattttcttaaatatattttatgtaatattttatttgtatacagtgttgttgatgaaatatttaactagagcatgatattttaaatgttaaggtgtaacatatgttaaataaaactgttatttttgaattttaaaatttgttttttgggggtatgaactactagagtttaaaatt

SEQ ID NO: 597 - DNA, 4885 bp, Homo sapiens
cctggagtgaggcgcagcggcagcggcagcagcggcaacaagtgccggaggctagcagagccaagccggagcagtccctgccgccgacaccgccgggccgcccgtccggggcgccgcgcatggagcgtgagctgcggcggtcgccgggctgagccgcgcggagcggccgggacgtggatgtggccgcgatctcccgcccttgcccccgccccgccgagctggagctgctcccggacaagatatgagaaatgagtgttggacgtcgaagaataaagttgttgggtatcctgatgatggcaaatgtcttcatttattttattrtggaagtctccaaaagcagtagccaagaaaaaaatggaaaaggggaagtaataatacccaaagagaagttctggaagatatctacccctcccgaggcatactggaaccgagagcaagagaagctgaaccggcagtacaaccccatcctgagcatgctgaccaaccagacgggggaggcgggcaggctctccaatataagccatctgaactactgcgaacctgacctgagggtcacrtcggtggttacgggttttaacaacttgccggacagatttaaagactttctgctgtatttgagatgccgcaattattcactgcttatagatcagccggawaagtgtgcaaagaaacctttcttgttgctggcgattaagtccctcactccacattttgccagaaggcaagcaatccgggaatcctggggccaagaaagcaacgcagggaaccaaacggtggtgcgagtcttcctgctgggccagacacccccagaggacaaccaccccgacctttcagatatgctgaaatttgagagtgagaagcaccaagacattcttatgtggaactacagagacactttcttcaacttgtctctgaaggaagtgctgtttctcaggtgggtaagtacttcctgcccagacactgagtttgttttcaagggcgatgacgatgtttttgtgaacacccatcacatcctgaattacttgaatagtttatccaagaccaaagccaaagatctcttcataggtgatgtgatccacaatgctggacctcatcgggataagaagctgaagtactacatcccagaagttgtttactctggcctctacccaccctatgcagggggaggggggttcctctactccggccacctggccctgaggctgtaccatatcactgaccaggtccatctctaccccattgatgacgtttatactggaatgtgccttcagaaactcggcctcgttccagagaaacacaaaggcttcaggacatttgatatcgaggagaaaaacaaaaataacatctgctcctatgtagatctgatgttagtacatagtagaaaacctcaagagatgattgatatttggtctcagttgcagagtgctcatttaaaatgctaraatagatacaaactcaattttgcatagaaaggtgtattttgaatagttcccatgttgtgttctcacattagagtaatttctrtattaaaccatgaaaattgcctttatgagtgatacccrtttgagggcctctaaacccttcaatttggtactcacgtgaagagggaaagcggaagatggtaatttttttttayggatgatatggcaggatgattggttctgatcttaccggctagtggtcatttttaaaaaacttgtaccctcttatctgaaatcctgtttctggaatttggccattttaagtgattttgtttgccctcttctataatattcytacttcccataataatgactgatttatttgtaattcaggtattttggttttcgtgaaatggaattatgtttatttttatgggatttgggtaaattttaaattgtctagaaaactgaaatttcagttgtcagttgtggaattcagtttttcaattgtggaaatttcctgccaccccaacagtatttttgtgtgttaattaattttgcaaaatgagaatcatggtgtgacactcatctaatttatcttgttgtgatgttatggtcataataaggagaaagagggtttaatttttcttgtatttggtttcctggtggtatcatagtgtaattttagtatttgaaaatcagtgtgattccttaatggccaactgaagattgaattgccgctaacaaccatatcgtgttagtgaattttcaatatggaccaggaaggcatatgtattttgaacttgagtgaaaaggttgaagttacagacttttgcatagatggtttgtcaatttaaaattccagaatttattattgccatattttcacatgctgcttatacaagattattattgagtagtaactgcttccctgtctatgtagaagtgcctgtgtttttatttattgttcagatcaaagaccaaaacattttcttaaatatattttatgtaatattttatttgtatacagtgttgttgatgaaatatttaactagagcatgatattttaaatgttaaggtgtaacatatgttaaataaaactgttatttttgaattttaaaatttgttttttgggggtatgaactactagagtttaaaattctgccaaactattacttatatgtactattgtgtaacatactttcttgaaatatttttgtttatagaattgaaggttcttatcagatgggatactggggactataaacaatggaaataaagccactgtatttttaattttttgtgtaatgtgtaatctataatccttttgtttcccatatttgagaacatttttccctgaaagaggccagtttcctccccagaaaccattacagtagtgttgaactatcactgtctctcagtgcgtcatccatctttgcatttaaaatccccaaagtgctttcccatttaaagtctttaaagaaaagtgagaatatttatttatgcttccattttcagtgagtataaataatttaattagggagtggtgtggcattgtaaagattgtgttatcctaagccatttctattttggagtttgtagccacaaagatgaaatatagaatcagccttgactactcaatttcctttcatagacccatgttgagaagacactactaacgtccagtgggaaacaagtagacaattgatgaagctcaaaaaacagaagggttagtgttgtaagagcaaacagtctaatcctgtttggaatgtggaagccatttctgagcaagtatgaggacacaggtgcttgatttgagattgaagactgttttcagcctggtcttcctgaaggtttcctggggcctgcatctgccttctactcccatggctgctagcacacacctcccagagggccatattgccacattatggctagagaagagtaaagaagaaaagaagctctgagaacattcacaggtaattggatcacatttgcatttgtccaaaaaacctgaccacgcattctcaggtaataggtttctcctctcagaggaatttcaattttttttcttgttagagattccccttytctgaggtttcaagtctcttgtagagaaagaagagatggagcaggttttgaatgaggtgtggagggccactggggggccttttgtgagccttcagtccacatgtgtgctgttgtttgaacatgagttcttggtgctgatgacatttggatgagatgatctctggcccttcttcatttggcagaagttcttgtgcaatggctgcccaagcccaccacactggtcattgctgccctgtgagatggacctcatgggctttttagcagagcacgttaggttttagagctttacgcatgcttgggctctgttatggcgcaaacccttaaatccaggaaggcctctcttggtgcccacaatatgggttctcacctgatcccccatctcacggatggaactgctgtaagtctaacttattctttgagaactgtttaacaattaggcctcaagggaaactggtattttgggcccttttcttggctattcccaagtcatgttgattttgagtttgaaggtcaaaaaggctgaaagcattgccagggtttggactattcaaaaacccaagcaggtcttaaaaaaaggatgcaagagacaagaatggctcattccccttcctgatcctggttatacccatgtcctttcttgagatggtcaagagaggctggaaagaagaacaggaaattgggggagtgctttgttacacttggaaattgagtcaagaattaaagacacccaaagtgggccatctcctacttgtccacacctgattggtggtgatgcggaatatttgatgtcccgggtcatcttgactttctcagatgcaaaaagggagggtgactttactaatggaaaggatgggaagctgaaatgaatgaagccttcagttgggccaaagtttaacttccccgtgatttgccttctgatgaaaaatgccagatgaagtgaaaattcttgtttcttgcctagaacaggaaaatacatactttacatgctgggctattgaggctatgaaattaggttttccttaatgtaaatccaattgctagaaacatttgccaaataagattttttgaactgaactttgtttgcattaatctgaaaaactgaagtattctgactcatgaagttctcaaagtaatacactaaaaaagttttgcccttaataccattatatcttgtagaggccaagaatgagggacttctgtctttaaagagccctaaaaatctygtttgctcacatgatatgaattaccgtatttgttgtaaatgcgcaactttgtatacactaaaagcactgccaatatgattttttatcagttgtgcctcagttagagatattaaaatgtgacatcttaaatattacatattagaataattg

SEQ ID NO: 598 - DNA, 2047 bp, Homo sapiens
atgcagccaatgataaaacagatgtccctctcaacctacagagaccaaagtaaacagacgctaaatccccttgcaatagaccagttggccaagacgccgaatatcaaaatcttcagcggcagctcccaccaggacttatcccagaaaattgctgaccgcctgggcctggagctaggcaaggtggtgactaagaarttcagcaaccaggagacctgcgtggaaatygatgagagtgtgcgtggagaggatgtctacatcgttcagagtggttgtggcgaaatcaacgacagtctaatggagcttttgatcatgattaatgcctgcaagattgcttcagctagccgagttactgcagtcatcccatgcttcccttatgcccgacaggataagaaggataagagccggtccccaatctcygccaagcttgttgcaaatatgctctctatagcaggtgcggatcatatcatcaccatggacctacatgcttctcaaattcagggcttttttgatatcccagtagacaacttgtatgcagagccaactgtcctgaagtggataagggagaatatccctgagtggaagaactgcattattgtctcgccagatgctggtggagctaaaagagtgacctccattgcagaccagttgaatgtggactttgctttgattcataaagaacggaagaaggccaatgaagtggactgcatagtgctagtgggagatgtgaatgatcgtgtggctatccttgtagatgacatggcagacacttgtgttacaatctgcctcgcagctgacaaacttctctcagctggagcaaccagagtttatgctatcttgactcatggaatcttttctggcccagccatttctcgcatcaacactgcatgctttgaagcagtggtagtcaccaataccatacctcaagatgakaagatgaagcattgctccaaaatacgagtaattgacatctccatgatccttgcagaagccataaggagaactcataatggggaatctgtttcctacctgttcagccatgttcctttataacagaataacttctaggttatgctattttaaaataaaataagattaataaaaacaaaccttgcctttattttttcttaggtttgattaaaagttcagcagaagatccagcttgctccagtgtaactttctacatcccacatcaggtatataagagtttaccttaaattagggaaaaacaggttaagaataatcactaggatttcctgactgggttgtctcatctggcttctttgatgattttgttagcccagcagctttaactacagcccttctgctgcaaagatttcagacttctgagggtgttttgtagaggtgtttgaaagtggttggaaagcttacatgtaaatgcttcggagttttcttttttcagaacaactagcaataaagccacccaatctaccccctgccccaaacccccactttgtgtcacaaattctccaagttcgatgctcagttgcagcaagagccctgagccaccacaaaattaattctggttgctgaacaccctcaacagcaggaataggcaactttcagcttgagcagccattgggatcttgagaggaagcaacaagtacagtaaatgcttcttgagaggaggaagattgatctgtcaccatctatttggagactatctatcttggattctcagttatacctgttccttttgatttagctttacctccacccatcttgaccttttcattgctaaatatcctactgggccccaaatggtcagggtaccatagtcttctggaaggcaaacccactttttgctatgtaatctctaatatttatattagttatttttgctgtaacttaatcttccttagtttattaccaccattgtagtagatgttaggtgacattgtagtgacttttgttaaatttaaacatttaatttttatctcccttccttgtattttgttggcccctcaaatgacctcagatttatatttttaaaatgttgttattgtcctttttagggaaaaccaataaa

SEQ ID NO: 599 - DNA, 3250 bp, Homo sapiens
caaaatcacagccccttgtggagcccgagctctcattcacagctttctagagaaatctgagcccgaacctgccagaataggggatctcacccacccagttcagcagcgaggacacctgcagaaatacattcccaaagcaaggctgggcggccgtgtgaagtaagcaatggcctcagttttgcttctgttttggatgaacaccaccacatagggcctgaatgtgaaagaagaccctctatttgtctgttccggggcagcctggtagtaaaacactgttgaatgggccacrgtttcagcagaccatcaggtgaatgggaccagtctctcttcttccaaaatatcagaagttaaacacttggaacggagatttggccaagatgacccatttacaggctggactcagtccagagactatagagaaagctcgcctggaactgaatgaaaaccccgatgttttacatcaggatattcagcaagtcagggacatgatcatcaccaggcctgacattggatttttacgtacagatgatgccttcatcctgagatttctccgagccaggaagtttcaccaagcggatgcctttagactcctggctcagtatttccagtaccgccagctaaacctggacatgttcaaaaacttcaaggcagatgatcccggcattaagagggctctgatcgatgggttccccggggtgctggaaaaccgagaccattacggcaggaagattcttttgctgtttgcagccaattgggatcagagtaggaactccttcacagacatccttcgtgccatcctgctgtcattggaagtcctaatcgaagatccggagcttcagataaatggcttcattttaattatagactggagtaatttttccttcaaacaagcctccaaactgacaccttcaatccttaaactggccattgaagggttgcaggacagctttcctgcccgctttggaggagtccactttgtcaaccagccctggtacattcatgccctctacacactcatcaagccatttcttaaagacaagaccaggaaacggattttcctgcatggaaacaatttaaacagccttcaccagctaatacaccctgaatttttgccctctgaatttggaggaactcttcctccttatgacatgggaacttgggcccggacgttactcggtcccgactacagcgatgaaaatgactatactcacacatcctataatgcaatgcacgtgaagcatacgtcctcgaatctggagagagaatgctcacccaagctgatgaaaagatctcagtctgtggtagaagctgggaccctgaaacatgaggagaagggagagaatgagaacacccagccactcctggctctggactgaaccctgagtcaccccaatgctcctgcacactggccttcagtggtatcagccacccaggaagcacatgcacaactgacccatgcagacacgtgtgttctgcttgacacaaggtcctccactcctgaacccctgcagtgactgtcaccagccatcggtctgagcagccaaagttggacaaagacttgagagatgcttttttytyyccccagtgaggggactggaggatgatgcaaggcatttatgtaaaaaagattctccctcctttcatatttattgtagtaaattgaaaaaataaagactaaatttgatggacacactgcattaggacaagaatttttctgaggtatcacacagggaccctctccagtttttgaaaattaagtgcatttccaagtaaatgtatcagagttaaactgtacagacaccactgtcaagtttcatgtagtacaaagccctgagacaatagtatctccagtaatttccattcttactgaattatttcctttgacctcatcaccagcatcgaattgttcagcctaagagcatgttctcataggtctgggtatttgcaaagtttgcttattttgatgatatcctgcaaaaaattattttgatgtcacatctcttgtcaggtcactagctgactgtcatgagctgacgttaaaggaagacacatggacgtgaaatacgattatttcatctgagcaatgtgagttaccacaggcagctcaaaagcccattagtgcagcatgtgtctgcagaggagatgtctcatgaaaatcacatgtcagtgattaatgaatccattccagttgcctcaactgggtcactacagcaaagaaaagtgctatcaaaccatttacccttgcccccacaaccctcctgcaaccattaaagatgtggagaaagaccatggttgttgctgagagggtaaatattcaatcatggagcatgacccatatggatggctaaatatgcaagtactgaagtaagagaagactagaaatgcaggatgaaatgtcaaaggtcattttatttacctagtctccttagaaatggagtccccaactactcattcaaaagaaatcagacataaaataaacagacatcatatatgayatccttacttgtgccatgttttccaagaccagtgcatatttttagacatctcttattcgcccagccatctgcatgacatgggtatttattagtattaccagttggtgctcaaagtcaaacaaaaatattttagttaataatgggcagtaaaatatgattttacattattttaaatatttgggagagttaatttgttagctaaataattcaagggaaagagattattcaactggtcataatcacccctgataatattattactaatcttaattatttattacatcatctctttctcaatggatctaatgttttaattttttcccctattggtagagaacaataacagaagtaatttttatattatacacttggagaaataaagttgaaacagaattaaaaatatttctcaaacaactgtatcacaatataaattaaactaattcatttttgtgtagacatacgaaatcacaaaaataataacactgaaataattctaccaatgcagtgatggaaacacttttcttatgtaccaagacatagataggtaagagaaataaagaattgaagtgaattagaaaatccattttattgcttgggtttaaaatagttgtgggatacaagtatttacaatgctattggagtcaattattgacaacactttgcaacagtaataccatttctagcttttcaattggcaatacttagaaccttactgtagtgacctgattttaaataccatattatatttactaagt

SEQ ID NO: 600 - DNA, 1398 bp, Homo sapiens
atggcagcctccatgttctacagccagctgttggccgcagctacccttcggggccaccttctctggacagccctgcgsgccactgctcaggctctaggaagttatggattgttgaataaccatggactccaagtacagcagcaatagcacaggaatctctcactacatgaatacatgagtatggaattattgcaagaagctggtgtctccgtttccaaaggatatrtggcaaaatcaccagatgaagcttatgcaattgccaaaaaagtargttcaaaagaagttgagatgaaggcgcaggtttcagctgatggtcgaggaaaaggaacatttgaaagtggcctcaaaggaggagtgaagatagttttctctccagaagaagcaaaagctgtttcctcagaaatgattgggaaaaagttgtttaccaagcaaatgggagaaaagggtggaatatgcaatcaagcactgaagcgaaaataccctaggggagaagactactttgcaatagggatggagaggtcatttcaaggtcctatattaataggaagttcacatggtggtgtcaacattgcagatgttgctgctgagactcctgatgcaattaaagaacctgttgatattgtagaaggcatcaaaaaggaacaagctctccggcttgaacagaagatgggatttccacctaatattgtggattcygcagcagaaaacatggtcaagctttacagcctttttctgaaatatgatgcaaccatgataagaaataaatccaatggtgaagattcagatggagctgtgctgtgatggatgcaaagatcaattttgactctaattcagcctaacgccaaaagaaaatctttgatctacaggactgaacccaagaagatgaaaatgacaaagacgctgctaaggcagatctcaactacattggcctgaaaggaaatacagactgtctagtaaatggtgctggtttggccatggcctcaatagatataataaaacttcaggggccaggagtggtggctcatgcctggactccagccagcttccttgatgttggtggtggtgctacagtccatcaagtaacagaagcatttaagcttatcacttcagataaaaaggtactggctattctgatcaacattttttgaagaatcatgcactgtgatgttattgcacagggtatagtcacggcagtaaaagatgtggaaattgaaatacctgttgtgggggttacaaggtacacgagttgatgatgctaaggcaccgagagcagacagtgggcttaaaattcttgcttgtgacgacttggaggaaactgctagaacgttcagaaggctctctgaaacagcggacttagccaagcaagcacatgtggatgtgaaatttcagttgccaata

SEQ ID NO: 601 - DNA, 285 bp, Homo sapiens
atggcccctggctccagggctgccttgcaccctctgagctccccctccccctcaattcctcttggtcgaaatctcaagagagaaaccagtgcagttgttaacacaggcactaagctggctgacctggaaaactatatccacagaatcagtcgagrtggatggtttggccgtaagggtgtggctattaacrtggtgacagaagaagacaaggggacttttcaaaacatcgagaacttctacaacacttccattgaggaaattcccctcaatgttcctgacctcatc

SEQ ID NO: 602 - DNA, 617 bp, Homo sapiens
gaacttaaacaaatttacaagggaaaagcaaccccattaaaaagtgggcaaagtaaggtctttggggaacagggatgcttatttcctctgccttccttgtctgcctacacggatacctacgtctyttccctttgagatacatctcacgcacatgctgaagagttgtctttcttgacataggccagaggcattgatgtgcagcaggtttctttagtcaaccatgaccttcccaccaacagggaaaactatatccacagaatcagtcgagrtggatggtttggccgtaagggtgtggctattaacrtggtgacagaagaagacaaggggacttttcaaaacatcgagaacttctacaacacttccattgaggaaattcccctcaatgttcctgacctcatctgaggggctgtcctgctccctagccccagccagggttcaatcttggagggctgaggagcagcaggagaggggaaggaaaggagccaagggatggacgtcttgtcattttttttctttgaataaatatcattttttgaggcaaaagaaaaaaaagtaggcaaaggacaygaacagacactttccaaaagaagacatacatgcagccaacaagcatatga

SEQ ID NO: 603 - DNA, 493 bp, Homo sapiens
gggagcccagtactacccaccatggtcaattccactgtgttctttgacatcgccatcaacagccaacaaatttccaaaaacaacgaaaactttcatgctctgagcactgtagagaaaggatttggttataagrgttcctgctttcacagaattatttcagagtttatgtgtcagggtggtgacttcccatgccataatggcactgatggcaagttcatctacggggagaaatttgatgatgagaacttcattctgaagcatacaggtcctggcatcttgtccatagcaaatgctagacccaactcaaacggttctcagtttttcatctgcactgccaagactgagtggttggatggcaagcatgtggtctttggcaaggtgaaagaaggcatgaatattgtggaggccatggaccgctctgggtccaggaatggcaagaccaacaagaagattatcattgctgactgtgggcaactctaataagcttgacttg

SEQ ID NO: 604 - DNA, 5508 bp, Homo sapiens
gcagcggtgggaggactgcggggctcttgaggccagctgcagagcttgtggaggccatggggcgcgtcgtcgcggagctcgtctcctcgctgctggggttgtggctgttgctgtgcagctgcggatgccccgagggcgccgagctgcgtgctccgccagataaaatcgcgattattggagccggaattggtggcacttcagcagcctattacctgcggcagaaatttgggaaagatgtgaagatagacctgttkgaaagagaagaggtcgggggccgcctggctaccatgatggtgcaggggcaagaatacgaggcaggaggttctgtcatccatcctttaaatctgcacatgaaacgttttgtcaaagacctgggtctctctgctgttcaggcctctggtggcctactggggatatataatggagagactctggtatttgaggagagcaactggttcataattaacgtgattaaattagtttggcgctatggatttcaatycctccgtatgcacatgtgggtagaggacgtgttagacaagttcatgaggatctaccgctaccagtctcatgactatgccttcagtagtgtcgaaaaattacttcatgctctaggaggagatgacttccttggaatgcttaatcgaacacttcttgaaaccttgcaaaaggccggcttttctgagaagttcctcaatgaaatgattgctcctgttatgagggtcaattatggccaaagcacggacatcaatgcctttgtgggggcrgtgtcactgtcctgttctgattctggcctttgggcagtagaaggtggcaataaacttgtttgctcagggcttctgcaggcatccaaaagcaatcttatatctggctcagtaatgtacatcgaggagaaaacaaagaccaagtacacaggaaatccaacaaagatgtatgaagtggtctaccaaattggaactgagactcgttcagacttctatgacatcgtcttggtggccactcckttgaatcgaaaaatgtcgaatattacttttctcaactttgatcctccaattgaggaattccatcaatattatcaacatatagtgacaactttagttaagggggaattgaatacatctatctttagctctagacccatagataaatttggccttaatacagttttaaccactgataattcagatttgttcattaacagtattgggattgtgccctctgtgagagaaaaggaagatcctgagccatcaacagatggaacatatgtttggaagatcttttcccaagaaactcttactaaagcacaaattttaaagctctttctgtcctatgattatgctgtgaagaagccatggcttgcatatcctcactataagcccccggagaaatgcccctctatcattctccatgatcgactttattacctcaatggcatagagtgtgcagcargtgccatggagatgagtgccattgcagcccacaacgctgcactccttgcctatcaccgctggaacgggcacacagacatgattgatcaggatggcttatatgagaaacttaaaactgaactatgaagtgacacactcctttttcccctcctagttccaaatgactatcagtggcaaaaaagaacaaaatctgagcagagatgattttgaaccagatattttgccattatcattgtttaataaaagtaatccctgctggtcataggaaaacacacggttctaattaagtgtgaaggtatagctattgcacttatgccatctccaaaatttcttaagtattctttcactatccattaggagtttttcttaaacttgtctgataataagaatcacctggagttaggaggtggtggttgcagtgagccaatctcaccattgcacttcagcctgagcaacacgagcaaaactccgtctcaaaagtaaataaaaataatcasctggagtttgttaaaccatatggattctcaagctcctctcttgaagattctgattcagtaggtctgggagtggcgcsctggattttgatcaaaattgtagagcattttaaggtgagtacctgagggagaacttaaagacatcttagttggggagtagtccttttgaattttacagctagatataatcttcagtcagataaaatttatgggagctggtgtcttatgcctgactcttagtaatttcataccggtttgaagtacgtgtgcccatgcctaaagccttgactttcagaatgttgtcttttgattcttctgtcttgatttgattaggggtgaaatttagaagtcttagtaatgtaacttgaagatgttaaacaaaaatctcaagtaaaatgaaaagcaaatatgggctactgaattaagaaactggcattctagtattaaatcctcacttcaggagcttttaaaaatactgagacccccccataaccagagattcagattcaaagactgaggataggaccttagcattgtagctatttaaagtttctaatgtgcacccagggttgggaatcaccaatgtgggtgtgaaaatgcctacaaagggttttagtgccttagaagtcctaagaagcccaatctgtatcaaagcagatccattttgcaaggatctttcttttagaactttctcagttctcttagtaagaactttagaagtaatcttgataataagcacagacagcctaacagcagaggcaacttaaataactcctgagcagttggcactagaacagaatacttggaatgacaccaaagttaaccaagtccagcatatgtccaaagagttaagtgtttcatttactgtagcattctgggtgagaaattggttgctgaaatcttaagacagtggtctcaaccttggctgcacattggaatcacctgtagggttttaaagcatccaaatggtaattaacaggcagcaaaacttcagaactagttctgcatctactgtgcaaagatcatgattaactgtcaagacactggtagaacagaacaagcaaaagattaagagttcaaaagtaaatgcaaccaatttaacatgtagtgttattaaaaaattacaaaggcctagaccagcctgggcaacatggtgaaaccccatctctacaaaaaatttttaaaaagttggccaggcatggtaatgcgcgcctgtggtcccagctgctcgggaggctgaggtgggaggatcacttgagccttggaggtcaaggctgcagtgaatcatgatcatgccactgtactccagcctgggcaacagagaccatcttaaaaaaaaaaaatccttccattgaatagaaacttcaaagtccttcatcagatcatggcattagctactttagcaaaatagtgtaaactttggttctgagtaaaaatgacttcttccctaccacagttgtgaatgttaatatgctgataaaactgccaagatatatttgataggtaggggattaaactcatggtttgtcaaaagagtgtttttttctagttttattcttaacagatatgttgaggtattcatatttgtttccttttgtggttttaatgaagacaatttgtaaagtaatactgttatgtatatgctaaatgttggtaaatactaattaatttccatcatttgtagacttgttttgcaatgggatatatttttacttataataccaatttaggctgggcgcagtggctcacgcctgtaatcccagcactttgggaggccaaggcaaacggatcacgaggtcaggagatcaagaccatcctggccaacatggtgaaaccccatctctactgaatayacaaaaattggctggacatggtggcgcatgtctgtaatcccagctactgtaatctcagctactygggaggctgaggcaggagaattgcctcaaccgggaggcggaggttgcagtgagccaagatcgcaccactgcactccagcctggcaacagagcgagactctgtctcagaaaaaaaaaacaaaaaccagtttaggctgggtatggtggctcaccagcactttgggaggctgaggcaggtggatctcttgaggtcgggagtttgagaccagcctggccaacatggtgaaaccctgtctttactaaaaatacaaaaattagccrggcatggtggcgtgtgccagtaatcccagctacttgggaggctgaggcgcgagaatcgcttgaaccctggagatggaggttgcagtgagcagagatcgcaccactgcactccagcctgggcaagagtgagactgtgtctcaaaaggaaaaaaaaaaaattaaaaatgttgctggtattacatcaaacctactctggataaattttccagtagggcatctgaaattgctttggcaaaagcaaaacaggttatcaatacaccaaggacatcaagtagttttaatgcaactacagtgttgagtgcttttttactgggagaaaaatcctagcagaacctgctactctgggcgcattaggtagttttatgcaactatagtattaagagttttattggaagaaaaaacactgtcagagcttactgctccagacctttttttttaatagaagagactggtaaaaatgatgcaggggctgaatgaaagccagctctgctccagtggctctctgagttgagcatgcatcagttaccttaagggcttgttaaaacatcgctaggctccaccctgtttattcaataagtttgttatgggatataagaagatgcattttattaagttccccagtgatgctgctgttctactataggaaccacacttgaagaactagttctacaattcagctgtatgttgtaaaggagtcaagtcaatgaaggagttataaagagttgctgaaaaatggagtaacagtgtatgggacttcacatcagttctccttattgattgttagtttgatccctcttgttcttttgttgtaaacattttctataattaggaaatgccatttaagagtgagagaggtatatatctatgagccattgtgtttggtgttttacaagaactttaccatactggtgtgtagtccattctgtacagtttaaaagtgattcacgatttgcaggctttttatcagatcacaaaaaaatcagtctttaagcatttgcttggtaaggtttcttaagattaggtttataatacaaccatctgtaatgtatctctcgtttgagcttgtgggccatacaattcattaactagatgaatacattgtggacagcatcctcactacccctctctactcactcacaaagaaccatgatacactggaatgtttttctctggaatcctctttctactcttgtattaaaatttttccccacttcatgattatattcaaaataaacaactacatcattacttcttgtcttttgcttctgttgtactatatttggaatgtagatgtacttgggaaagtcagrctagatcaaagttactattcttacaagttttgaaaattagtgttttagaagaaactcactcatgtttgtaacttcttta

SEQ ID NO: 605 - DNA, 2774 bp, Homo sapiens
agcttttatggaatttcaattaattacgtttatcaaaactacgcatcatgcccatttgtgggtattggatgaaaagataaatctttccagaaggggcaggggagggagaggcaattstggttggggaagttgggagaaaagaaaatcagtatctcstagtcttcgcccagtttggctcgtttggggtactcctcgaccccgcgttaccaggcccgtgaatcccactcccrccagagaattagcgcgggcggacgagcaaagtgaaacttagtagcccggaacttcgcgtgccgggttcccgcagcaacacgtaccgggaagcgtttgggcrctgcaccgcgctgcgccgtgcccgtgagtccggcgcgcagaggaggaggagaaagctgaccgcttaggccsgggtagtggtcgtcgtggttttccttgtagttcgtggtctgagaccaggcctcaagtggaaacggcgtcaccatgatmgcacggcggaacccagaacccttacggtttctgccggatgaggcccggagcctgcccccgcccaagctgaccgacccgcggctcctctacatcggcttcttgggctactgctccggcctgattgataacstratccggcggaggccgatcgcgacggctggtttgcatcgccagcttctatatattacggcctttttttttgctggatattatcttgtaaaacgtgaagactacctgtatgctgtgagggaccgtgaaatgtttggatatatgaaattacatccagaggattttcctgaagaagataagaaaacatatggtgaaatttttgaaaaattccatccaatacgttgaagtyttcaaaatgcttgctccagtttcactgatacctgctgtttctgaatttgatggaacatgtttcttatgacagttgaagcttatgctaatctgtatgttgacaccttgtaattaaaatacgtaccatgagtactctgactctttattgttgtaagaaaaatagttcatcatcagagaatggtcagtttccattcacccatctgaaagattttaagatgaggttgaattctagtttagagttagcagactacccaaatctggcccactgccaataaagtctcattggaacacagccatgctcatttgtttacatgttgtttatggcgactgccatgctgcaagagcagaattgagtagttgtgatagagacctatggcctgcaaagcctaattaatatgtagccctttcagaaaaggtttgcctgcccctgtcctagtgcaaagtgaatttagagtgagccagattatggaggattctgtgactcttgccaaataattttgacttcatcctgtaggtattaagtcattaaggcgttttaaatcatacagtcaggtttgtatttctgagctgtctataatgaatgatatagaaggtggtttcgaaggaggagactccagacaaggaaaacagaaatcttatgttgccaagttgtctttgctcttaggtgggttatcctggagaaaatggactcaggagctaatactgtctacagtggagcttggtgcaattagaagcaaaagactgtacctaactggaatgaggttactttttatggcttatcaaatgcttgtcctggcccgatgcagtggctcatgcctgtaatcccagcactttgagaggctgaggcagggcagattgcatgagcccaggagttcgagaccaacttgggcaacatggtgaaacactgtctctacataaaatacaaaaattagctgggcgtggtggcacgttcctgcaatcccagctactcataaggctgaggtgggaggatctattgagccctggaattcgaggatgcaattaattgtggttgtgtcacagttcactgcagcctgggtgacactccagcctgggtgacaaaggagaccccgtcaaaaaaaaaagtacttgtcccaaaagtttttgtttcctagcttagaatttataatcagattaggtttkggagataaagtatatgtggtatttttttttttttttttgagacagtcttgctctgtcatcaggctggagtgcagtggcgcaatttcggctcactgcaacctccacctcctgggttcaagcaattctcctgcctcagcctcccgagtagctgggactacaggtgcatgccacgacgcccagctgatttttgtgtttttagtagagacggggtttcaccatgttggccaagatggtctcaatctcttgaccttgtgatccacctgccttggccttccaaagtgttggaattacaggcgtgagccaccgcgcctggtctatatgtgatttcaaattaggtggccttataaatataagcagatggtttctgggcaaaatcaaatgatttctgtctctattttcttgagtaccaattgtaaaaactgaaattaggttgaggaaagtgctttagaaataataaagatgtacaaatacmaggctttggattttttattagttctgcaataaataataggtttatagttcacctgttgttgatctcatcagtggtcgccaagtaagagggtgaatcactcatcccmagagactctgctacctcttagctctggagggtaaaaagcaagggccagagcaaatacattggggagagggggagaatttagttttcataagcttgtgaggtagataatattatccccattttatagatgagggaatttaggctccaatgggttaaataacttgtacaagtacacatactgaatgactgccatgaggag

SEQ ID NO: 606 - DNA, 3012 bp, Homo sapiens
agcttttatggaatttcaattaattacgtttatcaaaactacgcatcatgcccatttgtgggtattggatgaaaagataaatctttccagaaggggcaggggagggagaggcaattstggttggggaagttgggagaaaagaaaatcagtatctcstagtcttcgcccagtttggctcgtttggggtactcctcgaccccgcgttaccaggcccgtgaatcccactcccrccagagaattagcgcgggcggacgagcaaagtgaaacttagtagcccggaacttcgcgtgccgggttcccgcagcaacacgtaccgggaagcgtttgggcrctgcaccgcgctgcgccgtgcccgtgagtccggcgcgcagaggaggaggagaaagctgaccgcttaggccsgggtagtggtcgtcgtggttttccttgtagttcgtggtctgagaccaggcctcaagtggaaacggcgtcaccatgatmgcacggcggaacccagaacccttacggtttctgccggatgaggcccggagcctgcccccgcccaagctgaccgacccgcggctcctctacatcggcttcttgggctactgctccggcctgattgataacstratccggcggaggccgatcgcgacggctggtttgcatcgccagcttctatatattacggcctttttttttgctggatattatcttgtaaaacgtgaagactacctgtatgctgtgagggaccgtgaaatgtttggatatatgaaattacatccagaggattttcctgaagaagataagaaaacatatggtgaaatttttgaaaaattccatccaatacgttgaagtyttcaaaatgcttgctccagtttcactgatacctgctgtttctgaatttgatggaacatgtttcttatgacagttgaagcttatgctaatctgtatgttgacaccttgtaattaaaatacgtaccatgagtactctgactctttattgttgtaagaaaaatagttcatcatcagagaatggtcagtttccattcacccatctgaaagattttaagatgaggttgaattctagtttagagttagcagactacccaaatctggcccactgccaataaagtctcattggaacacagccatgctcatttgtttacatgttgtttatggcgactgccatgctgcaagagcagaattgagtagttgtgatagagacctatggcctgcaaagcctaattaatatgtagccctttcagaaaaggtttgcctgcccctgtcctagtgcaaagtgaatttagagtgagccagattatggaggattctgtgactcttgccaaataattttgacttcatcctgtaggtattaagtcattaaggcgttttaaatcatacagtcaggtttgtatttctgagctgtctataatgaatgatatagaaggtggtttcgaaggaggagactccagacaaggaaaacagaaatcttatgttgccaagttgtctttgctcttaggtgggttatcctggagaaaatggactcaggagctaatactgtctacagtggagcttggtgcaattagaagcaaaagactgtacctaactggaatgaggttactttttatggcttatcaaatgcttgtcctggcccgatgcagtggctcatgcctgtaatcccagcactttgagaggctgaggcagggcagattgcatgagcccaggagttcgagaccaacttgggcaacatggtgaaacactgtctctacataaaatacaaaaattagctgggcgtggtggcacgttcctgcaatcccagctactcataaggctgaggtgggaggatctattgagccctggaattcgaggatgcaattaattgtggttgtgtcacagttcactgcagcctgggtgacactccagcctgggtgacaaaggagaccccgtcaaaaaaaaaagtacttgtcccaaaagtttttgtttcctagcttagaatttataatcagattaggtttkggagataaagtatatgtggtatttttttttttttttttgagacagtcttgctctgtcatcaggctggagtgcagtggcgcaatttcggctcactgcaacctccacctcctgggttcaagcaattctcctgcctcagcctcccgagtagctgggactacaggtgcatgccacgacgcccagctgatttttgtgtttttagtagagacggggtttcaccatgttggccaagatggtctcaatctcttgaccttgtgatccacctgccttggccttccaaagtgttggaattacaggcgtgagccaccgcgcctggtctatatgtgatttcaaattaggtggccttataaatataagcagatggtttctgggcaaaatcaaatgatttctgtctctattttcttgagtaccaattgtaaaaactgaaattaggttgaggaaagtgctttagaaataataaagatgtacaaatacmaggctttggattttttattagttctgcaataaataataggtttatagttcacctgttgttgatctcatcagtggtcgccaagtaagagggtgaatcactcatcccmagagactctgctacctcttagctctggagggtaaaaagcaagggccagagcaaatacattggggagagggggagaaaaaaaaaatcaggctattttaatagccctcacatgccaagtgcttttgattcatcatgtttagttttcataagcttgtgaggtagataatattatccccattttatagatgagggaatttaggctccaatgggttaaataacttgtacaagtacacatactgaatgactgccatgaggagggatgtgaattttggtcacgtgccaacacctacactcttcctaccataccacactggacaggtaattgtctagtccctcctgaaccactggtcacctccccaagctgttaagaggagcgaggggagcagtgaatagcaacagacattctaaaggtgagccagtgactggaatccaggaat

SEQ ID NO: 607 - DNA, 786 bp, Homo sapiens
atggcggtccacagggggaccctgccctggtcagtggcccatgcagcaagacgcatggtgctgtgcgacgctttgggtctgcagtcatctctgcagtgtcacagtggctactggaaggcccaggcctgtgctggggatgttgcagctgcggctgtgctgcatttctatcccaaggacaacgaaggctactggttctgytccctctttgttcacaaagtggatccctggaaggatgcccactctgccctgctgtccaagaaggagaccagcaacctctacaagatccagtttcacagtgagaagcctgagtgcccggatgcctatagactaccctgctccctcatgggcaagtggaacacgtgctgtagggagcaggaccaggcactgcacctgtggaggttctcaggtggctactcagccctcgcggactgcatgacaaggagtacctggaggtccrgaaggagtgcagctggatgctgttgtccaggagacaccaattgctccttgagttcagcttctggaatgagccatagcccagcgtggaccccaacatcttatgagctgaggacatgcaagctkaagccaggaaccatgatggagtaggggaacaattggggtcctgccagcaggtaccagcagcaagtcccagcaggagaaccaggaggtgatcgtggctcctcccaaataggagagctccaccttgtgcawcatctctggtcctataaagacccacagtcttgggaggagacccgaagtgctgcctgcaggaagagggcttgggatgaa

SEQ ID NO: 608 - DNA, 839 bp, Homo sapiens
atggcggtccacagggggaccctgccctggtcagtggcccatgcagcaagacgcatggtgctgtgcgacgctttgggtctgcagtcatctctgcagtgtcacagtggctactggaaggcccaggcctgtgctggggatgttgcagctgcggctgtgctgcatttctatcccaaggacaacgaaggctactggttctgytccctctttgttcacaaagtggatccctggaaggatgcccactctgccctgctgtccaagaaggagaccagcaacctctacaagatccagtttcacagtgagaagcctgagtgcccggatgcctatagactaccctgctccctcatgggcaagtggaacacgtgctgtagggagcaggaccaggcactgcacctgtggaggttctcaggtggctactcagccctcgcggactgcatgacaaggagtacctggaggtccrgaaggagtgcagctggatgctgttgtccaggagacaccaattgctccttgagttcagcttctggaatgagccatagcccagcgtggaccccaacatcttatgagctgaggacatgcaagctkaagccaggaaccatgatggagtaggggaacaattggggtcctgccagcaggtaccagcagcaagtcccagcaggagaaccaggaggtgatcgtggctcctcccaaataggagagctccaccttgtgcawcatctctggtcctataaagacccacagtcttgggaggagacccgaagtgctgcctgcaggaagagggcttgggatgaaatgtctattgtacagttcccctcgggcaacacktggagtcttggatcctcttg

SEQ ID NO: 609 - DNA, 1693 bp, Homo sapiens
agggggcggggcacgcgcacctgccgtagagtgctgaaggtcctgccaacggctctcttggcgtctcaacgttcggatcagcagcttttttccattctctctctcyacttcttcagtgagcagccatgagttggactgtgcctgttgtgcgggccagccagagartgagctcggtgggagcgaatttcctatgcctggggatggccctgtgtcygcgtcaagcaacgcgmatcccgctcaacggcacctggctcttcacmcccgtgagcaagatggcgactgtgaagagtgagcttattgagcgtttcacttccgagaagcccgttcatcacagtaaggtctccatcataggaactggatcggtgggcatggcctgcgctatcagcatcttattaaaaggcttgagtgatgaacttgcccttgtggatcttgatgaagacaaactgaagggtgagacratggatcttcaacatggcagccctttcacgaaaatgccaaatattgtttgtagcaaagattactttgtcacagcaaactccaacctagtgattatcacagcaggtgcacgccaagaaaagggagaaacgcgccttaatttagtccagcgaaatgtggccatcttcaagttaatgatttccagtattgtccagtacagcccccaytgcaaactgattattgtttccaatccagtggatatcttaacttatgtagcttggaagttgagtgcatttcccaaaaaccgtattattggaagcggctgtaatctggatactgctcgttttcgtttcttgattggacaaaagcttggtatccattctgaaagctgccatggatggatcctcggagagcatggagactcaagtgttcctgtgtggagtggagtgaacatagctggtgtcyctttgaaggatctgaactctgatataggaackgataaagatcctgagcaatggaaaaatgtccacaaagaagtgactgcaactgcctatgagattattaaaatgaaaggttatacttcttgggccattggcctatctgtggccgatttaacagaaagtattttgaagaatcttaggagaatacatccagtttccaccataayyaagggcctctatggaatagatgaagaagtattcctcagtattccttgtatcctgggagagaacggtattaccaaccttataaagataaagctgacccctgaagaagaggcccatctgaaaaaaagtgcaaaaacactytgggaaattcagaataagcttaagctttaaagttgcctaaaactaccattccgaaattattgaagagatcatagatacaggattatataaygaaattttgaataaacttgaattcctaaaagatggaaacaggaaagtaggtagagtgaytttcctatttatttagtcctccagctcttttattgagcatccacgtgctggacgatacttatttacaattcctaagtatttttggtacctctgatgtagcagcacttgccatgttatatatatgtagttggcatttggttcccaaaaagtaggatgtaggtatttattgtgytctagaaattccgactcttttcattagatatatgctatttctttcattcttgctggtttatacctatgttcatttatatgctgtaaaaaagtagtagcttcttctacaatgtaaaaataaatgtacatac

SEQ ID NO: 610 - DNA, 420 bp, Homo sapiens
aggagcattatggttattccagatctctacatgaatgccaaaggagagacagcrtccaactttgagtggctgaagaatctaaatcatgtcagctatggctgtttgaccttcaaatatgaaagggagtgtaactaccacttgctaatatctgttcaagagaatttagcaagaaaatttggaaagcacagtggaactattctcattatacccacagcagagttccaagacaggatatcaggtgcatcagagaaagacaccatgcwtgctgacttggtgtasgcaatggagagttctgccaggcaaattttgtgcatagccatgaggtataacctgggattggacatgaggaccaccgtctatgtcaacgccattgagaaagtgttyaaagtatacaatgaagccagagtgaccttcacgtag

SEQ ID NO: 611 - DNA, 2993 bp, Homo sapiens
gaattcaggtaaaatattctgcctgaccagggctacatgataagccacgtacttgatcactttgtagggtcgcagcacccttcttactactattttaggtaattcaggtttctgacggggaagccagtggagctgagcgggctgcaagaggggtgggttctggatgagaagttgggacgcgtgacgagggagtagagagtgaaccttggcttaaaaggaaggaaaataactgtgaagaaaagatgacccaacttgaaataaaacctgaagaccttatctcccacttgagagagagaagaagctgaaagccatcagcttgcactctgggctcacagacagagagggtgaggggttgagcccagatctatgacttcagacccctgtctcggcccctaggcctgatcattcattcaaactctcaataaacacggattaccagaccctgcgcagggaacacatctgggaaaacagctgcaacctcggataccagcacgggacaagctatctcagggcaatgrggaacaactaaagagaatcccaggaaccaggtaaccaatcgccagaagccctccgccctcatggtccattgggtcaaggccccactgccgcctcgtatcgccagcctccagtcctgcctccacgacgcgcccttccccaaggctggccgggtctggatgtcgccatcccctattcggagctacagacctcgcagctgaactcttaaaaagaacctcgcttcttcctcacggtgctccagctccacacaccgtactgagcctcgccagccaccgtacgcgaggtsgcggcgcgtccgtgacgtcactgatgtgcgcttctcccgcactaagggaaacatggctctarcgcggccggtgcggctcttttccctcgtgactcggttgctcctggcgccgcgacggggcctcacggtccgcagtcccgacgaacccctgccggtggtgcgcatcccagtggctctacagcggcagttggaacagcggcagagcaggcggcggaacctcccgaggccggtgctggttcgacccggaccgctgctggtttcggcgcggcggccggagttgaaccagccggcgcgcctcacactgggccgttgggagcgcgcgccgctagcctctcaaggctggaagagtcgacgcgcgcgtcgggaccacttctccatcgagcgcgcgcaacaggaggcgccagcggtgcgaaagctctcgtctaagggcagctttgctgacctgggcctggagccccgtgtgctgcacgcactacaggaggctgcgcctgaagtcgttcagcccacaaccgtgcagtctagcaccatcccctcactacttcgcggccgccatgtcgtttgcgccgcagaaaccggcagtggcaagactctcagctacctcctgccgctgcttcaacggctcttgggccagccaagcctggactcccttcctatccccgcgccccgaggcctggtccttgttccttcccgagaattggcccaacaggtgcgggctgtggcccaacccttgggccgctccttgggcctgctggtgcggsacctggagggaggccacggcatgcgtaggatcaggctgcagctgtccagacagccttcagcagatgtgcttgtggccactccaggggctctgtggaaggccctgaaaagtcgactgatcagtcyggagcaactctccttcttggtgttggatgaggcagacacactgctggatgaaagcttcctggaactggtggactacatcttagagaagagccacatagcagaaggcccagctgacttggaagaccccttcaatcccaaagctcagttagtgctggtaggagccacatttcccgaaggtgtaggccagttgctgaataaagtcgccagcccagatgctgtcaccaccatcaccagctccaagctccactgtatcatgcctcatgtgaaacagacatttctgagactgaagggagcagataaggtggccgagctggtgcacatcctcaagcatcgtgacagagcagaaaggactggtccctcaggaactgttctggtgttctgtaatagctccagcactgtgaactggctgggatatattctggatgaccacaaaatccaacacctaaggttgcaggggcaaatgccagccttgatgagggtaggaatcttccagtccttccagaagagctcccgagacatacttctctgcacagacatagcctctcggggcctggacagcactggtgtggagctggttgtcaattatgatttccccccaacgctgcaagattacatccacagagcagggagagtgggccgtgtggggagcgaggtgccaggcaccgtcatcagttttgtgacccatccctgggatgtgagcctggttcagaagattgagctggcggctcgccgaaggagaagtcttccargactagcatcctcggtgaaagagcctttgccscaagcaacctgattttgacaaatctgattaaaatgtgatgctagaacagggatctttcccagtatcttgagtgggtgaccacacttgtcagtgggaggctctgggctgccctgtcgrctccttgagggcgggatgaactgctttgtgacttggaaaggtacgctgctggccagcattggagaagaagctgctgagcatggctttctgtagtctttagcaagacacaagtggattttgactttgtatcatgtcatgatttctaacaataaatgatgtttttatgtgcctcccctaagaataattagcaccggggcggaattcagtagtttctgaggattcatacaccaaacctccacatctaggacaaaggctctttcagttgatgttttcatttataaacatttagtttgtatttcctgcccccaaaaaggtatccattaagcccccagggaaaggaaaggaaaggaaatgtgactagcagtagacagagttactctctaacaatgcccaagacaaacgggcgtcttg

SEQ ID NO: 612 - DNA, 690 bp, Homo sapiens
atggtcaaccacaccatgttcttcgacgttgctgtcgacagtgagcccttggaccacgtctcctttgagctgtttgcagaaaagkttccaaagacagcagaaaacgttcgtgctctgagcactgaagagaaaggatttggttataagggtccctgctttcacagaattataccagcatttatgtgtcagggtggtgacttcacgcaccataatggcactggtggcaagtccatctacggggagaaatttgaagatgagaaatttatcctaaagcgtacaggtcctggcatcttgtccatggcaaattctggwcccaacacaaactgttccgtttttcatctgcactgccaagacggggtggttggatggcaagcatgtagtctttggcaaggaactcttggtttgtttagtcaaggccagttgtttctgccaacagcatctccacaacacatcttcctgcttctgtactccaaaaccttctttaatacaaacgtccccaatccctgggcaatagacttcacggctcaccttcacggtagaagggctgcaagagaaagggggaaaacaaactggatcacacagaaactctctctccgctttccagtgccaggaaatgggcttgttgcaccatatccttcaactctcagttcagaggaaatcttctgcatgtttagtggccacttaaagctg

SEQ ID NO: 613 - DNA, 711 bp, Homo sapiens
gtactatcagccatggtcaaccacaccatgttcttcgacgttgctgtcgacagtgagcccttggaccacgtctcctttgagctgtttgcagaaaagkttccaaagacagcagaaaacgttcgtgctctgagcactgaagagaaaggatttggttataagggtccctgctttcacagaattataccagcatttatgtgtcagggtggtgacttcacgcaccataatggcactggtggcaagtccatctacggggagaaatttgaagatgagaaatttatcctaaagcgtacaggtcctggcatcttgtccatggcaaattctggwcccaacacaaactgttccgtttttcatctgcactgccaagacggggtggttggatggcaagcatgtagtctttggcaaggtgaaagaaggcatgaatattttggaggccatagagcaatttgggtccaggaatggcaagaccagcaagaagaccaccattgctgactgtggacagctctggtaagtttgacttgtgttttgtcttaaccactggaccattccttctgtagctcaggagagcaccccttttgcttgcagtatcctagaatctttgtgcttccactgcaattccctttgggttccatgttttcttcgttcccttccatgcctagctggattgcagagttaagtttatgattatgaaataaaaactaaataacaattgtc

SEQ ID NO: 614 - DNA, 735 bp, Homo sapiens
gctgctgccaggagccctgtgctatcagccatggtcaaccccaccgtgttctttgacacggagcccttgggccgcatctcctttgagctgtttgcagacaagtttccaaagacagcaggaaactttcatgctctgagcactggagagaaaggatttggctataagggttcctgctttcacagaattgttccagggtttatgtgtcagggtggagacttcacatgccatgatggcactggtggcaagtccatctacagggagaaatttgatgacaagaacttcatccggaagcatacagtttctggcatcttgtccatggcaaatgctggacccaacgcaaacagttcccagtttttcatctgtgctgccaagactgagtggttggatggcaagcatgtggtcttcagcaaggtgaaagaaggcatgaatattgtggagaccatggagtgctttgggtccaggaatggcaagaccagtaagaagatcaccattgctgactgtgggcaactctaataagtttgacttgtgttttatcttaaccaccagaccattccttctgtagctcasgagagcaccctccaccccatttgctcgcagtatcctagaatctttgtgctctcactgcagttccctttgggttctatgttttccttgttcctttccatgcctagctagattgcagagttaagtttatgattatgaaataaaaactaattmacaacagcaacaaaaaaa

SEQ ID NO: 615 - DNA, 504 bp, Homo sapiens
gccactgcctccaggggccccatactatcagctatggtcaaccccacyaagttcttcaatgagccctggggccgcatctcyatccagctgtttgcagacaagtttccaaagacagcagaaaatgtttgtgctctgagcattggagagaaaggatttggttataagggttcctgctttcacagaattattccggggtttatgtgtcacrgtggtgacttcacacaccataatggcagtggtggcaagtacatctatggggagaaatttgatgatgagaacttcatcctgaagcagacaggttctggcatcttgtccaaggaaaatgctggayccaacacaaacggttcccagtttttcatctgcagtgccaagagtgagtggttggatggtgagcatgtgttctttggcaaggtgaaagaaggcatgaatattgtggaggccatggagggttttgggtccaggaatggcaagaccagcaagaagatcaccattgctgactgttga

SEQ ID NO: 616 - DNA, 760 bp, Homo sapiens
atgggctttgcagacgccgctgccaccgggagccctctactatcagccatggtcaaccccaccgtgttcctcgacatcgctgtccacggtgagcccttgggtggtatccccttcgagctgtttgcagacaagatcccaaagacaccagaaaactttcatgctctaagcactggagaaaaaggatttggttataagggttcctgctttcacagaattattcccggggttatgtgtcagygtggtgacttcacaagtcataatggcactggtggcaagtccatccaaggggagaaatttgatgacaagaacttcatcctaaagcacgcaggtcctggcatcttgtccatggcaaatactggacccaacacaaacagtttccagtgtttcatctgcactgccaasgctgagtggttggatggcaagcatgtggtctttggcaaggtgaaagaaggcataaatattgtcgaggccatggagcgctttgggtccaggaatggcaagaccagcaagaagatcaccatttctgactgtggaaaactctaatacgtttgacttgtgtttgatattttatcttaaccaccagactattccttctgtagctcaggagagcacctctccaccccatttgctcgcagtatcctggaatctttgtgctctcgctgcagttccctttgggtgccatgttttccttgttcccttccatgtctagctggattgcaaagttaagtttatgactatgaaataaaaactaaataacaat

SEQ ID NO: 617 - DNA, 1879 bp, Homo sapiens
atggaggcgagtggtctgactgagaggtttaagccaccaactcactgggaaggagtcaacattgatgagaatttccagagaaagggaatggagctccagaagagtctaaggaaggttcagtttgccaaagcctytgtgttgtctttaagccaaagtcagctgtcggggatagctcrggtcctccaggaacagattggccttagtatccctgccatgctcattcactgcttacagcatgtgaatttgggcttgaatggaagaattaaggataacaatagagagaaaagggaggtaagaaaatcaggcagactatgggcctcagcaaaactgctggtttttaatgatgtagatgtcttcaaggttcacgatgttgcaggcagagcttttcctaaacaggcacagctggcaggcactgtacaaatcagtcagctcaggctgcgtggcccatgtcccagtgctgtgcaggacctgcctctatcacccgtgtgcactgcccggatggtgccaagcgcattggagcaccggaaggagacgcggagccgaggccaggccttccggcggtcgttacgggacgccgctgccatctacagcactccgtgaagaatatgctggccgccttcatctcccgcgtgttgaggcgagttgcccagaaatcagctcgcagagtgctggtggcatcccgtaactcctcaaatgacgctacatttgaaattaagaaatgtgatctttatctgttggaagagggtccccctgtcactacagtgctcactagggcggaggggcttaaatactacaggatgatgctgactgttcgccgcatggaattgaaggcagatcagctgtacaaacagaaattcattcgcggtttctgtcacctgtgcgatggtcaggaagcttgttgcgtgggccttgaggccggcataaacccctcggatcacgtcattacatcctatagggctcatggtgtgtgctatactcggggactttctgtccgatccattctcgcagagctgacgggaagaagaggaggttgtgctaaaggaaaaggaggatcgatgcatatgtataccaagaacttctatgggggcaatggcatcgtcggtgcacagggccccctgggcgctggcattgctctggcctgtaaatayaaaggaaacgatgagatctgtttgactttatatggggatggcgctgcgaatcaggggcagatagccgaagctttcaatatggcagctttatggaaattaccttgtgttttcatctgtgagaataacctatatggaatgggaacatctactgagagagcagcagccagccctgattactacaagaggggcaattttatccctgggctaaaggtcgatggaatggatgttctgtgtgttcgtgaggcaacaaaatttgcagctaactactgtagatctggaaaggggcccatactgatggagctgcaaacctaccgttatcatggacacagtatgagtgatcctggagtcagttatcgtacacgagaagaaattcaggaagtaaraagtaagagggatcctataataattctccaagatagaatggtaaacagcaagctcgccactgtggaagaattaaaggaaattggggctgaggtgaggaaagaaattgatgatgctgcccagtttgctaccactgatcctgagycacatttggaagaattaggccatcacatctacagcagtgattcatcttttgaagttcgtggtgcaaatccatggatcaagtttaagtccgtcagttaaagggaggctacgtgtgaatttatcatcagtctctcaatggaatgttcatggtcaaatttaagaaactgtgttctcaactcaaggaggaataaaactcataaaacaaa

SEQ ID NO: 618 - DNA, 1477 bp, Homo sapiens
ctggcaggcactgtacaaatcagtcagctcaggctgcgtggcccatgtcccagtgctgtgcaggacctgcctctatcacccgtgtgcactgcccggatggtgccaagcgcattggagcaccggaaggagacgcggagccgaggccaggccttccggcggtcgttacgggacgccgctgccatctacagcactccgtgaagaatatgctggccgccttcatctcccgcgtgttgaggcgagttgcccagaaatcagctcgcagagtgctggtggcatcccgtaactcctcaaatgacgctacatttgaaattaagaaatgtgatctttatctgttggaagagggtccccctgtcactacagtgctcactagggcggaggggcttaaatactacaggatgatgctgactgttcgccgcatggaattgaaggcagatcagctgtacaaacagaaattcattcgcggtttctgtcacctgtgcgatggtcaggaagcttgttgcgtgggccttgaggccggcataaacccctcggatcacgtcattacatcctatagggctcatggtgtgtgctatactcggggactttctgtccgatccattctcgcagagctgacgggaagaagaggaggttgtgctaaaggaaaaggaggatcgatgcatatgtataccaagaacttctatgggggcaatggcatcgtcggtgcacagggccccctgggcgctggcattgctctggcctgtaaatayaaaggaaacgatgagatctgtttgactttatatggggatggcgctgcgaatcaggggcagatagccgaagctttcaatatggcagctttatggaaattaccttgtgttttcatctgtgagaataacctatatggaatgggaacatctactgagagagcagcagccagccctgattactacaagaggggcaattttatccctgggctaaaggtcgatggaatggatgttctgtgtgttcgtgaggcaacaaaatttgcagctaactactgtagatctggaaaggggcccatactgatggagctgcaaacctaccgttatcatggacacagtatgagtgatcctggagtcagttatcgtacacgagaagaaattcaggaagtaaraagtaagagggatcctataataattctccaagatagaatggtaaacagcaagctcgccactgtggaagaattaaaggaaattggggctgaggtgaggaaagaaattgatgatgctgcccagtttgctaccactgatcctgagycacatttggaagaattaggccatcacatctacagcagtgattcatcttttgaagttcgtggtgcaaatccatggatcaagtttaagtccgtcagttaaagggaggctacgtgtgaatttatcatcagtctctcaatggaatgttcatggtcaaatttaagaaactgtgttctcaactcaaggaggaataaaactcataaaacaaa

SEQ ID NO: 619 - DNA, 635 bp, Homo sapiens
atgagaaatcagagtgctcagaagtggtcctgtttctctgtggaggtgagggtgtgtctgggatggagacgagaggaggtgggagcagagaaattcagggagcagcacagtgtggtgaaaagtagactaggggtcatcctgaagcggcggccagagaagacacaaagacatgagcatcggatcaccatgcctttcttggccatccagaaaagattcggccttaacatagatcartggtggacaatccagagtgctgaacagccctacaagattgctgctcgatgccatgcttttgaaaaagaatggatagaatgtgcatatggaatcagtgttatccgggcagagaaagagtgcaagatagaatctgatgatttcgtagagtgtttgcttcggcagaaaacgatgagacgtgcaggtaccatcaggaagcagcaggataagctgataaaggaagggaagtacacccctccacctcaccacattggcaaggaggagcctcagccctgagcagagcagctgctgatgtctggaggctgaatttcctgttctctgttcctcactggaaagattgtttatggaaaacctccttgtcaaagtgtataaaaataaaggattgctccatcctaaaaaaaaaa

SEQ ID NO: 620 - DNA, 1919 bp, Homo sapiens
agagccmggtttatcgcgaggggcagtccccagggctgccgaatccagcagcgatggagagcggcaccgggccctgcggagaagagcgcccacgtkwagtccagcagacgacagtcactgagggggctgccaaaatcccagcgccaacgaggtcttttataaccttgtgcaggaattcagtcgggacatgacgtgctgtgatcatccagtttgctcgcattcagcttggggccaaaggaatccagatcaaggtgccaggagagaaggatacacaaaaggtggtcgtggacttgtcaaagcaagaggaggaaaaggttgaaccgaaagggagtgaaaacctggcctcaggagaccagcctcgcacagcgaccgtgtgggagatctgtgaggaaggcctgcatgtgctggaaggcctggcagcttcaggcctactttccattcgatttgccctagaggtgactggggctcagatctgtggttgcaaacgatacctctgcgggggctgtggatctcatacgctggaatgtgcagctcaatgacgggcccacctggtacagcccagccaagtagatgcctggatgctgatgtaccagcaccagagggtgtcagagaggttcgacgtcatccatctggacccctatggcagtcctgcccccttcctggatgcagctgtgctggctgtgagtgaaggagagttgctgtgcgtgacccgcacggacacggcggtgctggcgcggaacagtggggagatgtgttacagcaaattcggtgccatggccctcaagagccgggcctgccacgagatggccctgagaattgtcctgcacagcctggacctccgcgccaactgttaccagcgcttcgtggtaccgctgcttagcatcagcgccgacttctacgtgcgtgtttttgtccgtgtcttcaccggccagcccaaggttaaggcctcagccagcaagcaggccctggtgttccactgagtgggctgcgggtgcttccaccttcagcgcctcggcaaagcgtcaggagtcccccgcggccgggtcaagtcctctgtagcctgtgttccccccgtgaccccgagcgtgaacactgtgggcagcgacaccagcttggttgctccatgtgggcagagcccatccatgacctggatttcgtgggctgtgtcctagaggctgtgagcgctaaccccggccgcttccacacctcggagcggatgccagagggtcctgagcgtcatgactgaggagctcccacaggtgcctctgtactacaccctggaccagctgagcagcaccatcctctgcaacacgcccagcctcctgccgtggcggtcggccctcctccacgctcacttccgggtttcgctctcccacgcctgtaagaacgctgtgaagacgtatgccccgcctccgccctctgaaacatcatgcgctgctggaagaaggaatgtccggtgaaacaggagcgactctcagagaccagcccagcgtcccgcattctcagtgtggagcccaggctgcaggccaacttcaccatccgggaagatgccaaccccagctcccgccagcgacgactcaagcgcttccgggccaacccggaagccaactggagcccgcagcctcatgcctggccagggagcaaggctgctggcgaagctatggaggagagacgcaggctgcttcctaaggagtggaaggagccgcctgaggacagggcccagcgagctgccctgctcaagacatttccttgcaaaaggggggttaaggagggtacctgtcaatgcggggaccagtgctgctactcccacagccctctgacacccggggtctctgctgatgctgcgcttcactgtccagagacctccaatcacagaccccctggacctggggctgccactgggcccggaatagactgaa

SEQ ID NO: 621 - DNA, 612 bp, Homo sapiens
ctgcaagaaatggctgtggagctgctagggctggggcgcaccctctttgygccctccaacactatggccaacctcatctctgtgatgtgtcactgctggcgccggggctcccagctcctccttgggcaggagtgccacctccacgtctatgagcagggtggggtggctcaggtaaggagcaggcatagtccctaccaccaggtctgcgagctcatttgcctggagaactcacacagcatctcgggggtccggatcctccccatcaactacctacgccaggtgcacctcctggcccagacctatggggcctgggtccacctggacagggcccagctgatgaacgtggtgctggccctgcatgtcccgcccacctacattgtggagcactgtgactctgtgtctttctgcctctccaagggcctgggcgccccagtggggtccctggctgggaggcccaaggacttcattgaagaagcctggcgcctccaaaaagccctgggtggaagcrtgcaccaggtggggatgctggctgcggtggccctggtgggactggttgacacaaagcaggcactgtggcaagaccatgggaacgcccagagattcacccaaggt

SEQ ID NO: 622 - DNA, 605 bp, Homo sapiens
cagccatgatctaccccaccgtgttcttccacatcaccatcaatggcaagcacgtggaccgtgtctccttagaactgtttgcagacaagtttctgaaacagcagaacacttttatgctttgagcactggagagaaaggatttggttacaagggttcctgctttcacataattattccagggtttatgtgtcagggtggtgacttcaaacaccatratggcactggtggcaagtccatctatggggagaaatttgatgatgagaaattcatcctgaagaatacaggtcctggcatcttgtccatggcaatgctagacccaacacaaatggttctcagtttttcatctgcactgccaagactgagtggttggatggcaagcatgtggtcytggcaaggtgaaagaaggcatgaatattgtggacgccatggagtgctttgggtccaggaatgtcaagaccagcaagaatatcaccattgctgactgtggacaattccagtaagttggacttgtgttttaccttaaccaccagaccattccttctgtagttcaggagagcacccctccaccccatttgcttgcagtattctataatctttgtgctctc

SEQ ID NO: 623 - DNA, 267 bp, Homo sapiens
atggagtcagttgtaccagtgaaggacaagaaacttctggaggtcaaactaggggagctgccaagctggatcttgatgtgggacttcagccctagtggccttgatggagcrtttcaaagaggttactactggtactacaacargtacatcaacgtgaagaaggggagcatctcggggtttaccatggtgctggcagggtacatgctcttcatctacygcctttcctacaaggagctcaagcacgagcggctatgcaagtaccactga

SEQ ID NO: 624 - DNA, 1477 bp, Homo sapiens
tcctcggcggtcagtttttcatcctttgatccaggggtcgcttcctgtacctcgtcctcagcatctggaatccagagacctatggcgtctgaggtgccttgtgcctcgggcatacccatcaagaaaataggccatcgaggtgttgattcctcaggagagacaacctatagaaagacgacctcatcagccttgaaatgtgccatccagttgtgcattactcacactgtggggagcctggatcccacaccagagcgtcatgtcctcatgtaagatttctgcgtggtggagaatatcttctttcccagtggagggagcaacctgacccctgctcatcactgcagtgagtttcctttcaagacctatacacctgttgccttctgctactttcaggagctatttggtatctgccctgatgatgacttgtactccctctgcagtgagccactgattgaactcagtagctctggagctgatggttccctgttacatgtgtccatccacratgaattcattattaaaacagtccaacataaacaggcggagtttctgcagaagctgattccaggataccacatcgacctcaaccagaactcttggactttgctgcctaaattctatggactgtgctgtgtgaaggcaggtggcaagaacacgcagattgcggtgatgaagaatctcttactaagactggtcaaaatgcataccaaatatgacttcaaaagttcaacctacaaagagcaggcttcccagaaagagcaagagaagcctcttcccacattttcccacatttaaaaacctagacttcttacaagacatcccgatggtcttttttttggatgctaacatgtacaacgctctctgtaagaccctgcagcgtggctgtttggtgctgcagatctttgagataatggactatagcctcttgatgtcaatccacaacatagatcatgcacgagagcccttgagcagccaaacacaatgctcagttcacacttgaagaccagccccccaaagggctctgtattccacagccatggaatccayccagggagaggcttgacggggcagccccatggagactgatgaccatatgggtggcatccctgcccagaatagtgagggggaaagaatcctgctttgtattggcatcactgacattctacagtcttacaggtttgttaagaagctggagcattcttggaaagccctggtatgtgatggggacactgtctcagtgcatcgcccaggcttctacactgaacggttccagtgcttcatgtgcaacacagcatttaagaagatcccggccaggtgccgtgttcaccttggttgtcctgatgttttacctcagactccacctttggaggaaatcagtgagggtttacctattcctgaccccagtttctcacctgtagttggagagaccttgcaaatgctaaccacaagtacaaccttggaaaagcttgacattgcagag

SEQ ID NO: 625 - DNA, 900 bp, Homo sapiens
atggccgtcggtctcctcagggcctcctcggcggtcagtttttcatcctttgatccaggggtcgcttcctgtacctcgtcctcagcatctggaatccagagacctatggcgtctgaggtgccttgtgcctcgggcatacccatcaagaaaataggccatcgaggtgttgattcctcaggagagacaacctatagaaagacgacctcatcagccttgaaatgtgccatccagttgtgcattactcacactgtggggagcctggatcccacaccagagcgtcatgtcctcattgagtttcctttcaagacctatacacctgttgccttctgctactttcaggagctatttggtatctgccctgatgatgacttgtactccctctgcagtgagccactgattgaactcagtagctctggagctgatggttccctgttacatgtgtccatccacratgaattcattattaaaacagtccaacataaacaggcggagtttctgcagaagctgattccaggataccacatcgacctcaaccagaactcttggactttgctgcctaaattctatggactgtgctgtgtgaaggcagacttcttacaagacatcccgatggtcttttttttggatgctaacatgtacaacgctctctgtaagaccctgcagcgtggctgtttggtgctgcagatctttgagataatggactatagcctcttgatgtcaatccacaacatagatcatgcacgagagcccttgagcagccaaacacaatgctcaactccacctttggaggaaatcagtgagggtttacctattcctgaccccagtttctcacctgtagttggagagaccttgcaaatgctaaccacaagtacaaccttggaaaagcttgacattgcagag

SEQ ID NO: 626 - DNA, 2315 bp, Homo sapiens
  misc_feature (1)...(2315): n = A,T,C or G
ctgtggctccggccgctgagtgatggtcccttctgtctgccagggtgggatcgggcactcatccagttgcaggtgcgagcactattgagtagcacagggtctcaagctgtggccatggacttgggcaacaggaaattagaaatatcctctggaaagctggccagatttgcaaatggctctgctgtaatacagtcaggtgayactgcggtaatggcsacagccgtcagtaaaacaaaaccttccccttcccagtttatgcctttggtggttgactacrgacaaaaggctgctgcagtaggtagaattcccacaaaccctctgagaagagagattagtacttctgataaagaaattcttacacgttgaatagtagattgttcagttagacctatctttccagctggctacttctgtgatatacaggttctgtgtaatctgttagcagtagatggtattaatgaacttgatgtcctagcaattaatggcaacctctgtagccctctcattatcagataytctttggaatggacctgttgggacagtatgaataggaatgactgatggagaatgtgttgttaacccaacaagaaaagaaatgtcttctagtactttaaatgtagtggttgctggagcacctaaaagtcagactgtcatgttggaagcctctgcagrgaacattttacagcaggacttttgccacgctatcaaagtgggagtgaaatatacccagcaaataattcagggcatccagcagctggtaaaagaaattggtgttaccaagaggacacctcagaagttatttaccccttcacaagagattgtgaaacrtgctcataaactcactatggagagactctatgcagtttttacagattatgaacatgataaaatttccagagatgaagctgttaacaaaataagattagatacagaggaacaactaaaagaaatatttccagaggtcgatctatatgagataatagaatccttcaatrctgttgcaaagraagtttttagaagtattattttgaatgaatacaaaagatgcgatggtcgggatttgactttacttcggaatataagttgtgaggtagatatgtttaaaacccttcatggatcagaattatttcaaagaggacaaacacagctgctttgtgctgttacatttgattcattagaatccagtattaagttggatcgagttataacaactataaatgggataaaagataaaaatttcatgctgcactatgagtttcctccttatgcaactaatgaaattgtcaaagtcaccrgtataaatagaagagaacttgggcctgrtgctcttgctgagaaagctttgtatcctgttattcccaaagattttccttttgccataagagttacatctgaagtcctagagtcaaatgggtcatcttctatggcatctgcatgtggtggaagtttagcattaatggattcagggcttccaatttaatctgctgtcacaggtgtagcaatgggattggccaccaaaaccgatcttgagaasggtgaaatagaagattatcatttgctaacagatattctgggaattgaagcttacaatggtgacatggacttcaaaatagctggcactaataaaggaataactgcattacaggcagatattaaattacctggaataacaatgaaaattgtaatggaggctattcaacaagcttcagtggcaaaaaggagattttacagatcatgaacaaagctatttcaaaacctcaagcatctagaaaagaaaatggacctgttgtagaaactgttcaggttccattatcaaaatgagaaaaatttgttggaccaggtggatataacttaaaaaacttcaggctgaaacagttgtaactattagtcaggtggatgaagaaacgttttctrtatttgcaccaacacccggtgctatgcatgaggcaagagacttcattgctgaaatccgcaaggatgatcaggagcagcaattagaatttggagcagtgtgtactgccacaataactgaaagcagagatactggtgtaatggtaaaattatatccaaatatgattttggtactgctttataacacacaacttgatcaangaaatattaaacatcctactgccctaggattagaagttggccaagaaattcaggtgaaatactttggatgtgacccagctgatggaagaatgaggctttctcataaagtgcttcagtcttcagctacaactgttgtcagaactttgaatgacagaagtagtnttgtactgggagaacctatttcacagtcatcatctaataat

SEQ ID NO: 627 - DNA, 2042 bp, Homo sapiens
gaacagaaagccaaataccatatgttctcacttataagtgggagcgaaacgataagaaattattaacacactgccctcctaccatccaccatggccctgctgcactcctctccgggattaccgcagccttccacccaggccttgctgctgcagcctctgccagagccagctcctggtggacccatgtggaaatgggacctccagatcccatcctgggagtcactgaagcctttaagagggacatcaatagcaaaaagatgaatctgggagttgggatgataatgggaagccgtacatgctgcctagcgtgctcaaggcagaggcccagattgctgcaaaaaatgtggacaaggaatccctgccagttgggggactggctgaattttgcaaggcatctgtagaaccaaccctgggtgaaaacagcaaagtcttgaaaagtggccagtttgtcactgtgcagaccatttctggaactggggccttaaggatcggagccagttttctctaaagatattttaagttcagctgagatgtctttctaccgaaaccaagctgggtaaatcacacacccatcttcagggacgctggcatgcagctacaatgttatcggtattatgaccccaagatttgcagttttgacttcacgggcgctgtggatgacttttaaaacatactagagcaaagtgttcttctcctgcatgcctgcacccacgcccagaatagtggaaggaaatagcaacagttgtgaagaaaaggaatctctttgcgctctttgacatggcctaccaaggctttgccagtggtgatggtgataaggatgcctgggctctgcaccacttcatcgaacagggcattaatgtttgyctctgccaatcatatgccaagaacatgggcttatatggtgagcatgtaggagccttcactgtggtctgcaaagatgcagatgaagccaaaagggtagagtcacagttgaagatcttgattagtcccatgtattccaactctcccctcaatggggcccagattgcttctaccattccaaacaccccaggtttgtgaaaacaatggttgtaagaagtgaaaggcatggccgactgcatcattagcatgcggactcagctggtcttcaacctcaagaagaagggttccactcacaactggcaacacatcactgaccaaattggcatgtcttgtttcacagagctaaagcctgaacaggtggggtggctgaccaaggagttctccatctacatggcaaaggacggccgcatctctgtggcagggataacctccagcaacatgggctaccttgcccatgccattcaccaggtcaccaagtaatgtccctggtgtgaagaaacagggacaaactttctgtcttcagcctctgttattgggatattcacacagaggatgagagagggtggatggtggtgagtggatcatttctttcaaccatagtgtgtaacactcagtgattgaatgtttctcagaaaagaacatgtagtgacacagggcagaggcattcgtggctggcatctggaacattgtggctctaaaccaaactctcccctgtccttttatctccaacttttctcgaagagtttacatgggcaagaaagtcatcacaccaaaaaacctgccaattatgccattgcaatatttcagaagctttaactgaagtgtcaggttcctcatgagaaatagcacacattagaggcactgagagaagacctagttctgtcatgaacagttggcctcgtgactgtcctcccatcatggagcaaccttatcaacagaacgcgttgcagaaattatgttttataaaaaccagtgaatctgctgccactacagcaaggaaaataatgtggtttcctgtcttatttaagaaaaagaggaggctctcttttctcccttgtcattgctgttcttttccttaccgcacaaagatttttaactaatgtagattttcatcccgttctactgcttgactgacaatcaaccccatcctatcgggatttatttaagaataaagaatataa

SEQ ID NO: 628 - DNA, 474 bp, Homo sapiens
atgagtttcgatagcaaccgaagaactatagaaaaacaggaaggcactctctatttaagaggagaactgaatgcactacaggaggagctgaagaattttggtgtcattgtgttggcctttccctgcaaccagtttggaaaacaagaaccaggaacaaactcagaaatacttcttggtctcaagtatgtgtgtccaggtagtggctttgtccccagtttccagctctttgagaaaggggatrtgaatggagaaaaagaacagaaggtctttactttcctgaaggtgcatgagtataaacctggcatggatggccaactcttctgggagcccatgaaggtccatgatatccgctggaactttgagaaatttctggyggggcccgatggagtccctgtcatgcattggttccaccaggctccagtcagcacagtcaagtcagacatcctggagtacctaaagcagttcaatacccac

SEQ ID NO: 629 - DNA, 1697 bp, Homo sapiens
ctgtctgggcgccgcgctcctgctcctatgcgccgcgccccgctccctgcgcccggcatttggaaacagagccctgggctccagctggcttggtggggagaagagaagccccctgcagaagctctatgacctggatcaggacccgcgctcgaccctggcgaaggtgcaccgkcagcggcgcgacctgctgaacagcgcctgtagccgccactcacgccggcagcgcctgctacagccggaggacctgcggcacgtgctggtggacgacgcgcatggcctgctctactgctacgtgcccaaggtggcctgcaccaactggaagcgcgtgctgctggcgctgagcggccaagcccgcggcgacccgcgcgccatctccgcgcaagaggcgcacgcgyctggccgcctgccctcactggccgayttcagccccgccgagatcaaccggcgcctgcgcgcctacttggccttcctgttcgtgcgggagcccttcgagcgcctggcatcggcttaccgcaacaagctcgcgcgcccctacagcgccgccttccagaggcgctayggtgcacgcatcgttcagcgcctgcggccgcgcgcgctccccgacgcccgggcccgcggccacgacgtgcgcttcgcggagttcctggcctacctgctggacccgcgcacgcggcgtgaggagcccttcaacgagcactgggagcgcgcgcacgcgctctgccacccgtgtcgcctccgctacgacgtcgtgggcaagttcgagacrctggyggaggacgcggccttcgtgctgggcctggcgggcgcatccgacctgagcttccctgggccgccgcggccccggggagccgccgcctcccgcgacctggcagcgcgcctcttccgggacatcagccccttctaccagcrgcgcctcttcgacctctacaagatggacttcctgcttttcaactactccgccccctcctacctgcggctgctctagcggtcctggaggtcctgtggccacgcggggcaagtgcctttccgacaagacccccggggaatgcaggtgctgccggccccaggacccctcttcaagagccactgcgtgcactcacctggccgccgggccagcgggcgcagggcacacctggccaggcttgggggcagcccatctcaggtggccctgcacgcgtgtgcctgcctcggcctgtcgcctgaggcctgcttcctccacttgctccagctgacaggcacctctccaggccccgtagatgggcaaggacttgataaccagggttttaggcttttaaaggccattttgggggtcagccctgcccctgaacctgttcatggtgcatcagaacataatgctgacaccggtgtcagtgtggcccgagcctgtgtcctccccacctcgcccaccctggcaaggacagctgcggccaaggacgaaagccctcccttggctggcctcacgatggggccgtcccgggagccaggtgggagctgccttccactgccatcgggtctcctctcctctcccacgcggctggccctacccaggcgccaccttcggtctcagtctggcaagacgctgggtcttcaggctccatgccaacagagcccctggtgcaatgcggtcacaggttttatgggactttggtgagctgsgcggtcatggttttgaaataaatgtattttgttactttctg

SEQ ID NO: 630 - DNA, 894 bp, Homo sapiens
atggacaatgagcagcgtgtcttcagaagggagttrgtggatgttcaggggattccccttttctagagcattgctgaagagtggtttcaagtagaattgtytgagscctgaccagatgatattctgatctctacctatcccaaatctggaagacaytttcattttgaaatattggatttgatctttaacaatggggatgcagagaaatgtaaacgtgatgcaatatacaagcgagtgactttcatggaacttataattcctggactcacaaatggtgttgagcagttgcaaaacatrcagtctcctcaattagtgaaaacacacctgcctgttcaacttctcccttcttcattttggaagaataacttcctgctttttcaaatctctccacagatgatctacatggcatggaatgccaaagatgtggctgtgtcttattattatttccgccagatggcaaaaatgcacccagatcctggaacttgggaggagttcctggaaaaattcatgactggaaagttgtgttttggttcctggyatgaccatgtgaagggctggtgggaaaagaagaaagattatcgtatcctttacctattttatgaagacatgaaagagtgtgaaattcagaaggtgttaaagtttctggagaaagacaagccagaaacaattgtggataaaatcctccatcacagctcttttgatgtgatgaagcagaactcttgtacaaattatactactatgggaaagaatgagatggaccattatgtgtttcccttcataaggaagggtgtttcaggagactggaagaatcaattcactgtagcccagtatgagaaatttgaagattatgaaaaaaaaatgaaagagtccacactgcagtttcgatcagaaatc

SEQ ID NO: 631 - DNA, 4538 bp, Homo sapiens
ccctttcttctcttccagggctccgctttatttgctctcagaagtcggtttcctttccttttcttcagtgaatcggagctcagagcgttgcttcggtttccctccagacagttaggaatctgaaataaacaggaaagcactatgtcttcaatgtggtctgaatatacaattggtggggtgaagatttactttccttataaagcttacccgtcacagcttgctatgatgaattctattctcagaggattaaacagcaagcaacattgtttgttggagagtsccacaggaagtggaaaaagcttagccttactttgttctgctttagcatggcaacaatctcttagtgggaaaccagcagatgagggcgtaagtgaaaaagctgaagtacaattgtcatgttgttgtgcatgccattcaaaggattttacaaacaatgacatgaaccaaggaacttcacgtcatttcaactatccaagcacaccaccttctgaaagaaatggcacttcatcaacttgtcaagactcccctgaaaaaaccactctggctgcaaagttatctgctaagaaacaggcatccatatacagagatgaaaatgatgattttcaagtagagaagaaaagaattcgacccttagaaactacacagcagattagaaaaygtcattgctttggaacagaagtacacaatttggatgcaaaagttgattcaggaaagactgtaaaactcaactctccactggaaaagataaactccttttcgccacagaaaccccctggccactgttctaggtgctgttgttctactaaacaaggaaacagtcaagagtcatcgaataccattaagaaggatcatacagggaaatccaagatacccaaaatatattttgggacacgcacacacaagcagattgctcagattactagagagctccggaggacggcatattcaggggttccaatgrctattctttccagcagggatcatacttgtgtccatcctgaggtagtcggtaacttcaacagaaatgagaagtgcatggaattgctagatgggaaaaacggaaaatcctgctatttttatcatggagttcataaaattagtgatcagcacacattacagactttccaagggatgtgcaaagcctgggatatagaagaacttgtcagcctggggaagaaactaaaggcctgtccatattacacagcccgagaactaatacaagatgctgacatcatattttgtccctacaactatcttctagatgcacaaataagggaaagtatggatttaaatctgaaagaacaggttgtcattttagatgaagctcataacatcgaggactgtgctcgggaatcagcaagttacagtgtaacagaagttcagcttcggtttgctcgggatgaactagatagtatggtcaacaataatataaggaagaaagatcatgaacccctacgagctgtgtgctgtagcctcattaattggttagaagcaaacgctgaatatcttgtagaaagagattatgaatcagcttgtaaaatatggagtggaaatgaaatgctcttaactttacacaaaatgggtatcaccactgctacttttcccattttgcagggacatttttctgctgttcttcaaaaagaggaaaaaatctcaccaatttatggtaaagaggaggcaagagaagtacctgttattagtgcatcaactcaaataatgcttaaaggactttttatggtacttgactatctttttaggcaaaatagcagatttgcagatgattataaaattgcgattcaacagacttactcctggacaaatcagattgatatttcagacaaaaatgggttgttggttctaccaaaaaataagaaacgttcacgacagaaaactgcagttcatgtgctaaacttttggtgcttaaatccagctgtggccttttcagatattaatggcaaagttcagaccattgttttgacatctggtacattatcaccaatgaaatccttttcgtcagaacttggtgttacatttactatccagctggaggctaatcatatcattaaaaattcacaggtttgggttggtaccattgggtcaggccccaagggtcggaatctctgtgctaccttccagaatactgaaacatttgagttccaagatgaagtgggagcacttttgttatctgtgtgccagactgtgagccaaggaattttgtgtttcttgccatcttacaagttattagaaaaattaaaagaacgttggctctctactggtttatggcataatctggagttggtgaagacagtcattgtagaaccacagggaggagaaaaaacaaattttgatgaattactgcaggtgtactatgacgcaatcaaatacaaaggagagaaagatggagctctcctggtagcagtttgtcgtggtaaagtgagtgagggtctggatttctcagatgacaatgcccgtgctgtcataacaataggaattccttttccaaatgtgaaagatctacaggttgaactaaaacgacaatacaatgaccaccattcaaaattgagaggtcttctacctggccgtcagtggtatgaaattcaagcatacagggccttaaaccaggcccttggtagatgtattagacacagaaatgattggggagctcttattctagtggatgatcgctttaggaataacccaagtcgctatatatctggactttctaaatgggtacggcagcagattcagcaccattcaacctttgaaagtgcactggartccttggctgaattttccaaaaagcatcaaaaagttcttaatgtatccataaaggacagaaccaatatacaggacaatgagtctacacttgaagtgacctctttaaagtacagtaccycaccttatttactggaagcagcaagtcatctatcaccagaaaattttgtggaagatgaagcaaagatatgtgtccaggaactacagtgtcctaaaattattaccaaaaattcacctctaccaagtagcattatctccagaaaggagaaaaatgatccagtattcctggaagaagcagggaaagcagaaaaaattgtgatttccagatccacaagcccaactttcaacaaacaaacaaagagagttagctggtcaagctttaattctttgggacagtattttactggtaaaataccgaaggcaacacctgagctcgggtcatcagagaatagtgcctctagtcctccccgtttcaaaacagagaagatggaaagtaaaactgttttgcccttcactgataaatgtgaatcctcaaatctgacagtaaacacatcgtttggatcatgccctcaatcagaaaccattatttcatcattaaagattgatgccacccttactagaaaaaatcattctgaacatccgctctgttctgaagaagccctggatccagacattgaattgtctctagtaagtgaagaakataaacagtccacttcaaatagagattttgaaacagaagcagaagatgaatctatctattttacacctgaactttaygatcctgaagatacagatgaagaaaaaaatgacctagctgaaactgayagaggaaatagattggctaacaattcagattgcattttagctaaagacctttttgaaattagaactataaaagaagtagattcagccagagaagtgaaagctgaggattgcatagatacaaagttgaatggaattctgcatattgaagaaagtaaaattgatgacattgatggtaatgtaaaaacaacttggataaatgaactggaactgggaaaaactcatgaaatagaaataaagaactttaaaccatctccttccaaaaataaaggcatgtttcctggttttaagtaataatacttaactctcaagctaagtaaaaatatgtcatcatgcttatgttaaactctgttgtaagtaataatttgtaaattgaataagtggcatactttttaaaaaactattttatgttcagaaatgtaaatgttattattcttgagtttttgggtttytttttttgagacagagtcttggtctgttgcccaggctggaatgcagtggtgtgctctgggctcactgcaaccttcacctccaggttcaagtgattctcctgcctcagccttctgagtagctgggactacaggtgtgcaccaccatgcccagctagtttttgtatttttagtagagatggggtttcaccatgttggccaggctggtctcgaactcctggcctcgtgatctgcccttctctgcctccctaagttgctgggattacaggtgtgagccacagtgcctggcccattcttgagttttgataaagtaattcatacaaagtaytgtcctcaaataagtcttccttagctaaatgcaatttaaaattattcaaagatcctagggcacttctagtttcacgtaaatattcatattaagagatcaccatttgtcttgaaaggtttatttcgttattaaactgcctacttataagtaattaagagaaatta

SEQ ID NO: 632 - DNA, 5324 bp, Homo sapiens
ccctttcttctcttccagggctccgctttatttgctctcagaagtcggtttcctttccttttcttcagtgaatcggagctcagagcgttgcttcggtttccctccagacaggcaattaggaatctgaaataaacaggaaagcactatgtcttcaatgtggtctgaatatacaattggtggggtgaagatttactttccttataaagcttacccgtcacagcttgctatgatgaattctattctcagaggattaaacagcaagcaacattgtttgttggagagtsccacaggaagtggaaaaagcttagccttactttgttctgctttagcatggcaacaatctcttagtgggaaaccagcagatgagggcgtaagtgaaaaagctgaagtacaattgtcatgttgttgtgcatgccattcaaaggattttacaaacaatgacatgaaccaaggaacttcacgtcatttcaactatccaagcacaccaccttctgaaagaaatggcacttcatcaacttgtcaagactcccctgaaaaaaccactctggctgcaaagttatctgctaagaaacaggcatccatatacagagatgaaaatgatgattttcaagtagagaagaaaagaattcgacccttagaaactacacagcagattagaaaaygtcattgctttggaacagaagtacacaatttggatgcaaaagttgattcaggaaagactgtaaaactcaactctccactggaaaagataaactccttttcgccacagaaaccccctggccactgttctaggtgctgttgttctactaaacaaggaaacagtcaagagtcatcgaataccattaagaaggatcatacagggaaatccaagatacccaaaatatattttgggacacgcacacacaagcagattgctcagattactagagagctccggaggacggcatattcaggggttccaatgrctattctttccagcagggatcatacttgtgtccatcctgaggtagtcggtaacttcaacagaaatgagaagtgcatggaattgctagatgggaaaaacggaaaatcctgctatttttatcatggagttcataaaattagtgatcagcacacattacagactttccaagggatgtgcaaagcctgggatatagaagaacttgtcagcctggggaagaaactaaaggcctgtccatattacacagcccgagaactaatacaagatgctgacatcatattttgtccctacaactatcttctagatgcacaaataagggaaagtatggatttaaatctgaaagaacaggttgtcattttagatgaagctcataacatcgaggactgtgctcgggaatcagcaagttacagtgtaacagaagttcagcttcggtttgctcgggatgaactagatagtatggtcaacaataatataaggaagaaagatcatgaacccctacgagctgtgtgctgtagcctcattaattggttagaagcaaacgctgaatatcttgtagaaagagattatgaatcagcttgtaaaatatggagtggaaatgaaatgctcttaactttacacaaaatgggtatcaccactgctacttttcccattttgcagggacatttttctgctgttcttcaaaaagaggaaaaaatctcaccaatttatggtaaagaggaggcaagagaagtacctgttattagtgcatcaactcaaataatgcttaaaggactttttatggtacttgactatctttttaggcaaaatagcagatttgcagatgattataaaattgcgattcaacagacttactcctggacaaatcagattgatatttcagacaaaaatgggttgttggttctaccaaaaaataagaaacgttcacgacagaaaactgcagttcatgtgctaaacttttggtgcttaaatccagctgtggccttttcagatattaatggcaaagttcagaccattgttttgacatctggtacattatcaccaatgaaatccttttcgtcagaacttggtgttacatttactatccagctggaggctaatcatatcattaaaaattcacaggtttgggttggtaccattgggtcaggccccaagggtcggaatctctgtgctaccttccagaatactgaaacatttgagttccaagatgaagtgggagcacttttgttatctgtgtgccagactgtgagccaaggaattttgtgtttcttgccatcttacaagttattagaaaaattaaaagaacgttggctctctactggtttatggcataatctggagttggtgaagacagtcattgtagaaccacagggaggagaaaaaacaaattttgatgaattactgcaggtgtactatgacgcaatcaaatacaaaggagagaaagatggagctctcctggtagcagtttgtcgtggtaaagtgagtgagggtctggatttctcagatgacaatgcccgtgctgtcataacaataggaattccttttccaaatgtgaaagatctacaggttgaactaaaacgacaatacaatgaccaccattcaaaattgagaggtcttctacctggccgtcagtggtatgaaattcaagcatacagggccttaaaccaggcccttggtagatgtattagacacagaaatgattggggagctcttattctagtggatgatcgctttaggaataacccaagtcgctatatatctggactttctaaatgggtacggcagcagattcagcaccattcaacctttgaaagtgcactggartccttggctgaattttccaaaaagcatcaaaaagttcttaatgtatccataaaggacagaaccaatatacaggacaatgagtctacacttgaagtgacctctttaaagtacagtaccycaccttatttactggaagcagcaagtcatctatcaccagaaaattttgtggaagatgaagcaaagatatgtgtccaggaactacagtgtcctaaaattattaccaaaaattcacctctaccaagtagcattatctccagaaaggagaaaaatgatccagtattcctggaagaagcagggaaagcagaaaaaattgtgatttccagatccacaagcccaactttcaacaaacaaacaaagagagttagctggtcaagctttaattctttgggacagtattttactggtaaaataccgaaggcaacacctgagctcgggtcatcagagaatagtgcctctagtcctccccgtttcaaaacagagaagatggaaagtaaaactgttttgcccttcactgataaatgtgaatcctcaaatctgacagtaaacacatcgtttggatcatgccctcaatcagaaaccattatttcatcattaaagattgatgccacccttactagaaaaaatcattctgaacatccgctctgttctgaagaagccctggatccagacattgaattgtctctagtaagtgaagaakataaacagtccacttcaaatagagattttgaaacagaagcagaagatgaatctatctattttacacctgaactttaygatcctgaagatacagatgaagaaaaaaatgacctagctgaaactgayagaggaaatagattggctaacaattcagattgcattttagctaaagacctttttgaaattagaactataaaagaagtagattcagccagagaagtgaaagctgaggattgcatagatacaaagttgaatggaattctgcatattgaagaaagtaaaattgatgacattgatggtaatgtaaaaacaacttggataaatgaactggaactgggaaaaactcatgaaatagaaataaagaactttaaaccatctccttccaaaaataaaggcatgtttcctggttttaagtaataatacttaactctcaagctaagtaaaaatatgtcatcatgcttatgttaaactctgttgtaagtaataatttgtaaattgaataagtggcatactttttaaaaaactattttatgttcagaaatgtaaatgttattattcttgagtttttgggtttytttttttgagacagagtcttggtctgttgcccaggctggaatgcagtggtgtgctctgggctcactgcaaccttcacctccaggttcaagtgattctcctgcctcagccttctgagtagctgggactacaggtgtgcaccaccatgcccagctagtttttgtatttttagtagagatggggtttcaccatgttggccaggctggtctcgaactcctggcctcgtgatctgcccttctctgcctccctaagttgctgggattacaggtgtgagccacagtgcctggcccattcttgagttttgataaagtaattcatacaaagtaytgtcctcaaataagtcttccttagctaaatgcaatttaaaattattcaaagatcctagggcacttctagtttcacgtaaatattcatattaggtggttctcttcatccatttgttttcacactgatacataaaaattaacagcagtctaatctagtgacacctcagtcatatttcgctatagattttacctcaaatcagtccaagactttttcagagatcaccatttgtcttgaaaggtttatttcgttattaaactgcctacttataagtaattaagagaaattaagaaagtagtatgcatttttaattgaaattgttttacattctttgtataataaacctaaaaccaaacatgtcataaacaaattgacgtaaagatataaaatgccaaatgaagtattccaaattttctattctaattatttagcttcaccatcattgtggaaaaaaatactagatcctgcttagtattatatatttttcctagtggatcagtgagtaataagtaccaaacactagactagaaggtaatttctacattgtttagaaagggtgaaacaatttatcccctctggtattgttctagcataagctttagttatacaatgattaagatagaaaacttcatatataaatttgataagcaaacccacatttatagctgcagctaaaatatgtttccttagggcacagtaatcctttctgtgaattttgaccttgtttgtgtttttgtgaatgaagctatatgtctaatcaaaaatgattataaaagaggctcatctctgacatcattccaaaaatacattcattgatctctttttaagaaacatctgttattcactgggcattgggactttttgtgagtaatttgaattgaaattttatgagctatccaagaattctgtatggtctattattttcaagtcaaaatttccagtaaggatt

SEQ ID NO: 633 - DNA, 4542 bp, Homo sapiens
ccctttcttctcttccagggctccgctttatttgctctcagaagtcggtttcctttccttttcttcagtgaatcggagctcagagcgttgcttcggtttccctccagacaggcaattaggaatctgaaataaacaggaaagcactatgtcttcaatgtggtctgaatatacaattggtggggtgaagatttactttccttataaagcttacccgtcacagcttgctatgatgaattctattctcagaggattaaacagcaagcaacattgtttgttggagagtsccacaggaagtggaaaaagcttagccttactttgttctgctttagcatggcaacaatctcttagtgggaaaccagcagatgagggcgtaagtgaaaaagctgaagtacaattgtcatgttgttgtgcatgccattcaaaggattttacaaacaatgacatgaaccaaggaacttcacgtcatttcaactatccaagcacaccaccttctgaaagaaatggcacttcatcaacttgtcaagactcccctgaaaaaaccactctggctgcaaagttatctgctaagaaacaggcatccatatacagagatgaaaatgatgattttcaagtagagaagaaaagaattcgacccttagaaactacacagcagattagaaaaygtcattgctttggaacagaagtacacaatttggatgcaaaagttgattcaggaaagactgtaaaactcaactctccactggaaaagataaactccttttcgccacagaaaccccctggccactgttctaggtgctgttgttctactaaacaaggaaacagtcaagagtcatcgaataccattaagaaggatcatacagggaaatccaagatacccaaaatatattttgggacacgcacacacaagcagattgctcagattactagagagctccggaggacggcatattcaggggttccaatgrctattctttccagcagggatcatacttgtgtccatcctgaggtagtcggtaacttcaacagaaatgagaagtgcatggaattgctagatgggaaaaacggaaaatcctgctatttttatcatggagttcataaaattagtgatcagcacacattacagactttccaagggatgtgcaaagcctgggatatagaagaacttgtcagcctggggaagaaactaaaggcctgtccatattacacagcccgagaactaatacaagatgctgacatcatattttgtccctacaactatcttctagatgcacaaataagggaaagtatggatttaaatctgaaagaacaggttgtcattttagatgaagctcataacatcgaggactgtgctcgggaatcagcaagttacagtgtaacagaagttcagcttcggtttgctcgggatgaactagatagtatggtcaacaataatataaggaagaaagatcatgaacccctacgagctgtgtgctgtagcctcattaattggttagaagcaaacgctgaatatcttgtagaaagagattatgaatcagcttgtaaaatatggagtggaaatgaaatgctcttaactttacacaaaatgggtatcaccactgctacttttcccattttgcagggacatttttctgctgttcttcaaaaagaggaaaaaatctcaccaatttatggtaaagaggaggcaagagaagtacctgttattagtgcatcaactcaaataatgcttaaaggactttttatggtacttgactatctttttaggcaaaatagcagatttgcagatgattataaaattgcgattcaacagacttactcctggacaaatcagattgatatttcagacaaaaatgggttgttggttctaccaaaaaataagaaacgttcacgacagaaaactgcagttcatgtgctaaacttttggtgcttaaatccagctgtggccttttcagatattaatggcaaagttcagaccattgttttgacatctggtacattatcaccaatgaaatccttttcgtcagaacttggtgttacatttactatccagctggaggctaatcatatcattaaaaattcacaggtttgggttggtaccattgggtcaggccccaagggtcggaatctctgtgctaccttccagaatactgaaacatttgagttccaagatgaagtgggagcacttttgttatctgtgtgccagactgtgagccaaggaattttgtgtttcttgccatcttacaagttattagaaaaattaaaagaacgttggctctctactggtttatggcataatctggagttggtgaagacagtcattgtagaaccacagggaggagaaaaaacaaattttgatgaattactgcaggtgtactatgacgcaatcaaatacaaaggagagaaagatggagctctcctggtagcagtttgtcgtggtaaagtgagtgagggtctggatttctcagatgacaatgcccgtgctgtcataacaataggaattccttttccaaatgtgaaagatctacaggttgaactaaaacgacaatacaatgaccaccattcaaaattgagaggtcttctacctggccgtcagtggtatgaaattcaagcatacagggccttaaaccaggcccttggtagatgtattagacacagaaatgattggggagctcttattctagtggatgatcgctttaggaataacccaagtcgctatatatctggactttctaaatgggtacggcagcagattcagcaccattcaacctttgaaagtgcactggartccttggctgaattttccaaaaagcatcaaaaagttcttaatgtatccataaaggacagaaccaatatacaggacaatgagtctacacttgaagtgacctctttaaagtacagtaccycaccttatttactggaagcagcaagtcatctatcaccagaaaattttgtggaagatgaagcaaagatatgtgtccaggaactacagtgtcctaaaattattaccaaaaattcacctctaccaagtagcattatctccagaaaggagaaaaatgatccagtattcctggaagaagcagggaaagcagaaaaaattgtgatttccagatccacaagcccaactttcaacaaacaaacaaagagagttagctggtcaagctttaattctttgggacagtattttactggtaaaataccgaaggcaacacctgagctcgggtcatcagagaatagtgcctctagtcctccccgtttcaaaacagagaagatggaaagtaaaactgttttgcccttcactgataaatgtgaatcctcaaatctgacagtaaacacatcgtttggatcatgccctcaatcagaaaccattatttcatcattaaagattgatgccacccttactagaaaaaatcattctgaacatccgctctgttctgaagaagccctggatccagacattgaattgtctctagtaagtgaagaakataaacagtccacttcaaatagagattttgaaacagaagcagaagatgaatctatctattttacacctgaactttaygatcctgaagatacagatgaagaaaaaaatgacctagctgaaactgayagaggaaatagattggctaacaattcagattgcattttagctaaagacctttttgaaattagaactataaaagaagtagattcagccagagaagtgaaagctgaggattgcatagatacaaagttgaatggaattctgcatattgaagaaagtaaaattgatgacattgatggtaatgtaaaaacaacttggataaatgaactggaactgggaaaaactcatgaaatagaaataaagaactttaaaccatctccttccaaaaataaaggcatgtttcctggttttaagtaataatacttaactctcaagctaagtaaaaatatgtcatcatgcttatgttaaactctgttgtaagtaataatttgtaaattgaataagtggcatactttttaaaaaactattttatgttcagaaatgtaaatgttattattcttgagtttttgggtttytttttttgagacagagtcttggtctgttgcccaggctggaatgcagtggtgtgctctgggctcactgcaaccttcacctccaggttcaagtgattctcctgcctcagccttctgagtagctgggactacaggtgtgcaccaccatgcccagctagtttttgtatttttagtagagatggggtttcaccatgttggccaggctggtctcgaactcctggcctcgtgatctgcccttctctgcctccctaagttgctgggattacaggtgtgagccacagtgcctggcccattcttgagttttgataaagtaattcatacaaagtaytgtcctcaaataagtcttccttagctaaatgcaatttaaaattattcaaagatcctagggcacttctagtttcacgtaaatattcatattaagagatcaccatttgtcttgaaaggtttatttcgttattaaactgcctacttataagtaattaagagaaatta

SEQ ID NO: 634 - DNA, 5320 bp, Homo sapiens
ccctttcttctcttccagggctccgctttatttgctctcagaagtcggtttcctttccttttcttcagtgaatcggagctcagagcgttgcttcggtttccctccagacagttaggaatctgaaataaacaggaaagcactatgtcttcaatgtggtctgaatatacaattggtggggtgaagatttactttccttataaagcttacccgtcacagcttgctatgatgaattctattctcagaggattaaacagcaagcaacattgtttgttggagagtsccacaggaagtggaaaaagcttagccttactttgttctgctttagcatggcaacaatctcttagtgggaaaccagcagatgagggcgtaagtgaaaaagctgaagtacaattgtcatgttgttgtgcatgccattcaaaggattttacaaacaatgacatgaaccaaggaacttcacgtcatttcaactatccaagcacaccaccttctgaaagaaatggcacttcatcaacttgtcaagactcccctgaaaaaaccactctggctgcaaagttatctgctaagaaacaggcatccatatacagagatgaaaatgatgattttcaagtagagaagaaaagaattcgacccttagaaactacacagcagattagaaaaygtcattgctttggaacagaagtacacaatttggatgcaaaagttgattcaggaaagactgtaaaactcaactctccactggaaaagataaactccttttcgccacagaaaccccctggccactgttctaggtgctgttgttctactaaacaaggaaacagtcaagagtcatcgaataccattaagaaggatcatacagggaaatccaagatacccaaaatatattttgggacacgcacacacaagcagattgctcagattactagagagctccggaggacggcatattcaggggttccaatgrctattctttccagcagggatcatacttgtgtccatcctgaggtagtcggtaacttcaacagaaatgagaagtgcatggaattgctagatgggaaaaacggaaaatcctgctatttttatcatggagttcataaaattagtgatcagcacacattacagactttccaagggatgtgcaaagcctgggatatagaagaacttgtcagcctggggaagaaactaaaggcctgtccatattacacagcccgagaactaatacaagatgctgacatcatattttgtccctacaactatcttctagatgcacaaataagggaaagtatggatttaaatctgaaagaacaggttgtcattttagatgaagctcataacatcgaggactgtgctcgggaatcagcaagttacagtgtaacagaagttcagcttcggtttgctcgggatgaactagatagtatggtcaacaataatataaggaagaaagatcatgaacccctacgagctgtgtgctgtagcctcattaattggttagaagcaaacgctgaatatcttgtagaaagagattatgaatcagcttgtaaaatatggagtggaaatgaaatgctcttaactttacacaaaatgggtatcaccactgctacttttcccattttgcagggacatttttctgctgttcttcaaaaagaggaaaaaatctcaccaatttatggtaaagaggaggcaagagaagtacctgttattagtgcatcaactcaaataatgcttaaaggactttttatggtacttgactatctttttaggcaaaatagcagatttgcagatgattataaaattgcgattcaacagacttactcctggacaaatcagattgatatttcagacaaaaatgggttgttggttctaccaaaaaataagaaacgttcacgacagaaaactgcagttcatgtgctaaacttttggtgcttaaatccagctgtggccttttcagatattaatggcaaagttcagaccattgttttgacatctggtacattatcaccaatgaaatccttttcgtcagaacttggtgttacatttactatccagctggaggctaatcatatcattaaaaattcacaggtttgggttggtaccattgggtcaggccccaagggtcggaatctctgtgctaccttccagaatactgaaacatttgagttccaagatgaagtgggagcacttttgttatctgtgtgccagactgtgagccaaggaattttgtgtttcttgccatcttacaagttattagaaaaattaaaagaacgttggctctctactggtttatggcataatctggagttggtgaagacagtcattgtagaaccacagggaggagaaaaaacaaattttgatgaattactgcaggtgtactatgacgcaatcaaatacaaaggagagaaagatggagctctcctggtagcagtttgtcgtggtaaagtgagtgagggtctggatttctcagatgacaatgcccgtgctgtcataacaataggaattccttttccaaatgtgaaagatctacaggttgaactaaaacgacaatacaatgaccaccattcaaaattgagaggtcttctacctggccgtcagtggtatgaaattcaagcatacagggccttaaaccaggcccttggtagatgtattagacacagaaatgattggggagctcttattctagtggatgatcgctttaggaataacccaagtcgctatatatctggactttctaaatgggtacggcagcagattcagcaccattcaacctttgaaagtgcactggartccttggctgaattttccaaaaagcatcaaaaagttcttaatgtatccataaaggacagaaccaatatacaggacaatgagtctacacttgaagtgacctctttaaagtacagtaccycaccttatttactggaagcagcaagtcatctatcaccagaaaattttgtggaagatgaagcaaagatatgtgtccaggaactacagtgtcctaaaattattaccaaaaattcacctctaccaagtagcattatctccagaaaggagaaaaatgatccagtattcctggaagaagcagggaaagcagaaaaaattgtgatttccagatccacaagcccaactttcaacaaacaaacaaagagagttagctggtcaagctttaattctttgggacagtattttactggtaaaataccgaaggcaacacctgagctcgggtcatcagagaatagtgcctctagtcctccccgtttcaaaacagagaagatggaaagtaaaactgttttgcccttcactgataaatgtgaatcctcaaatctgacagtaaacacatcgtttggatcatgccctcaatcagaaaccattatttcatcattaaagattgatgccacccttactagaaaaaatcattctgaacatccgctctgttctgaagaagccctggatccagacattgaattgtctctagtaagtgaagaakataaacagtccacttcaaatagagattttgaaacagaagcagaagatgaatctatctattttacacctgaactttaygatcctgaagatacagatgaagaaaaaaatgacctagctgaaactgayagaggaaatagattggctaacaattcagattgcattttagctaaagacctttttgaaattagaactataaaagaagtagattcagccagagaagtgaaagctgaggattgcatagatacaaagttgaatggaattctgcatattgaagaaagtaaaattgatgacattgatggtaatgtaaaaacaacttggataaatgaactggaactgggaaaaactcatgaaatagaaataaagaactttaaaccatctccttccaaaaataaaggcatgtttcctggttttaagtaataatacttaactctcaagctaagtaaaaatatgtcatcatgcttatgttaaactctgttgtaagtaataatttgtaaattgaataagtggcatactttttaaaaaactattttatgttcagaaatgtaaatgttattattcttgagtttttgggtttytttttttgagacagagtcttggtctgttgcccaggctggaatgcagtggtgtgctctgggctcactgcaaccttcacctccaggttcaagtgattctcctgcctcagccttctgagtagctgggactacaggtgtgcaccaccatgcccagctagtttttgtatttttagtagagatggggtttcaccatgttggccaggctggtctcgaactcctggcctcgtgatctgcccttctctgcctccctaagttgctgggattacaggtgtgagccacagtgcctggcccattcttgagttttgataaagtaattcatacaaagtaytgtcctcaaataagtcttccttagctaaatgcaatttaaaattattcaaagatcctagggcacttctagtttcacgtaaatattcatattaggtggttctcttcatccatttgttttcacactgatacataaaaattaacagcagtctaatctagtgacacctcagtcatatttcgctatagattttacctcaaatcagtccaagactttttcagagatcaccatttgtcttgaaaggtttatttcgttattaaactgcctacttataagtaattaagagaaattaagaaagtagtatgcatttttaattgaaattgttttacattctttgtataataaacctaaaaccaaacatgtcataaacaaattgacgtaaagatataaaatgccaaatgaagtattccaaattttctattctaattatttagcttcaccatcattgtggaaaaaaatactagatcctgcttagtattatatatttttcctagtggatcagtgagtaataagtaccaaacactagactagaaggtaatttctacattgtttagaaagggtgaaacaatttatcccctctggtattgttctagcataagctttagttatacaatgattaagatagaaaacttcatatataaatttgataagcaaacccacatttatagctgcagctaaaatatgtttccttagggcacagtaatcctttctgtgaattttgaccttgtttgtgtttttgtgaatgaagctatatgtctaatcaaaaatgattataaaagaggctcatctctgacatcattccaaaaatacattcattgatctctttttaagaaacatctgttattcactgggcattgggactttttgtgagtaatttgaattgaaattttatgagctatccaagaattctgtatggtctattattttcaagtcaaaatttccagtaaggatt

SEQ ID NO: 635 - DNA, 699 bp, Homo sapiens
aaggacattttatttccttatattgaagaaaatgttagagtatctgcagacatattgggcagaagaggagtgcccgcaggatatcaatctcttgaggaaacaagctgaagaggatggggctgttcctatccctgcagcaggaagatatgcggcctgggaatggagtggatgatctgcaacagatgatccaggccgtggtagataaggtgtgctggcagatgtccctggacggaaagaccaccatgttcaaacagctgcaggaccacacgtgaagggcagcattcacagctcggcccatgaaagcggagttctttgcagatgtgtttccagcagtcaggaagtggaaagaggctggaatgaaggtgtatatctattcctctgggagtgtagaggcacagaaactgttattcgggcagtctgcgaagggaaagattcttgagcttgttgatggtccctttgataccaagattggacacaaagtagagaatgaaagttatcaaaggattgcagactgcactgggggctcaaccaacaacaytttgtttctgacagatgttactcaagaggccagtgctgctgaggaagcagatgtgcacgtagcggtggtggtgagacttggagacataattgaaagatgatgagaagacttactacagcctcatcacatccttcagcaaactgtacctgccctcctcaacc

SEQ ID NO: 636 - DNA, 3118 bp, Homo sapiens
cgcgtccatttgaacgtctcgcacgccttcctgccattagcactcgagcccgctgctgttgcccgttcttcctccrgaataggggagggagagggaatgagaagctgctgcggcccaagagtcactgtgaaggaccccgccgctgccctcgggcctcctcggcccctgcgcctccggggagcagccggggctcgccgcgcctgacgcgtcccgagttatacagaaataatgttgatatttggaacccatgtcgaacttctatgaagaaaggacaacgatgattgcagccagggatttgcaggaatttgttccttttggtggagaccactgcaagcaccaccctaatgctttgaaccttcaacttcgccagctgcagccagcttctgaattatggtcttctratggtgctgctggcttggtgggatcccttcaggaggttacaatccacgagaaacagaaggaaagctggcagttaaggaaaggagtaagtgaaattggagaagatgtggactatgatgaggaactctatgttgctggaaatatggtgatatggagcaaaggaagtaaaagccaggcattggcagtttataaagcatttacagttgacagtcctgttcagcaggcaytgtggtgtgacttcattatatcacaggataagtctgaaaaggcctacagtagcaatgaagtagaaaaatgcatatgtatattgcaaagctcatgtattaacatgcatagcatagaaggaaaggattacatagcttcattaccatttcaggttgcaaatgtttggcccactaaatatggattgytgtttgaacgaagcgcttcttcacatgaagtacctccaggttcacccagagaacctttacctactatgttcagcatgctgcacccactagatgaaataactccacttgtttgtaaatctggaagtctttttggttcatcacgggtgcaatatgttgtagatcatgcaatgaaaattgttttcctcaatactgacccctctattgtaatgacttatgatgctgttcaaaatgtgcattctgtgtggactctccggagagtcaaatcagaggaagagaatgttgttttaaagttctctgaacaggggggaaccccacagaatgtggccactagcagctccctcacagcacatctcagaagcctctccaaaggagattcccctgtgatttcacctttccggaattactcctccattcacagccagagtcgctcaacctcatcacccagtctacattctcgctcaccttctatttccaacatggcagctctaagtcgtgctcattctcctgcgttaggagtgcactctttttcaggggtgcaaaggttcaacatttcaagccataatcagtctccaaagagacatagtatttctcattctccaaatagtaaktctaatggctyctttcttgcaccagaaacggagccaattgttcctgaactgtgtattgaccatttgtggacagaaacgattactaatataagagagaaaaattcacaagcctcaaaagtgtttattacatctgacctatgtgggcaaaagttcctgtgctttttagtagagtcccagctccagttacgctgtgtaaagtttcaagagagtaatgataaaacccagctcatctttggttcagtgaccaacataccagcaaaggatgcagcaccagtggagaaaatagacaccatgctggtcttggaaggcagtggaaacctggtgctatacacaggagtggttcgggtgggaaaggtttttattcctggactgccagctccctctctgacgatgtccaacacaatgcctcggcccagtactccactagatggcgttagtactccaaagcctcttagtaaactccttggatcattggacgaggttgttctgttgtccccagttccagaactgagggattcttcaaaacttcatgattctctctataatgaggattgtactttccaacagcttggaacttacattcattctatcagagatcctgtccataacagagtcaccctggaactgagtaatggctccatggttaggatcactattcctgaaattgccacctctgagttagtacaaacgtgtttgcaagcaattaagtttatcctgccaaaagaaatagcagttcagatgcttgtcaagtggtacaatgtccacagtgctccaggaggacccagttatcactcagagtggaatttatttgtgacttgtctcatgaacatgatgggttataacacagaccgcttagcatggactagaaattttgactttgaaggatcactttctcctgtcattgcgcccaaaaaagcaaggccttcygagactggatctgatgatgactgggaatatttactaaattcagactaccaccagartgttgagtctcatcttttgaacagatctttatgtctgagtccttcagaagcttcacagatgaaggatgaggatttttcacagaatctcagtctggattcttctacacttctctttactcacatacctgcaatttttttcgttcttcaccttgtgtatgaggagcttaagttgaatactctaatgggagaaggaatttgttcactygttgaacttctcgttcagttggcaagggacttaaaattggggccttatgtagatcattactatagagactacccaacgcttgtcagaactactggacaagtgtgcacaattgatccaggtcaaacaggatttatgcatcatccatcattttttacrtctgagccaccaagtatttatcagtgggtgagttcttgtctgaagggygaaggaatgccrccttatccttacctccctggaatctgtgaaagaagcagacttgtagtcttgagtattgcactgtacatacttggtgatgagagcttggtttctgatgaatcctcacagtatttaaccagaataactatagccccccagaagttgcaagtagaacaagaggaaaacaggtttagtttcaggcattctacatctgtttctagtctagctgaaagattggttgtctggatgactaatgtaggattcactttaagagatttggaaactcttccctttggaattgctcttcccatcagagat

SEQ ID NO: 637 - DNA, 5923 bp, Homo sapiens
tgtgctggagaagagaaacgagttggcacacgcacagtgtttgttggcaatcatccagtttcggaaacagaagcttacattgcacaaagattttgtgataatagaatagtctcatctaagtatacactttggaattttctcccaaagaatctgtttgaacagtttagaagaattgcaaatttttattttctcataatcttccttgtacaggtcacagtagacacaccaactagcccagttaccagtggacttccacttttctttgttataactgttacagccatcaagcagggatatgaggattgkctgagacacagagctgacaatgaagtcaacaaaagcactgtttacattattgaaaatgcaaagcgagtgagaaaagaaagtgaaaaaatcaaggttggtgatgtagtagaagtacaggcagatgaaacctttccctgtgatcttattcttctatcatcttgcaccactgatggaacctgttatgtcactacagccagtcttgatggggaatccaattgcaagacacattatgcagtacgtgataccattgcactgtgtacagcagaatccatcgataccctccgagcagcaattgaatgtgaacagcctcaacctgacctctacaagtctttgggacctgaaaatctcttgctgaaaggagctacgctaaaaaataccgagaagatatatggagttgctgtttacactggaatggaaaccaaaatggctttgaactaccaagggaaatctcagaaacgttctgctgttgaaaaatctattaatgctttcctgattgtatatttatttatcttactgaccaaagctgcagtatgcactactctaaagtatgtttggcaaagtaccccatacaatgatgaaccttggtataaccaaaagactcagaaagagcgagagaccttgaaggttttaaaaatgttcaccgacttcctatcatttatggttctattcaactttatcattcctgtctccatgtacgtcacagtagaaatgcagaaattcttgggctccttcttcatctcatgggataaggacttttatgatgaagaaattaatgaaggagccctggttaacacatcagaccttaatgaagaacttggtcaggtggattatgtatttacagataagactggaacactcactgaaaacagcatggaattcattgaatgctgcatagatggccacaaatataaaggtgtaactcaagaggttgatggattatctcaaactgatggaactttaacatattttgacaaagtagataagaatcgagaagagctgtttctacgtgccttgtgtttatgtcatactgtagaaatcaaaacaaacgatgctgttgatggagctacagaatcagctgaattaacctatatctcctcttcaccagatgaaatagctttggtgaaaggagctaaaaggtacgggttcacatttttaggaaatcgaaatggatatatgagagtagagaaccaaagaaaagaaatagaagaatatgaacttcttcacaccttaaactttgatgctgtccggcgacgtatgagygtaattgtgaagactcaagaaggagacatacttctcttttgtaaaggagcagactcggcagtttttcccagagtgcaaaatcatgaaattgagttaactaaagtccatgtggaacgtaatgcaatggatgggtatcggacactctgtgtagccttcaaagaaattgctccagatgattatgaaagaattaacagacagctcatagaggcaaaaatggccttacaagacagagaagaaaaaatggaaaaagttttcgatgatattgagacaaacatgaatttaattggagccactgcagttgaagacaagctacaagatcaagctgcagagaccattgaagctctgcatgcagcaggcctgaaagtctgggtgctcactggggacaagatggagacagctaaatccacatgctatgcctgccgccttttccagaccaacactgagctcttagaactaaccacaaaaaccattgaagaaagtgaaaggaaagaagatcgattacatgaattattgatagaatatcgcaagaaattgctgcatgagtttcctaaaagtactagaagctttaaaaaagcatggacagaacatcaggaatatggattaatcatagatggctccacattgtcactcatactaaattctagtcaagactctagttcaaacaattacaaaagcattttcctacaaatatgtatgaagtgtactgcagtgctctgctgtcggatggcaccattacagaaagcccagattgtcagaatggtgaagaatttaaaaggcagcccaataactctgtcgataggtgatggtgccaatgatgttagtatgatcttggaatcccatgtgggaataggtattaaaggcaaagaaggtcgccaagcagctaggaatagcgattattctgttccaaagtttaaacacttaaagaaactgctgttggctcatggacatctatattatgtgagaatagcacaccttgtacagtacttcttctataagaacctttgtttcattttgccacagtttttgtaccagttcttctgtggattctcacaacagccactgtatgatgctgcttaccttacaatgtacaatatctgcttcacatccttgcccatcctggcctatagtctactggaacagcacatcaacattgacactctgacctcagatccccgattgtatatgaaaatttctggcaatgccatgctacagttgggccccttcttatattggacatttctggctgcctttgaagggacagtgttcttctttgggacttactttctttttcagactgcatccctagaagaaaatggaaaggtatacggaaactggacttttggaaccattgtttttacagtcttagtattcactgtaaccctgaagcttgccttggatacccgattctggacgtggataaatcactttgtgatttggggttctttagccttctatgtatttttctcattcttctggggaggaattatttggccttttctcaagcaacagagaatgtattttgtatttgcccaaatgctgtcttctgtatccacatggttggctataattcttctaatatttatcagcctgttccctgagattcttctgatagtattaaagaatgtaagaagaagaagtgccaggagaaatctgagctgtagaagggcatctgactcattatccgccagaccttcagtcagacctcttcttttacgaacattctcagacgaatctaatgtattgtaacagaatccgaatcttgaactgcctatgttattgtcctacaagcatactgacagtggttacagctaaaaaagaaagcatgaagaaacaactacaaaaagttatcatctcaggatacttgataygcaacacactaaaccactctcatgtctagagttcacaataaatgttcattaaaataccaaatgattctcttaagcatttaccattattgtaagtagcctttatggccaaagctgtaagttaagaattatatgaaagttgaaagcaagaatacttagaattctggctttagttagagtaatataactcaaatgggtgctcttttaacccatgaactttgtgaatggatttaaatacaatagtatgaagtagaagttatgcaatgagaatgaatagattttgctaatactactttttttgcctggcagaagaaatagactatttggatcacatttctcattcctcctaaatgatcatcttaattttttttcccaagtacataaggaatacttgaaaatacagaataactaaatagtatcaatgcatcagacagaatagttaatcccttctgtttacccatgtgctactaatgtcttggtagaatattcttgccaaaaaaataccttgaacgcttatgtggaaagtgttaacttacgggtatttttgtgggaatagaaaaaaattgtttattttttattcttctgaattaaaccccacttatgggtgtaagcctactagacttgaaaataaagtataaaacatttccaatcacttagtagcccctcaaagtagttagaaaataaacagatttttccagtgttgattttactgggatctgcagtaaggtggtttaaaccatagttatataaaaataaaggtcattctgaatatcagccttttataattttatgtgaagaggaagaaatatagcttattttaaacttttgacggtttttatttgaaagagattgcatttatgcatatatgcagtgctttttcttaaacttggccaatttggaaagggggaaggagccaccccaaaacggtggttcagcttgtagagccatgactctgtgaagatgaatgttgtctcttaacttggacagggaaatggtctaactctaaaccatgtaactgaccttagtaaagtccttgactaactgaactagaaggaaggtttagccttctaattagttcacttgaaacataaatgtgaaatgtcttcattcaatgttaaacacatacttttttggatataaatgaccatatttatttgactgctagtttttttgttttttttttgtctttctggcatgcctgtactattattaatgtttatattgtaccttgatttggaaaagtattggagttaatctgtattatatttatatagtccatatggcacatttgattcttccacatatattttgtgttaatgtttaggtatgatttttttctaaattctagaaaagaacataatttcagttatcagaagccattccatcattatagaccctttttcattatttcatttgctctcatatatcagtattatttttgagcattttgttacatgtcattcacaacttacctaagtgtgctgtgttctggtagcccgtatttgaggtaagctgctgaaaacaaaagtctctatattctttgcctattccaaagagctaaaaaagtctaacccaggaaagcttttgatattttgtgtttgttttcttgttcttatggttgttgttgctgtattatgattgctgttttacataaaatctatgggaactgtgaatacagacaagagagccacagtagagaggcttgtttaatgcagtaccattggagagttaacagaataatctagtagaaaaataactggttgcatgtaaaattccttccagccagaaagaaagaaagacaaggagtaagggggatttagagttatgtctcagctacacattacattgtgatactgcagctcaaattcagaatggcaatgatacatgatatcatggcctagatccttgagagggacctggctttcctttttaaaagatattttactgaagagctaaaaactggccagtgtggggttagcagatcgaataacttgaaatagaccrtgcagtattcctagcactcaatgtaatcaccctatttgtgacagagaaagggaaaaaaatataataagatcatctacctataatttgaataattttgagctatcaaaatgtctttgtaattttcacaaccgctgtccattgtttgaggatgttacctactaaactgaaaacattcattccatatctacttacacatacaccagcaacagtataaatgtaagcctaactttgcaaaattcgtaataatttagtgatggaattttttaataacatgcagtatataaatgtgcagattttatgcgtgttgacaaaatcatttttcagcttgcaaaatgggactgcaatattacatttttcacttaagcagttttttacatctacgttgttgctttctaaaatgaatgtgaatgccatcttttatgactgcaacttgccttttccattacagaaatttttgtttgatgtaatcaataaactttggtatgata

SEQ ID NO: 638 - DNA, 2850 bp, Homo sapiens
atgtttcaccagtgggtttatttcattcttcttactcctactattcttgctctgggcctggccctcatcatctttcatcttgagtgtgctggagaagagaaacgagttggcacacgcacagtgtttgttggcaatcatccagtttcggaaacagaagcttacattgcacaaagattttgtgataatagaatagtctcatctaagtatacactttggaattttctcccaaagaatctgtttgaacagtttagaagaattgcaaatttttattttctcataatcttccttgtacaggtcacagtagacacaccaactagcccagttaccagtggacttccacttttctttgttataactgttacagccatcaagcagggatatgaggattgkctgagacacagagctgacaatgaagtcaacaaaagcactgtttacattattgaaaatgcaaagcgagtgagaaaagaaagtgaaaaaatcaaggttggtgatgtagtagaagtacaggcagatgaaacctttccctgtgatcttattcttctatcatcttgcaccactgatggaacctgttatgtcactacagccagtcttgatggggaatccaattgcaagacacattatgcagtacgtgataccattgcactgtgtacagcagaatccatcgataccctccgagcagcaattgaatgtgaacagcctcaacctgacctctacaaatctattaatgctttcctgattgtatatttatttatcttactgaccaaagctgcagtatgcactactctaaagtatgtttggcaaagtaccccatacaatgatgaaccttggtataaccaaaagactcagaaagagcgagagaccttgaaggttttaaaaatgttcaccgacttcctatcatttatggttctattcaactttatcattcctgtctccatgtacgtcacagtagaaatgcagaaattcttgggctccttcttcatctcatgggataaggacttttatgatgaagaaattaatgaaggagccctggttaacacatcagaccttaatgaagaacttggtcaggtggattatgtatttacagataagactggaacactcactgaaaacagcatggaattcattgaatgctgcatagatggccacaaatataaaggtgtaactcaagaggttgatggattatctcaaactgatggaactttaacatattttgacaaagtagataagaatcgagaagagctgtttctacgtgccttgtgtttatgtcatactgtagaaatcaaaacaaacgatgctgttgatggagctacagaatcagctgaattaacctatatctcctcttcaccagatgaaatagctttggtgaaaggagctaaaagatatgaacttcttcacaccttaaactttgatgctgtccggcgacgtatgagygtaattgtgaagactcaagaaggagacatacttctcttttgtaaaggagcagactcggcagtttttcccagagtgcaaaatcatgaaattgagttaactaaagtccatgtggaacgtaatgcaatggatgggtatcggacactctgtgtagccttcaaagaaattgctccagatgattatgaaagaattaacagacagctcatagaggcaaaaatggccttacaagacagagaagaaaaaatggaaaaagttttcgatgatattgagacaaacatgaatttaattggagccactgcagttgaagacaagctacaagatcaagctgcagagaccattgaagctctgcatgcagcaggcctgaaagtctgggtgctcactggggacaagatggagacagctaaatccacatgctatgcctgccgccttttccagaccaacactgagctcttagaactaaccacaaaaaccattgaagaaagtgaaaggaaagaagatcgattacatgaattattgatagaatatcgcaagaaattgctgcatgagtttcctaaaagtactagaagctttaaaaaagcatggacagaacatcaggaatatggattaatcatagatggctccacattgtcactcatactaaattctagtcaagactctagttcaaacaattacaaaagcattttcctacaaatatgtatgaagtgtactgcagtgctctgctgtcggatggcaccattacagaaagcccagattgtcagaatggtgaagaatttaaaaggcagcccaataactctgtcgataggtgatggtgccaatgatgttagtatgatcttggaatcccatgtgggaataggtattaaaggcaaagaaggtcgccaagcagctaggaatagcgattattctgttccaaagtttaaacacttaaagaaactgctgttggctcatggacatctatattatgtgagaatagcacaccttgtacagtacttcttctataagccactgtatgatgctgcttaccttacaatgtacaatatctgcttcacatccttgcccatcctggcctatagtctactggaacagcacatcaacattgacactctgacctcagatccccgattgtatatgaaaatttctggcaatgccatgctacagttgggccccttcttatattggacatttctggctgcctttgaagggacagtgttcttctttgggacttactttctttttcagactgcatccctagaagaaaatggaaagcttatctgcccccaccagctaggtctccttttgccatcatcttcctggctgccattgcctgaggacttggggcttgggcctcctagatattaccattacttcattccttgcccattccccagtactgagatatctgcagccctacacctactagctact

SEQ ID NO: 639 - DNA, 1410 bp, Homo sapiens
atgcccagtccctcagccaatgagaaccaggtacgggagaattattcaagtctcatcctcacctgcaaactcctatctctgctgtgtaccctggacaccaggctgtatagtgtggatttggtggatatgaataggctcctgagtttacactcaaattacctgctgggcctagaggcaaatctgaagaataagggagaaaggaacccagtacttactacatcctcactgaagttaagttgttatcagcttaaaatagtcaattataagatggacttttgggtggagccttctggaaaggtggcagtggtacagggggctgaggtgaaagtggatggcagcaagccaaaactgagcaagaatgagctgaagagatccctgaaagccaagaagaaagtggcagagaaggaggccaagcaggaagaactcactgctgtcaccaaccataccactgacagtggtgtgggtactgaggagaagagcytggacccaaatcaacactacaagatccatagtcaggcagtttatcaastgaatgtcaatggggaacacccatacccacacaagttccatgcagacatctcattcaatgacttcatccaagaatatagtcaccagcagcctgggggtcacctgaatgatgtcaccttaaaggtggcaggtaggatccatgctaaaagagcttctgagggaaagttcatcttctatgaccttcaaggagagggggtcaagttgcaagtcatggtgaatcccagaaattataaatcagaagaatttattcatattagtaagaaactgcatcaaggagacataattggagttcaggggaaccctgggaaaaccaagaaggctgtggccaagcttttcatcacttatgacaatgcgctggacatgagaattgctccggaactctatcataagatgctagtggttggtggcaccaagcagatttatgaaactggatgccagttccagaatgaagggattgatttgaggcacaatcctgagttcaccacctgcgagttctatatggcctatgcagactaccacaatctcttggaaatcacagagaagatggtttcagggatggtaaagcatattacaggcagttacaagaagaacttgagaaagccctggggggtaaagctgccagaaactaacctctttgaaactgatgaaacttgcaaacttcttaatgatatctgtgtggcaaaagctgttgaatgccctctaccttggaccacagccaggctccttgacaagcttgcatgggcattgaccaagtcaccatttttctcaaaagattccaacaacatcaaggaagtacttctatttcctgctataaaacccaaagacaaggagaatgtagcaaccactgatatgctggaaagcacaacagctggcacttctgtc

SEQ ID NO: 640 - DNA, 2486 bp, Homo sapiens
cggcgtggggcgcgacttccggggcggcggttgcatcagattctaggaagtgtctgtagccgcagctgcgggtccgggattcccagccatggcagattcctccgggcagcagggcaaaggccggcgtgtgcagccccagtggtcccctcctgctgggacccagccatgcagactccacctttacaacagcctcaccaggaacaaggaagtgttcatacctcaagatgggaaaaaggtgacgtggtattgctgtgggccaaccgtctatgacgcatctcacatggggcaygccaggtcctacatctcttttgatatcttgagaagagtgttgaaggattacttcaaatttgatgtcttttattgcatgaacattacggatattgatgacaagatcatcaagagggcccggcagaaccacctgttygagcagtatcgggagaagaggcctgaagcggcacagctcttggaggatgttcaggccgccctgaagccattttcagtaaaattaaatgagaccacggatcccrataaaaagcagatgctcgaacggattcagcackcagtgcagcttgccacagagccacttgagaaagctgtgcagtccagactcacgggagaggaagtcaacagctgtgtggaggtgttgctggaagaagccaaggatttgctctctgactggctggattctacacttggctgtgatgtcactgacaattccatcttctccaagctgcccaagttctgggagggggacttccacagagacatggaagctctgaatgttctccctccagatgtcttaacccgggttagtgagtatgtgccagaaattgtgaactttgtccagaagattgtggacaacggttacggctatgtctccaatgggtctgtctactttgatacagcgaagtttgcttctagcgagaagcactcctatgggaagctggtgcctgaggccgttggagatcagaaagcccttcaagaaggggaaggtgacctgagcatctctgcagaccrcctgagtgagaagcgctctcccaacgactttgccttatggaaggcctctaagcccggagaaccgtcctggccgtgcccttggggaaagggtcgtccgggctggcatatcgagtgctcggccatggcaggcaccctcctaggggcttcgatggacattcacggaggtgggttcgacctccggttcccccaccatgacaatgagctggcacagtcggaggcctactttgaaaacgactgctgggtcaggtacttcctgcacacaggccacctgaccattgcaggctgcaaaatgtcaaagtcactaaaaaacttcatcaccattaaagatgccttgaaaaagcactcagcacggcagttgcggctggccttcctcatgcactcgtggaaggacaccctggactactccagcaacaccatggagtcagcgcttcaatatgagaagttcttgaatgagtttttcttaaatgtgaaagatatccttcgcrctcctgttgacatcactggtcagtttgagaagtggggagaagaagaagcagaactgaataagaacttttatgacaagaagacagcaattcacaaagccctctgtgacaatgttgacacccgcacygtcatggaagagatgcgggccttggtcagtcagtgcaacctctatatggcagcccggaaagccgtgaggaagaggcccaaccaggctctgctggagaayatmgccctgtacctcacccatatgctgaagatctttggggccgtagaagaggacagctccctgggattcccggtcggagggcctggaaccagcctcagtctcgaggccacagtcatgccctaccttcaggtgttatcagaattccgagaaggagtgcggaagattgcccgagagcaaaaagtccctgagattctgcagctcagcgatgccctgcgggacaacatcctgccygagcttggggtgcggtttgaagaccacgaaggactgcccacagtggtgaaactggtagacagaaacaccttattaaaagagagagaagaaaagagacgggttgaagaggagaagaggaagaagaaagaggaggcggcccggaggaaacaggaacaagaagcagcaaagctggccaagatgaagattccccccagtgagatgttcttgtcagaaaccgacaaatactccaagtttgatgaaaatggtctgcccacacatgacatggagggcaaagagctcagcaaagggcaagccaagaagctgaagaagctcttcgaggctcaggagaagctctacaaggaatatctgcagatggcccagaatggaagcttccagtgagggggcacaggactgactttttaaaccattgtggactagtggctgctgtctgcctcagtgacaatgtcctaaattaagagttgtgttcatgtaggttcgtgtcgtcgttggctctgagacattgataataaatttttctcaacagtgagac

SEQ ID NO: 641 - DNA, 2530 bp, Homo sapiens
cggcgtggggcgcgacttccggggcggcggttgcatcagattctaggaagtgtctgtagccgcagctgcgggtccgggattcccagccatggcagattcctccgggcagcagggcaaaggccggcgtgtgcagccccagtggtcccctcctgctgggacccagccatgcagactccacctttacaacagcctcaccaggaacaaggaagtgttcatacctcaagatgggaaaaaggtgacgtggtattgctgtgggccaaccgtctatgacgcatctcacatggggcaygccaggtcctacatctcttttgatatcttgagaagagtgttgaaggattacttcaaatttgatgtcttttattgcatgaacattacggatattgatgacaagatcatcaagagggcccggcagaaccacctgttygagcagtatcgggagaagaggcctgaagcggcacagctcttggaggatgttcaggccgccctgaagccattttcagtaaaattaaatgagaccacggatcccrataaaaagcagatgctcgaacggattcagcackcagtgcagcttgccacagagccacttgagaaagctgtgcagtccagactcacgggagaggaagtcaacagctgtgtggaggtgttgctggaagaagccaaggatttgctctctgactggctggattctacacttggctgtgatgtcactgacaattccatcttctccaagctgcccaagttctgggagggggacttccacagagacatggaagctctgaatgttctccctccagatgtcttaacccgggttagtgagtatgtgccagaaattgtgaactttgtccagaagattgtggacaacggttacggctatgtctccaatgggtctgtctactttgatacagcgaagtttgcttctagcgagaagcactcctatgggaagctggtgcctgaggccgttggagatcagaaagcccttcaagaaggggaaggtgacctgagcatctctgcagaccrcctgagtgagaagcgctctcccaacgactttgccttatggaaggcctctaagcccggagaaccgtcctggccgtgcccttggggaaagggtcgtccgggctggcatatcgagtgctcggccatggcaggcaccctcctaggggcttcgatggacattcacggaggtgggttcgacctccggttcccccaccatgacaatgagctggcacagtcggaggcctactttgaaaacgactgctgggtcaggtacttcctgcacacaggccacctgaccattgcaggctgcaaaatgtcaaagtcactaaaaaacttcatcaccattaaagatgccttgaaaaagcactcagcacggcagttgcggctggccttcctcatgcactcgtggaaggacaccctggactactccagcaacaccatggagtcagcgcttcaatatgagaagttcttgaatgagtttttcttaaatgtgaaagatatccttcgcrctcctgttgacatcactggtcagtttgagaagtggggagaagaagaagcagaactgaataagaacttttatgacaagaagacagcaattcacaaagccctctgtgacaatgttgacacccgcacygtcatggaagagatgcgggccttggtcagtcagtgcaacctctatatggcagcccggaaagccgtgaggaagaggcccaaccaggctctgctggagaayatmgccctgtacctcacccatatgctgaagatctttggggccgtagaagaggacagctccctgggattcccggtcggagggcctggaaccagcctcagtctcgaggccacagtcatgccctaccttcaggtgttatcagaattccgagaaggagtgcggaagattgcccgagagcaaaaagtccctgagattctgcagctcagcgatgccctgcgggacaacatcctgccygagcttggggtgcggtttgaagaccacgaaggactgcccacagtggtgaaactggtagacagaaacaccttattaaaagagagagaagaaaagagacgggttgaagaggagaagaggaagaagaaagaggaggcggcccggaggaaacaggaacaagaagcagcaaagctggccaagatgaagattccccccagtgagatgttcttgtcagaaaccgacaaatactccaagtttgatgaaaatggtctgcccacacatgacatggagggcaaagagctcagcaaagggcaagccaagaagctgaagaagctcttcgaggctcaggagaagctctacaaggaatatctgcagatggcccagaatggaagcttccagtgagggggcacaggactgactttttaaaccattgtggactagtggctgctgtctgcctcagtgacaatgtcccagcgctcctatcatgtttacagtcacccttgggtcctaaattaagagttgtgttcatgtaggttcgtgtcgtcgttggctctgagacattgataataaatttttctcaacagtgagaccctctct

SEQ ID NO: 642 - DNA, 2754 bp, Homo sapiens
ggcggttgcatcagattctaggaagtgtctgtagccgcagctgcgggtccgggattcccagccatggcagattcctccgggcagcaggctcctgactacaggtccattctgagcattagtgacgaggcagccagggcacaagccctgaacgagcacctcagcacgcgtagctatgtccaggggtactcactgtcccaggcagacgtggacgcgttcaggcagctctcggccccgcccgctgacccccagctcttccacgtggctcggtggttcaggcacatagaagcgctcctgggtagcccctgtggcaaaggccagccctgcaggctccaagcaagcaaaggccggcgtgtgcagccccagtggtcccctcctgctgggacccagccatgcagactccacctttacaacagcctcaccaggaacaaggaagtgttcatacctcaagatgggaaaaaggtgacgtggtattgctgtgggccaaccgtctatgacgcatctcacatggggcaygccaggtcctacatctcttttgatatcttgagaagagtgttgaaggattacttcaaatttgatgtcttttattgcatgaacattacggatattgatgacaagatcatcaagagggcccggcagaaccacctgttygagcagtatcgggagaagaggcctgaagcggcacagctcttggaggatgttcaggccgccctgaagccattttcagtaaaattaaatgagaccacggatcccrataaaaagcagatgctcgaacggattcagcackcagtgcagcttgccacagagccacttgagaaagctgtgcagtccagactcacgggagaggaagtcaacagctgtgtggaggtgttgctggaagaagccaaggatttgctctctgactggctggattctacacttggctgtgatgtcactgacaattccatcttctccaagctgcccaagttctgggagggggacttccacagagacatggaagctctgaatgttctccctccagatgtcttaacccgggttagtgagtatgtgccagaaattgtgaactttgtccagaagattgtggacaacggttacggctatgtctccaatgggtctgtctactttgatacagcgaagtttgcttctagcgagaagcactcctatgggaagctggtgcctgaggccgttggagatcagaaagcccttcaagaaggggaaggtgacctgagcatctctgcagaccrcctgagtgagaagcgctctcccaacgactttgccttatggaaggcctctaagcccggagaaccgtcctggccgtgcccttggggaaagggtcgtccgggctggcatatcgagtgctcggccatggcaggcaccctcctaggggcttcgatggacattcacggaggtgggttcgacctccggttcccccaccatgacaatgagctggcacagtcggaggcctactttgaaaacgactgctgggtcaggtacttcctgcacacaggccacctgaccattgcaggctgcaaaatgtcaaagtcactaaaaaacttcatcaccattaaagatgccttgaaaaagcactcagcacggcagttgcggctggccttcctcatgcactcgtggaaggacaccctggactactccagcaacaccatggagtcagcgcttcaatatgagaagttcttgaatgagtttttcttaaatgtgaaagatatccttcgcrctcctgttgacatcactggtcagtttgagaagtggggagaagaagaagcagaactgaataagaacttttatgacaagaagacagcaattcacaaagccctctgtgacaatgttgacacccgcacygtcatggaagagatgcgggccttggtcagtcagtgcaacctctatatggcagcccggaaagccgtgaggaagaggcccaaccaggctctgctggagaayatmgccctgtacctcacccatatgctgaagatctttggggccgtagaagaggacagctccctgggattcccggtcggagggcctggaaccagcctcagtctcgaggccacagtcatgccctaccttcaggtgttatcagaattccgagaaggagtgcggaagattgcccgagagcaaaaagtccctgagattctgcagctcagcgatgccctgcgggacaacatcctgccygagcttggggtgcggtttgaagaccacgaaggactgcccacagtggtgaaactggtagacagaaacaccttattaaaagagagagaagaaaagagacgggttgaagaggagaagaggaagaagaaagaggaggcggcccggaggaaacaggaacaagaagcagcaaagctggccaagatgaagattccccccagtgagatgttcttgtcagaaaccgacaaatactccaagtttgatgaaaatggtctgcccacacatgacatggagggcaaagagctcagcaaagggcaagccaagaagctgaagaagctcttcgaggctcaggagaagctctacaaggaatatctgcagatggcccagaatggaagcttccagtgagggggcacaggactgactttttaaaccattgtggactagtggctgctgtctgcctcagtgacaatgtcccagcgctcctatcatgtttacagtcacccttgggtcctaaattaagagttgtgttcatgtaggttcgtgtcgtcgttggctctgagacattgataataaatttttctcaacagtgagaccctctct

SEQ ID NO: 643 - DNA, 2867 bp, Homo sapiens
gcatcagattctaggaagtgtctgtagccgcagctgcgggtccgggattcccagccatggcagattcctccggtttgcagctcctgactacaggtccattctgagcattagtgacgaggcagccagggcacaagccctgaacgagcacctcagcacgcgtagctatgtccaggggtactcactgtcccaggcagacgtggacgcgttcaggcagctctcggccccgcccgctgacccccagctcttccacgtggctcggtggttcaggcacatagaagcgctcctgggtagcccctgtggcaaaggccagccctgcaggctccaagcaagcaaaggccggcgtgtgcagccccagtggtcccctcctgctgggacccagccatgcagactccacctttacaacagcctcaccaggaacaaggaagtgttcatacctcaagatgggaaaaaggtgacgtggtattgctgtgggccaaccgtctatgacgcatctcacatggggcaygccaggtcctacatctcttttgatatcttgagaagagtgttgaaggattacttcaaatttgatgtcttttattgcatgaacattacggatattgatgacaagatcatcaagagggcccggcagaaccacctgttygagcagtatcgggagaagaggcctgaagcggcacagctcttggaggatgttcaggccgccctgaagccattttcagtaaaattaaatgagaccacggatcccrataaaaagcagatgctcgaacggattcagcackcagtgcagcttgccacagagccacttgagaaagctgtgcagtccagactcacgggagaggaagtcaacagctgtgtggaggtgttgctggaagaagccaaggatttgctctctgactggctggattctacacttggctgtgatgtcactgacaattccatcttctccaagctgcccaagttctgggagggggacttccacagagacatggaagctctgaatgttctccctccagatgtcttaacccgggttagtgagtatgtgccagaaattgtgaactttgtccagaagattgtggacaacggttacggctatgtctccaatgggtctgtctactttgatacagcgaagtttgcttctagcgagaagcactcctatgggaagctggtgcctgaggccgttggagatcagaaagcccttcaagaaggggaaggtgacctgagcatctctgcagaccrcctgagtgagaagcgctctcccaacgactttgccttatggaaggcctctaagcccggagaaccgtcctggccgtgcccttggggaaagggtcgtccgggctggcatatcgagtgctcggccatggcaggcaccctcctaggggcttcgatggacattcacggaggtgggttcgacctccggttcccccaccatgacaatgagctggcacagtcggaggcctactttgaaaacgactgctgggtcaggtacttcctgcacacaggccacctgaccattgcaggctgcaaaatgtcaaagtcactaaaaaacttcatcaccattaaagatgccttgaaaaagcactcagcacggcagttgcggctggccttcctcatgcactcgtggaaggacaccctggactactccagcaacaccatggagtcagcgcttcaatatgagaagttcttgaatgagtttttcttaaatgtgaaagatatccttcgcrctcctgttgacatcactggtcagtttgagaagtggggagaagaagaagcagaactgaataagaacttttatgacaagaagacagcaattcacaaagccctctgtgacaatgttgacacccgcacygtcatggaagagatgcgggccttggtcagtcagtgcaacctctatatggcagcccggaaagccgtgaggaagaggcccaaccaggctctgctggagaayatmgccctgtacctcacccatatgctgaagatctttggggccgtagaagaggacagctccctgggattcccggtcggagggcctggaaccagcctcagtctcgaggccacagtcatgccctaccttcaggtgttatcagaattccgagaaggagtgcggaagattgcccgagagcaaaaagtccctgagattctgcagctcagcgatgccctgcgggacaacatcctgccygagcttggggtgcggtttgaagaccacgaaggactgcccacagtggtgaaactggtagacagaaacaccttattaaaagagagagaagaaaagagacgggttgaagaggagaagaggaagaagaaagaggaggcggcccggaggaaacaggaacaagaacactctgaatctgagggcttggaagcaagttgagggctggaggtatgagcagatgtcgttcacagtgcggagccccaggtgctgctcgggggcagtgactgtgccgtgttgcgtgttctaggcagcaaagctggccaagatgaagattccccccagtgagatgttcttgtcagaaaccgacaaatactccaagtttgatgaaaatgtaagcatggtctgcccacacatgacatggagggcaaagagctcagcaaagggcaagccaagaagctgaagaagctcttcgaggctcaggagaagctctacaaggaatatctgcagatggcccagaatggaagcttccagtgagggggcacaggactgactttttaaaccattgtggactagtggctgctgtctgcctcagtgacaatgtcccagcgctcctatcatgtttacagtcacccttgggtcctaaattaagagttgtgttcatgtaggttcgtgtcgtcgttggctctgagacattgataataaatttttctcaacagtgaga

SEQ ID NO: 644 - DNA, 600 bp, Homo sapiens
ggctttgcagatgccaccgctgccaggagccccgttctatcagccatggtcaaccccaccaggttcttagacatcatcgtggatggttcctactttcacagaattgttcctgggtttatgtgtcagggtggtgacttcacacagcataatggcactggtggcaagtccatctacgggaagaaatttgatgatgagaacttcgtcctaaattatacaggtcctggcatcttgtccgtggagaatktgctggaccyaacacaaatggttcccagtttttcatctgcactgccatgtctgagtggttggatggcatgcaggtggtctttggcaagggaaggaaggcgtgagtattgtggaagccatggagtgctttgggtccacaaatggcaagaccagcaagaagatcaccattgctgactgtggacaactctaataggtttgacttgtgttttatcttcrccaccagaccattccttctgttgctcaggagagcacccctctaccccacttgctcacagtatcccatcatctttgtgctcttgctgcagttccctttgggttccatgttttccttgttccctttcatgcctagctggattg

SEQ ID NO: 645 - DNA, 262 bp, Homo sapiens
atggtatcagttataccagtgaaggagaagaaactcctggatgtcaaactaggggagctgccaagctggatactgatgcaagatttcacccctagtgscattgctggagcatttcaaagaggtttctactggtactacaacaagtacatcgacgtgaagaaagggtgtctcagggggttccacggtactggcagcttacatgctcttcagctactgcctttcctacaaggagctcaagcatgagcagctatgcaagtaccac

SEQ ID NO: 646 - DNA, 4406 bp, Homo sapiens
ctcttgcccctgttctttgcttctcgttttgttggtgaagatatcacagtgatgtctgcattcaacctgctgcatttggtgacaaagagccagccagtagcccttcgagcctggtcgtgtagggataaaaagaactgtaaggtggtcttttcccagcaggaactgaggaagcggctaacacccctgcagtaccatgtcactcaggagaaagggaccgaaagtgcctttgaaggagaatacacacatcacaaagatcctggaatatataaatgtgttgtttgtggaactccattgtttaagtcagaaaccaaatttgactccggttcaggttggccttcattccacgatrtgatcaattctgaggcaatcacattcacagatgacttttcctaygggatgcacagggtggaaacaagctgctctcagtgtggtgctcaccttgggcacatttttgatgatgggcctcgtccaactgggaaaagatactgcataaattcggctgccttgtcttttacacctgcrgatagcagtggcaccgccgagggaggcagtggggtcgccagcccggcccaggcagacaaagcggagctctagagtaatggagagtgatggaaacaaagtgtacttaatgcacagcttattaaaaaaatcaaaattgttatcttaatagatatattttttcaaaaactataagggcagttttgtgctattgatattttttcttcttttgcttaaacagaagccctggccatccatgtattttgcaattgactagatcaagaactgtttatagctttagcaaatggagacagctttgtgaaacttcttcacaagccacttataccctttggcattcttttctttgagcacatggcttcttttgcagtttttccccctttgattcagaagcagagggttcatggtcttcaaacatgaaaatagagatctcctctgcagtgtagagaccagagctgggcagtgcagggcatggagacctgcaagacacatggccttgaggcctttgcacagacccacctaagataaggttggagtgatgttttaatgagactgttcagctttgtggaaagtttgagctaaggtcatttttttttttctcactgaaagggtgtgaaggtctaaagtctttccttatgttaaattgttgccagatccaaaggggcatactgagtgttgtggcagagaagtaaacattaccacactgttaggcctttattttattttattttccatcgaaagcattggaggcccagtgcaatggctcacgcctgtgatcccagcactttgggaggccaaggcgggtggatcacgaggtcaggagatggagaccatcctggctaacatggtgaaaccccgtctctactaaaaatacgaaaaattagccaggcgtggtggtgggcacctgtagtcccagctactcaggaggctgaggcaggagaatggcgtgaacccggaaggcggagcttgcagttagccgagatcaygccactgcactccagcctacatgacaatgtgacactccatctcaaaaaataataataatamcaatataagaactagctgggcatggtggcgcatgcatgtagtcccagctactcctgaggctcagtcaggagaatcgcttgaacttgggaggcggaggttgcagtgagctgagctcataccactgcactccagcctgaacagartgagatcctgtcaaaaaagaaaagaaaaagaaagcagcattcaaatgtaagacaactgtaaaatattgagccccacttggtctaaaattcaaaaagaagaacgcctgtccatcgcctttttataagtccttctctccacacctaaaagcagctgcagctggaagggcacaaattccactgtgtaaaataaaatattaggggcaacacacttcatcaaggcagcaggaatgagagagagcagagaagatcaaggatgaagtcttgggtactgaaaaattcagtgctgggcagaaaaactgacagggcagtacaagtaacaaacagaatccaagtggggtggcccttgtgcacagagctccaggtgacctctggagagacatgggcattcacatggaaagctaaaacggaagctcaagtttcatactcaacataatcttctgtgtgacaaaggacaagccatgtagcctctctgtgcctatttcttcatgcataaactgggactcataatatttgtaaaatgtattgatactctcagggcaaattcactatattgctatacagttgagatcagtgttgtaaaattaaactgatctggttctaattgcctcaaaggccaaagcccaggcatttgaaatggaaagaagcagagaggaggctgacttagctgattggtatggaaacagttgggccaagagccagaatttccctttgtagcaacacggctagttttactttgagaagctctgctcagctgctttataacattaagtctggcggaatggatgtcactgtgcacaataaagttttcacaagtataaacaatggtgatgtaagtcaacattgctgtagccaggtgtgaaggttgtatggtgtgtgacgaatgtacatcatgtttgtaggtttggatgctaatcttgaattgtagyttaaaaahtacgtatttttgtaactctttgaaagtttatgaagactgacagctttccttgtaagcactaagagaaaaaaaagaaagagggacatttgacaattttaaagaaacaacaagaaattagaatgaaaatctgtgacaaacagcgtcagtgtggccatgtccacattcctacatgtctctctctacaagcacctctctaagaagcctgacatcccggtggactctttatagtcatgtacacttgattccagatgagctctggtcttatctggatgctcagataagaggtttctatctgagcatccagatgttccctcaggttccaagacatttcaccccaggccctgggttcactctggaattcgtaggcttcacgtctctctagaaatgacgtgtaaaatttaagaccagacctcagccatcagcgtccagaccatccwagaagtctttcccaatctcacagagaaagccctagtatttcccagtgaccccaggattccacgttggggtggccaaagaaataggtctctcagggctttgccacagcctccagcccatccttcagaggcacacacagcacctctcggctgctccagctctgtaggatagcctcccctggggtccgtgggacgcgggccacagtgttgaggtagacaaggaggatcagtgagaggcctcttccctctccacagagactggattgtcattgttccttcatttatatcgtagggcttaacatttcactcaaaaaaaagcccctctttttctaatccttagtctttgtttcaaggaaagccagtttttcttctaccacattttccaggatcgactttaagaaaaatgcaacatctattgaaaaaaagtggggtgtatgcatgtggtttaattccagattgcttttgggtttaagtggtatcaaatttcagtatatttctgtcttatgtgaaagaaatatattactaaaacgtcagtgagcaataatgtcagctgtcaagcactagatttatttttgcaggatatggagtgcaatgaactgagtcaatatggcaaggtgtatgtgatctgtgggagttatgccatttaacataggaagtgcatgggactttccctctctgcactccagctcttactgtaccattagaagatgcagaattctgttggtgtgcaaaaagtatagccttacattcaagcagaatggatctgaagaaagcagcaatatctgttactagagaacattcccatgtgtttaaactcttcacttcttagatgcatttaaattcttaatgcaaatgacgtagcaatttgaaaacttctccgtattacttgtgtttaaaatgtcttgctttaaatacaaaacaaatggtaaaggggattatcttttgtttagatggttaaatattatttttgccttagatagctttgtaataatttttctccagacagttcaacacttttgaaaaatgacatgaattttcattaaaaacccttttcctatgtttattgtatacaagaattatgcaataaaatttctttataaaaatattttcttctttgattcctgaagactccttttattttcagcacagatacatggactggagtttgtagcagactgttctgtttgcctccttaaccagctgacaagtctgtagtctatatggagagcctttcatctgatgcagtctttggaagttgggtctcttacagtagggtcaagtccaactctccacaccacaggccctgggagaggcctccagggatctgaaaga

SEQ ID NO: 647 - DNA, 393 bp, Homo sapiens
atggtcaaccccaccatgttcttccacattgccgtcaatggcgagcccttgggccatgcctccttggagctgtttgcagacatgttttcaaagtcagccaaaaaccttcatgctctgagcactagagagaaagaatgtggttataaggtttcctgctttcacaaaattattccaggatgtatgtcctggcattttgccatggcaattgctggacccaacacaaaccattcccagtttttcatctgcactgccaagactgagtggttggatggcaagcatgtggtctttggcaaggtgaaagaaagcatgagcattgtagaggccatggagcactttgggtccaggaayggcaagaccaacaagaagatcaccattgctgactatgaacaactc

SEQ ID NO: 648 - DNA, 2639 bp, Homo sapiens
tttcctggagcccgcgccgtgccgcgctacgcccgccgggagccgggcagagcggccaagatgtcgcagcccaagaaaagaaagcttgagtcggggggcggcggcgaaggaggggagggaactgaagaggaagatggcgcggagcgggaggcggccctggagcgaccccggaggactaagcgggaacgggaccagctgtactacgagtgctactcggacgtttcggtccacgaggagatgatcgcggaccgcgtccgcaccgatgcctaccgcctgggtatccttcggaactgggcagcactgcgaggcaagacggtactggacgtgggcgcgggcaccggcattctgagcatcttctgtgcccaggccggggcccggcgcgtgtacgcggtagaggccagcgccatctggcaacaggcccgggaggtggtgcggttcaacgggctggaggaccgggtgcacgtcctgccgggaccagtggagactgtagagttgccggaacaggtggatgccatcgtgagcgagtggatgggctacggactcctgcacgagtccatgctgagctccgtcctccacgcgcgaaccaagtggctgaaggagggcggtcttctcctgccggcctccgccgagctcttcatagyccccatcagcgaccagatgctggaatggcgcctgggcttctggagccaggtgaagcagcactatggtgtggacatgagctgcctggagggcttcgccacgcgctgtctcatgggccactcggagatcgttgtgcagggattgtccggcgaggacgtgctggcccggccgcagcgctttgctcagctagagctctcycgcgccggcttggagcaggagctggaggccggagtgggcgggcgcttccgctgcagctgctatggctcggcgcccatgcatggctttgccatctggttccaggtgaccttccctggaggggagtcggagaaacccctggtgctgtccacctcgccttttcacccrgccactcactggaaacaggcgctyctctacctgaacgagccggtgcaagtggagcaagacacggacgtttcaggagagatcacgctgctgccctcccgggacaacccccgtcgcctgcgcgtgctgctgcgctacaaagtgggagaccaggaggagaagaccaaagactttgccatggaggactgagcgttgccttttctcccagctacctcccaaagcagcctgacctgcgtgggagaggcgtagcgaggtcggaggggaaagggagatcccacgtgcaagtagggggaatatctcccccttttccctcatagcctctagggagggagagtgacttcattctccatttgaagagattcttctggtgatgtttacttaaaaagtgatccccctcaacaacggatacagcgtgcttattattgggcatttagcctcaaaagcatgtagtaccaagcacttgtatttccgtatattttgtttcgcgggggagtgagggggaagaacacggatgaaaatgtcagtttttgaagggtccatgcacatccctgacacctcacaccttatctaagtctgaagctggggagaaaggrgttcatttagacttcatacatttccagtacgactttagtatctctccagagccatattttctcagtccgaattaattccccctccctaggtgcctgtaggctatggtacttcttcctcattgttttctaggtaaacttcactactggtaattaaggggaaggatatgaggaagcagtttaaatagccctgttctcattactctgaccacatacatcatagggtgctaaagttgatgaacacattaatccgttaagtaaaatggactttgtaattgtacagcatacctaagaaactcagaaggtgcatttaagagagagacctgaaagaaatagtatggatttttaaaaattcttgtctctactattataaccaaaaaatatttcttgtatgtcccataaaaatatttgtgtaattcttatgaaacaggctggtagaggaggtttctgagcctagcccaagggcttattcatcaccatgggtaaattatttaaactcacttaattaaggaaaatattttcccagctagaaaagtatactcattctcatttaaactctctcatttggagggatcatgtgagttggcctacttacaagtagtgaaagttcccttttcagttttgttttgttttgttttgtttttctctttcactcagccaaatgtgaaagttgtgaatttaggaaaatcacttgtaatgaagtgtgaatcttgttatcaaatttatttctctgatgtttccttccttatccttgtagccaataaaacattgacattctcacgttttatagatgaggtaaaaagtcttgtgtgctgtgagttataatgcttttgcctttttaatattattagttcttaagtgttacagccccttcagaatataacttcaggacaattcaaactatgcttaatgtatgattttcgagcttctgtatgctaagaaaataggtgtgaaaaactggtgttctgaaatagcctaacatttattgtaattctgaattttctgccsttttattcattgcatattaaagtattagagtataaaaactaa

SEQ ID NO: 649 - DNA, 1310 bp, Homo sapiens
ctccaacatggagcctcttgcagcttacccgctaaaatgttccgggcccagagcaaaggtatttgcagttttgctgtctatagttctatgcacagtaacgctatttcttctacaactaaaattcctcaaacctaaaatcaacagcttttatgcctttgaagtgaaggatgcaaaaggaagaactgtttctctggaaaagtataaaggcaaagtttcactagttgtaaacgtggccagtgaytgccaactcacagacagaaattacttagggctgaaggaactgcacaaagagtttggaccatcccacttcagcgtgttggcttttccctgcaatcagtttggagaatcggagccccgcccaagcaaggaagtagaatcttttgcaagaaaaaactacggagtaactttccccatcttccacaagattaagattctaggatctgaaggagaacctgcatttagatttcttgttgattcttcaaagaaggaaccaaggtggaatttttggaagtatcttgtcaaccctgagggtcaagttgtgaagttctggargccagaggagcccattgaagtcatcaggcctgacatagcagctctggttagacaagtgatcataaaaaagaaagaggatctatgagaatgccattgcrtttctaatagaacagagaaatgtctccatgagggtttggtctcattttaaacattttttttttggagacagtgtctcactcttgcactccaacctgggcaacagagcgagaccccatcttaaagaccctgtctcaaaaaagagagaaaaagaaaaagaaaaatatcaggcatcacatgaaagagtattcagctgtcrttcttgtgaaaaaggaaaaggacaaaatcaaatgcattttaactgtggtaactaattcactgacttgaagtttgctttgtttgttttctttggtgcgtagagaagaatacttcatactaactcctgatcatcttacagcagacataacaacagagtgttagagactggaataaatatgaatttggctgaaatgtgccctgaaagttgtatttcatttttttaaatgtttaacaattacactgtatcaatagtatatatacgtgtacatatatataattcttaataactgcagtgtatctagcatatatataatggtggctggtacatgtttaatagcagactctggaggaggaatcctgacatacagcatttgccagctcaatgtaaatgctcatgctccctcatggtcaatttcaatctaccactggtttagtaactaggatgcaaaatttctaaaaatgtg

SEQ ID NO: 650 - DNA, 722 bp, Homo sapiens
gtactctcagccatggtgaatcccaccgtgttcttccacattcyagtggacagcgagcccttgggccgcgtctccttcaagctgtttgcagacaagtttccaaagacagcagaaaactttcgtgctctgagcactggagagaaaggatttggttataagtgttcttgccttcacagaattattccagggtttatatgtcagggtgatggcttcacacgccataatggcactggtggcaagtccgtctacggggagaaatttgatgatgagaacttcattctaaagcatacaggtcctggcatcttgtccctggcaaatgctggacccaacacaaacggctcccggtttttcatctgcactgccaagactgggtggttggatggcacgcatgtggtctttggcaaggcgaaagaaggcataaatattctggaggccatggagcgcttgggtccaggaatggaaagaccagcaagaagatcaccatttctgactgtggacaactctaataaatttgacttgtgttttatcttaaccaccagaccattccttctgtagctcaggagagcagccctccaccccatttgctcgcagtatcctagaatctttgtgctcttgctgcagttccctttgggttccatgttttccttgttcccttccatgactagctggattgcagagttgaattaagtttatgattakgaaataaaaactaaataacaaaa

SEQ ID NO: 651 - DNA, 555 bp, Homo sapiens
ccgaagatggaggaggaaggggaggaggaggactactgcacccctggagcctttgagctggagcggctcttctggaagggcagtccccagtacacccacgtcaacgaggtctggcccaagctctacattggcgatgaggcgacggcgctggaccgctataggctgcagaaggcggggttcacgcacgtgctgaacgcggcccacggccgctggaacgtggacactgggcccgactactaccgcgacatggacatccagtaccacggcgtggaggccgacgacctgcccaccttcgacctcagtgtcttcttctacccggcggcagccttcatcgacagagcgctaagcgacgaccacagtaagatcctggttcactgcgtcatgggccgcagccggtcagccaccctggtcctggcctacctgatgatccacaaggacatgaccctggtggacgccatccagcaagtggccaagaaccgctgcgtcctcccgaaccggggctttttgaagcagctccgggagctggacaagcarctggtgcagcagaggcgacgg

SEQ ID NO: 652 - DNA, 6909 bp, Homo sapiens
ctgaacctacagccagtcatccaagggttcatgaatagtttaacaaagaaaaggcagagctattgagtaatacgggctcattaattgtgtacttgccagaaggatctgtctttaaatcattaatgcaggcaacatttctctctagagccatcaatgtgattctactggctgaaaaatgtaataaagatggattttcttatcatttttcttttactttttattgggacttcagagacacagtgtgaactcatattgctctttggaaatttcaaattttacatttataaayactgttattatgtatttttgtgwaaatgcaataattatttgaccttttaacaaaatggattttttaaaaatagaaccagggcctccagtcttcctagccggggaaagagtcrgatstgctgggattcttctgtcttggaatacaccacctaatccaaatggaaggattatatcttacattgtcaaatataaggaagtttgtccgtggatgcaaacagtatatacacaagtcagatcaaagccagacagtctggaagttcttcttactaatcttaatcctggaacaacatatgaaattaaggttgctgctgaaaacagtgctggcattggagtgtttagtgatccatttctcttccaaactgcagaaagtgctccaggaaaagtggtgaatctcacagttgaggcctacaacgcttcagcagttaagctgatttggtatttacctcggcaaccaaatggcaaaattaccagcttcaagattagtgtcaagcatgccagaagtgggatagtagtgaaagatgtctcaatcagagtagaggacattttgactgggaaattgccagaatgcaatgagaatagtgaatcttttttatggagtacagccagcccttctccaacccttggtagagttacacctccatcgcgtaccacacattcatcaagcacgttgacacagaatgagatcagctctgtgtggaaagagcctatcagttttgtagtgacacacttgagaccttatacaacatatctttttgaagtttcagctgytacaactgaagcaggttatattgatagtacgattgtcagaacaccagaatcagtgcctgaaggaccaccacaaaactgcgtaacaggcaacatcacaggaaagtccttttcaattttatgggacccaccaactatagtaacagggaaatttagttatagagttgaattatatggaccatcaggtcgcattttggataacagcacaaaagacctcaagtttgcattcactaacctaacaccatttacratgtatgatgtctatattgcggctgaaaccagtgcagggastgggcccaagtcaaatatttcagtattcactccaccagatgttccaggggcagtgtttgatttacaacttgcagaggtagaatccacgcaagtaagaattacttggaagaaaccacgacaaccaaatggaattattaacsaataccragtgaaagtgctagttccagagacaggaataattttggaaaatactttgctcactggaaataatgagtatataaatgaccccatggctccagaaattgtgaacatagtagagccaatggtaggattatatgagggttcagcagagatgtcgtctgaccttcactcacttgctacatttatatataacagccatccagataaaaactttcctgcaaggaatagagctgaagaccagacttcaccagttgtaactacaaggaatcagtatattactgacattgcagctgaacagctgtcttatgttatcaggagacttgtacctttcactgagcacatgattagtgtatctgctttcaccatcatgggagaaggaccaccaacagttctcagtgttaggacacgtcagcaagtgccaagctccattaaaattataaactataaaaatattagttcttcatctattttgttatattgggatcctccagaatatcccaatggaaaaataactcactatacgatttatgcaatggaattggatacaaacagagcattccagataactaccatagataacagctttctcataacagggttaaagaaatacacaaaatacaaaatgagagtggcagcctcaacccacgwtggagaaagttctttgtctgaagaaaatgacatctttgtgagaacttcagaagatgaaccggaatcatcacctcaagatgtcgaagtaattgatgttaccgcagatgaaataaggttgaagtggtcaccacccgaaaagcccaatgggatcattattgcttatgaagtgctatataaaaatatagatactttatatatgaagaacacatcaacaacagacataatattaaggaacttaagacctcacaccctctataacatttctgtaaggtcttacaccagatttggtcatggcaatcaggtatcttctttactctctgtaaggacttcggagactgtgcctgatagtgcaccagaaaatatcacttacaaaaatatttcttctggagagattgagctatcattccttcccccaagtagtcccaatggaatcatamaaaaatatacaatttatctcaagagaagtaatggaaatgaggaaagaactataaatacaacctctttaacccaaaacattaaagkactgaagaaatatacccaatatatcattgaggygtctgctagtacactsaaaggtgaaggagttcggagtgctcccataagtatactgacggaggaagatgctcctgattctccccctcaagacttctctgtaaaacagttgtctggtgtcacggtgaagttgtcatggcaaccacccctggagccaaatggaattatcctttattacacagtttatgtctggaatagatcatcattaaaaactattaatgtcactgaaacatcattggagttatcagatttggattataatgttgaatacagtgcttatgtaacagctagcaccagatttggtgatgggaaaacaagaagcaatatcattagctttcaaacaccagagggagcaccaagcgatcctcccaaagatgtttattatgcaaacctcagttcttcatcaataattcttttctggacacctccttcaaaacctaatgggattatacaatattactctgtttattacagaaatacttcaggtacttttatgcagaattttacactccatgaagtaaccaatgactttgacaatatgactgtatccacarttatagataaactgacaatattcagctactatacattttggttaacagcaagtacttcagttggaaatgggaataaaagcagtgacatcattgaagtatacacagatcaagacatacctgaagggyttgttggaaacctgacttaygaatccatttcgtcaactgcaataaatgtaagctgggtcccaccgsctcaaccaaacggtctagtcttctactrtgtttcactgatcttacagcagactcctcgccatgtgagaccacctcttgttacatatgagagaagcatatattttgataatctggaaaaatacactgattatatattaaaaattactccatcaacagaaaagggattctctgatacctatactgcccagctatacatcaagactgaagaagatgtcccagaaacttcaccaataatcaacacttttaaaaacctttcctctacctcagttctcttatcatgggatcccccagtaaagccaaatggtgcaataataagttatgatttaactttacaaggaccaaatgaaaattattctttcattacttctgatratyacataatattggaagagctttcaccatttacattatatagcttttttgctgcygcaagaactagaaaaggacttggtccttccagtattcttttcttttacacagatgagtcagtgccgttagcacctccacaaaatttgactttaatcaactgtacttcagactttgtatggctgaaatggagcccaagtcctcttccaggtggtattgttaaagtatatagttttaaaattcatgaacatgaaactgacactatatattataagaatatatcaggatttaaaactgaagccaaacttgttggactggaaccagtcagcacctactctatccgtgtatctgcgttcaccaaagttggaaatggcaatcaatttagtaatgtagtaaaattcacaacccaagaatcagttccagatgtcgtgcagaatatgcagtgcatggcaactagctggcagtcagttttagtgaaatgggatccacccaaaaaggcaaatggaataataacgcagtatatggtaacagttgaaaggaattctacaaaagtttctccccaagatcacatgtacactttcataaagcttcttgccaatacctcatatgtctttaaagtaagagcttcaacctcagctggtgaaggtgatgaaagcacatgccatgtcagcacactacctgaaacagttcccagtgttcccacaaatattgctttttctgatgttcagtcaactagtgcaacattgacatggataagacctgacactatccttggctactttcaaaattacaaaattaccactcaacttcgtgctcaaaaatgcaaagaatgggaatccgaagaatgtgttgaatatcaaaaaattcaatacctctrtgaagctcacttaactgaagagacagtatatggattaaagaaatttagatggtatagattccaagtggctgccagcaccaatgctggctatggcaatgcttcaaactggatttctacaaaaactctgcctggccctccagatggtcctcctgaaaatgttcatgtagtagcaacatcaccttttagcatcagcataagctggagtgaacctgctgtcattactggaccaacatgttatctgattgatgtcaaatcggtagataatgatgaatttaatatatccttcatcaagtcaaatgaagaaaataaaaccatagaaattaaagatttagaaatattcacaaggtattctgtagtgatcactgcatttactgggaacatyagtgctgcatwtgtagaagggaagtcaagtgctgaaatgattgttactactttagaatcagccccaaaggacccacctaacaacatgacatttcagaagataccagatgaagttacaaaatttcaattaacgttccttcctccttctcaacctaatggaaatatccaagtatatcaagctctggtttaccgagaagatgatcctactgctgtccagattcacaacctcagtattatacagaaaaccaacacattcgtcattgcaatgctagaaggactaaaaggtggacatacatacaatatcagtctccagcacgaccaaaaaccaaaccaacccctatttatgatgccacaggaaaactgcttgtgacttcaacaacaattacaatcagaatgccaatatgttactacagtgatgatcatggaccaataaaaaatgtacaagtgcttgtgacagaaacaggagctcmgcatgatggaaatgtaacaaagtggtatgatgcatattttaataaagcaaggccatattttacaaatgaaggctttcctaaccctccatgtacagaaggaaagacaaagtttagtggcaatgaagaaatctacatcataggtgctgataatgcatgcatgattcctggcaatgaagacaaaatttgcaatggaccactgaaaccaaaaaagcaatacttatttaaatttagagctacaaatattatgggacaatttactgactctgattattctgaccctgttaagactttaggggaaggactttcagaaagaaccgtagagatcattctttccgtcactttgtgtatcctttcaataattctccttggaacagctatttttgcatttgcaagaattcgacagaagcagaaagaaggtggcacatactctcctcaggatgcagaaattattgacactaaattgaagctggatcagctcatcacagtggcagacctggaactgaaggaygagagattaacgcggttacttagttatagaaaatccatcaagccaataagcaagaaatccttcctgcaacatgttgaagagctttgcacaaacaacaacctaaagtttcaagaagaattttcggaattaccaaaatttcttcaggatctttcttcaactgatgctgatctgccttggaatagagcaaaaaaccgcttcccaaacataaaaccatataataataacagagtaaagctgatagctgacgctagtgttccaggttcggattatattaatgccagctatatttctggttatttatgtccaaatgaatttattgctactcaaggtccactaccaggaacagttggagatttttggaraatggtgtgggaaaccagagcaaaaacattagtaatgctaacacagtgttttgaaaaaggacggatcagatgccatcagtattggccagaggacaacaagccagttactgtctttggagatatagtgattacaaagctaatggaggatgttcaaatagattggactatcagggatctgaaaattgaaaggcatggggattgcatgactgttcgacagtgtaactttactgcctggccagagcatggggttcctgagaacagcgcccctctaattcactttgtgaagttggttcgagcaagcagggcacatgacaccacacctatgattgttcactgcagtgctggagttggaagaactggagtttttattgctctggaccatttaacacaacatataaatgaccatgattttgtggatatatatggactagtagctgaactgagaagtgaaagaatgtgcatggtgcagaatctggtaagatctctaaacctgcactgcattctaaagttctag

SEQ ID NO: 653 - DNA, 665 bp, Homo sapiens
caacccaccatgttctttgacatcgccatcaayggtaagcctttgggccawgtctgctttgagttgcttgcagacaagtttctgaagacagcagaaaactttcatgctctgagcactggagagaaaggatttggttataatggttcttgccttcacagaattattccagggtttatgtgtcagggtttatgtgtcacttatttctacataccataatggccctggtggcaagttcatctacggggagaaatttgatgatgaaaacttcatcctaaagcacacaggtcctggcatcttgtccatggaaaatgctgaacccaacacacatggttcccagtttttcatctgccctgccaagactgagtggttggatggcaagcatgtggtctttggcaaggtgaaagaaggcatgactattgtagaggccatggagcactttgggtccaggaatggctagaccagcaagaagattaccattgctgactgtggacaattctaataagtttgacttgtgttttatcttaaccaccagaccattccttctgtagcttaggagagcactcctccaccgcatttgctcacagtatcctataatttgtgtgctctcactgcagttccctttgggttccatgttcccttccatgcctagctggattgcagagtta

SEQ ID NO: 654 - DNA, 471 bp, Homo sapiens
atgctgtcccaggtggcacattctgccaccaccatggtggccccctctctgaagaatacagccttcataggtccagggatattgcaggcaacaaagacctttcacacagggcagccacaccttgcccttctaccacctcttcctgaatatggagggaaagttcatttggggctgatccctgaggaattcttccagtttctttatcctaaaactggtgtaacaggaccctatgtgctcagaactgggcttatcttgtatggtttatccaaagaaatatatatgattaccccagagaccttctctaccacatcgataaacatgatgcttcgaaagaaacaagaacayatgataaattgggtggagaagcacgtggtgcagagcatctctgcacagcaggaaaaggagacaattgccaagtgcattgccaacctaaagctgctggcaaagaaggctcaagcacagccagttatg

SEQ ID NO: 655 - DNA, 3207 bp, Homo sapiens
gcagcttacaccgcggtccccttatttggatctgcgggaatgtgggctggagaggtcctgccgtggtaccagcctccagcctgcccccaggactgcccctgacccaggcgcgcccgctgctcggtggcaggagggccggcggagcgccatggcctgcatcctgaagagaaagtctgtgattgctgtgagcttcatagcagcgttccttttcctgctggttgtgcgtcttgtaaatgaagtgaatttcccattgctactaaactgctttggacaacctggtacaaagtggataccattctcctacacrtacaggcggccccttcgaactcactatggatacataaatgtgaagacacaagagcctttgcaactggactgtgacctttgtgccatagtgtcaaactcaggtcagatggttggccagaaggtgggaaatgagatagatcgatcctcctgcatttggagaatgaacaatgcccccaccaaaggttatgaagaagatgtcggccgcatgaccatgattcgagttgtgtcccataccagcgttcctcttttgctaaaaaaccctgattattttttcaaggaagcgaatactactatttatgttatttggggacctttccgcaatatgaggaaagatggcaatggcatcgtttacaacatgttgaaaaagacagttggtatctatccgaatgcccaaatatacgtgaccacagagaagcgcatgagttactgtgatggagtttttaagaaggaaactgggaargacagagtccagtctggctcatatctcagcacagggtggtttaccttcmttctggccatggacgcctgttatggcattcacgtctacgggatgataaatgacacctactgcaagacagaagggtatagaaaagtcccctaccattattatgaacaaggaagagatgagtgtgatgaatattttcttcatgaacatgccccatatgggggtcataggtttatcactgaaaagaaagtgtttgctaaatgggccaagaagcacaggataatatttacacatccaaactggacattgtcttgataatggttttcctgatcttgccgcatcacttaatgtgatccccatactgcaactgtgatgctgatgatgctaatggagatgatggtaatgataaagacaacaacaatgattatcaagttcctgtacactctcagatgtggatggtgactctgctagtaatttaaacttggcatttcatggaggatggttgtgctcatgatgttctttctggaggttcaacactacgtaccgcactttataatttaactggaattgagatgaaggccagtgacatgacaactgtgacctaagaaatgggaagattatctttcaagatagctgcctagaattgttcracagtgagtaacttccagaagccaaaagagtttggcttcatgaggcaaggtgattgactcaatggcttgttgaatctcagcagttccgccatcttgaagaatgattgattgtcaaacactgacccaagaactgctatcagggtgcaagtatcttactasttagcctaaggatgggaaaatatctcttcctaatataccatctttctacagtatttcctacagctaaagcctcaggccattgcctaattaacaatgaagatttcatggacatcctacacttcaggattacttgactatctcaaacacataaatcaaaatgggccaagtagcaaatcttgatgaatttccactcttaccatccattcttactaccaacagtataactgaacatgtgattagaatgatctatattaatgtttagttatttttggttgagtgctaaatatttcagaaggctacttaacatgtaagataccaacttcaacactgtaataacatatactgtgaaaacattcctaaaaagtaaccraagggtttgctaactctgcttcaacatccaacaacacaaaactatatgatttttaaaatcatgaaatagagacagcaaagcatatttttacatcaatttgtatcctatcatacttcataatatatatttgtatattcaaatttctattttataggcccaaggtgtgtttctccaaacattacattctcattgccaagtgccagctgttacacatggagaggaaatgattccttatattaaacctraccagagctttttgccttctagggatttatttttcccatagtgtatcagttgttatgccacaataacaacaataataatgttcttaatgtccaaagtgctttgtcatttagagtcctttaacatctgttataccatgtgatgcccttgaacaccccattgggctattgtctgtgtattctgctctctttagcagatgatctgtaatttggtcattgttctgttatattccagattgctctacttgctaatatttgtatagaatagaatttatgtaaactagtaaccagttgatctctgtgccaaatacattatatcaggattacacaaaaagtatcacaaaggatggtcttggccatatgctagggcccctgtgaaaataagtagttttgagaagtttttctatatacgtatatatacacgtgtggttctatttaggtggggaaaaaatgaaaaagcagggacaacaggaggaaatgaaggcagagaaatatagtttcctttcctaggattgagacaattctatttttcatatactcgttgctcattaaatagtaaagggttgatttgctgcaagagtagctgagaattcaaaaacatccttgcasaatgattcaaaagacaaaagccaggctcaacttatagaatgttttggaaactggaagtaatgatacatttcacttcagaagcacttgtaggtctttactagtgctaagtattatggtgagctatcattaaagtgtgccatcttggataaaggccttttgcctactctcttctgcaattttgacacctcaatattcacacccataaacattactaagccccagttctatcgttggaaggagttgttattcttttgttgttcccttatgcaatttttaattctatgaatgttaagtttttttgagctaatgatagatagaaatgcccactcaaagaaaaataaacagagacaaatgttaaaattgccatacagactgtttttccccctgttgtttcactttaaaataaaaagaaatccttgattaatc

SEQ ID NO: 656 - DNA, 1133 bp, Homo sapiens
gcagcttacaccgcggtccccttatttggatctgcgggaatgtgggctggagaggtcctgccgtggtaccagcctccagcctgcccccaggactgcccctgacccaggcgcgcccgctgctcggtggcaggagggccggcggagcgccatggcctgcatcctgaagagaaagtctgtgattgctgtgagcttcatagcagcgttccttttcctgctggttgtgcgtcttgtaaatgaagtgaatttcccattgctactaaactgctttggacaacctggtacaaagtggataccattctcctacacrtacaggcggccccttcgaactcactatggatacataaatgtgaagacacaagagcctttgcaactggactgtgacctttgtgccatagtgtcaaactcaggtcagatggttggccagaaggtgggaaatgagatagatcgatcctcctgcatttggagaatgaacaatgcccccaccaaaggttatgaagaagatgtcggccgcatgaccatgattcgagttgtgtcccataccagcgttcctcttttgctaaaaaaccctgattattttttcaaggaagcgaatactactatttatgttatttggggacctttccgcaatatgaggaaagatggcaatggcatcgtttacaacatgttgaaaaagacagttggtatctatccgaatgcccaaatatacgtgaccacagagaagcgcatgagttactgtgatggagtttttaagaaggaaactgggaargacagtacagagtgaccatgcagtgttgattgatcgaacagcaaccaccacatacatgtcctgccccaccacaaaaggaaggaaggaataaaagaaagaaagaaagaaacaaacaaacaaacaaacaaaactaagcaagacaaaacaaatacccatgtcagtggttcaaagattaagattgtggctttgtgtaaagttctttccctttgtagacttgctgcataattattcaggtatgatggttacagtttttaaaaaggaagggaaattgtggtatgtggtatgtaaatatttttaaatgttgtctctctgttttgatcagtttttgttttattcaatttgtctttattaaatcttatcaaagcaa

SEQ ID NO: 657 - DNA, 1339 bp, Homo sapiens
aaagagaggaaaggctgttttttgaggcctgaggcgccccaacatgacaacgaaagactgtaaccatggtcatgtgagttatgagctaggaaccctggacgaaaccaacacatatacaatcatctcccacctcccaacacctttactttcacagcctctgcagcaaactgcggtcactataatcgctcctgtggcacagaggcatacccaggggaatctgcccagggggccactctgtgcccacrtgggaacccacrtctgcttgtaaagcctcccctccctctgaccagaaacgaggacagtttgttgttccaagcagtgggctcatgtctgttttggctcagaacagggtggggagagcgggccagggacccgcaggagggcttatccttgagattgcgtgggagacacaacaaggggtgggggcccgcaggcggggcggggcgaagcaggtgatatccagcccagagccccagcctctccccacagtctcaccatggcctgcaccgtggtgctcatcaccggctgttcctcaggtattggcctgcacttggcaatacatctggctttggacccatcccagagcttcaaagtgtatgccacgttgagggacctgaaaacacagggccggctgtgggaggcggcccgggccctggcatgccctcagggatccctggagaggttgcagctggatgtaaggaactcaagctccctggccgctgcccgggaacgcgtgaccgagggccgtgtggatgtgctggtgtgtracacaggcctgggcctgctggggccgctgggggaggacgcygtggcctctgtactggatgtgaatgtagtaggtactgtgcgggtgctgcaggacttcctgccagacatgaagcggccgggttygggacgcgtgttggtgactkggagcatgggaggattgatggggctgcctttcaatgacgtttattgcgccagcaagttcgcgctcgaaggcttatgcgagagtctggcggttctgctgctgccctttggggtccacagcgtgagcctgatcgagtgcggccctgtggacaccgccttcatgcagaaggtgttgggcggtcccgaccaggtgatggaccgcacgaacacccggaccttccgcctcttgcactaatacctccaccacagcaaggagatctaccgcgaggaggcgcagcmccctgaggaggtggtgaaggtcttcctcaccgctatgcgcgccccgaagccgaccctgcgctacttcacaaccaggcgcttcctgcaccagctgctgatgcgcctggacgacccctttggcttcgactacgccgccgccatgcaccgggac

SEQ ID NO: 658 - DNA, 126 bp, Homo sapiens
atgacgtttattgcgccagcaagttcgcgctcgaaggcttatgcgagagtctggcggttctgctgctgccctttggggtccacaaggagatctaccgcgaggaggcgcagcmccctgaggaggtgg

SEQ ID NO: 659 - DNA, 324 bp, Homo sapiens
caacaaaagagaaaattaaatatgagtgatgttgagaaaggcaataagatttttgttcagaagtktgcccagtgccataccgtggaaaagggaggcaagcgcaagactgagacaaatctccatggcctctttgggcagaatacaggtcaggctgttggattctcttacatggaccccaataagaacaaaggcatcacttggggagagggtatactgatggagtatttggagaatcccaagaagtgcatccttggaacaaaaatgatctttgccagcattaagaagaaggcagaaaaggcaggcttgatagctagtaatgagtaa

SEQ ID NO: 660 - DNA, 4031 bp, Homo sapiens
caggaggtgtttggttaccgggaccacaatgtacggaaagccttctgccttgtcgcatccgtgctgacctgtgggggccttctgctggtgttctactggagaccccagtggagagtgtgggccaactgcatcccatgccccttgcaagaagcagacactgttttgctgaggacaacagtgcgtgcctttctgttttctattttgaawgycatgatcgtgtcttctgtattgcctctgtggcayaactctgtggctggtattatatttcagaaggtagatttcctctatttaaagagtttccatagatcaaaacaggagaaaayayggcaaaattacctctgcaatccatttgctatctctcattttgacccaggaaggaagagcatttcttctgcttcagcttggggaaatttcgaccccatcaygttgctagaagacagcaattcctgctctgacatccatcagacatttggattgggtctgaccagtgaagagcaagaggtcagaagattagtgtgtgggcccaacgccattgaggttgaaatccaacccatatggaagctgcttgttaaacaggttttaaatccattctatgtgttccaagccttcaccctaactttgtggctgtctcaaggttacatagaatactctgtggccatcatcattttgactgttatctccattgtcttaagtgtgtatgatttgcgacagcaatcagttaagctgcataacctcgtggaggaccacaacaaagtccagrttacaatcattgtaaaagacaaaggtttggaggagctggaatcccgtctcttggttcccggagacattcttattcttccaggaaaattttcattgccatgtgatgctgttttgattgatggaagctgcgtggtgaatgaaggcatgcttacaggagaaagtatacctgttacaaagacaccattgccccagatggagaacactatgccttggaaatgtcacagtttggaggattayaggraacacgtccttttctgtggaacagaagttatccaggtcaagccctctgggcaggggcctgtacgagcagtcgttttgcaaacaggttacaatacagccaaaggggacttagtgagatccatcctgtacccccggcctctgaacttcaaactatacagcgatgccttcaagttcatcgtgttcctggcctgccttggtgtcatgggttttttctatgccctaggggtatatatgtaccatggagtaagtactggggatactgtgaccatggccctgatcctcctcaccgtgactgtccctccagtgctgccagctgccctgaccataggcaacgtgtatgctcagaagagactgaagaaaaagaaaatcttctgtatctccccacagagaatcaacatgtgtgggcaaataaacctcgtgtgctttgacaaaactggcactctcactgaagatgggctggacctctgggggactgtccctactgctgacaactgcttccaggaagcccacagctttgcctcrggccaggctgtgccatggagcccactgtgtgcggccatggccagctgccactctctgatccttctcaatgggaccatccagggagaccctctggacctcaaaatgtttgagggcactgcctgggtaagcacaatgaagagccaaacaagtagagggtgttcactaattaactggttagttaattacaycctgttgcctccgaagaacatcctaaagctgtgtccaatgatsttgttaagctccctgttgttgatgggcttgcagagtccagtggaagccatcatcaccttgtgycagtttccattttcctcgagcctgcagaggatgtccgtgatcgctcagctagctggggagaatcatttccatgtctacatgaaaggtgccccagaaatggtggccaggttctgcagatctgaaacagtgcccaagaatttcccacaggaactgaggagttacacggtgcaaggcttccgtgtcattgctcttgcccacaaaaccttaaagatggggaatctttcagaagtggagcacttagccagagaaaaagtggagtcagagttaacatttctgggacttctcatcatggagaatcgcttgaaaaaagaaaccaaactggtcttgaaggaactgagtgaggcccgtatcaggactgtgatgattacaggtgataaccttcaaacggccattactgttgcaaagaattctgaaatgatccctccargcagccaagtgatcattgttgaggccgatgaaccagaagaatttgttcctgcctctgtgacctggcagctggtggagaaccaagagactggacctgggaagaaagtgagcaaatagtttgacagtttgcaaagcatttctgccagctctggttgcctaggaaaatcacctgggggagtttctaagcttccagtgcaggctgcaccaattaaatcagaacccctgggttcaacccctcgtggggaaggaggaagctgttaccattttgcaatgagtgggaaatcataccaagtgatatttcagcatttcaacagcttgcttccaaaaattctggtgaatggaacagtttttgcaagaatgtctcctgggcagaaatcaagccttattgaagaatttcagaaattaaattattatgtgggcatgtgtggagatggagctaacgactgtggggctttgaaagcrgctcatgcaggcatttcattatcagagcaggaagcatctgtggcatccccttttacctctaaaacaaccaacatccagtgtgtgcctcatctcatcagagaaggccgagctgctctggtttcatcctttggagtatttaaatacttgaccatgtacggcataatccagtttatcagtgcattactgctctattggcaactacaactctttggaaattaccagtatctcatgcaagatgtagccattactttgatggtctgtttaacaatgagttcaactcatgcctacccaaagctggctccatatagaccagcaggacagctcctttctccccctttactgctttcaatatttttgaattcctgtttctcctgcattgtgcagatcagtgcatttctctatgtgaagcagcagccttggtattgtgaggtctaccaatacagtgagtgttttctggccaaccaaagtaatttttcaacaaatgtgagtttggaaagaaactggactggaaatgcaactctgattcctggttcaattttaagttttgagaccaccacactgtggcccatcaccaccatcaactatatcacagtagcattcatcttttctaagggaaagccatttcgaaaacccatctatacaaactatatattttcatttctgctgctagctgccttgggcctcacaattttcattctgttttctgactttcaagttatataccgtggaatggagttgatcccaaccataacatcgtggagggttttaattttggtggtagccctcacccaattctgtgtggctttctttgyagaggattccatccttcaaaatcatgaactctggctgttgatcaaaagagaatttggattctactctaaaagtcaatataggacttggcaaaagaagctagcagaagactcaacctggcctcccataaacaggacagattattcaggtgatggcaaaaatggattctacatcaacggaggctatgaaagccatgaacagattccaaaaagaaaactcaaattgggaggccaacccacagaacagcatttctgggccaggctgtaatcagaattgtcgtcgtacatgctcaacagcattgcttttttccccaaaattaacacattgtggagaagtgatgatactctycccttacctttcctctctccattcaagcattcaaagtatattttcaatgaattaaaccttgcagcaagggaccttagataggcttattctgactgtatgctttaccaatgagagaaaaaaatgcatttcctgtatcatccttttcaataaactgtattcattttgcatag

SEQ ID NO: 661 - DNA, 1996 bp, Homo sapiens
ctcttcagggatgagtcatgtggtgattgaaaatgtgcttgggctggaccagcagtttgctggcctagacctggcctattcagataatcagagtgggggaagtacagccagcaaagggcactatatcccttttcrttgaggaacagagcagctactaaggattctaccataaagacagtttagggtggcgttctagcaaagataaggatgcctacagcagttttgaatctcctaatgattcaagcactaagtctagcttcttcagagatcatggaagtggatcaaggggagggtttgataatcatggatggagtgattatgatggcactggcagccattgtgacagaagtggctttggcaaattagcatgtggtgaaaacagtcactggtgtgacaaataagatgaagatgattggtcaaaaccactcccaccaagtgaatgctggaacaggaactcttttctggaggcaacactgggattaattttgagaaatacgatgacattctagttgaggcaacagacagcaattgtcctccacatattgaaagtttcagtgatgttgagatgggagaaactatcatgggaaacatggaggttattatactagcctgactccagtgcaaaagcwtgctgttactattagaaaagagaaaagagacttgatggcttgtgcccaaacagggtctggaaaactgcagcatttctcttgcccatgttgagtcagatgtattcagatggtccaaaggaggctttgagggccatgaaggaaaattaaaggtgagggcgcagcaaacagtacccaatcttcttggtattagccccaagaagagaattggcaatacagatcaatgagaaagcaagaaaattttcgtactgatctagagttcctccttgtgtgatttatggtggtgctgttattgttcagcagatttgagtcttagaaggtggatggcacttgctactagccactccaggatatctagtggatatgatggaaagaggaaagattggattaaacttttatgaatacttggtgttagaagaagctgatcagatgttggatatggggtttgagcctcagatacatagaaaagttgaacaagataccatgcctycaaagggtgtccaccaaactatgatgtttagtgctacttggcctaaggacatacagatgctcgctcatgatttcttcaatgaatatattaataccttattggctgtatggaggagttggctctacctctgagaacatcacaaagaaagttgtttgggtggaagaatcagacaaagttgtttctgcttgacctcctaatacatccacttgatcccaggcaagtacgcactaaccttaggtttatggagaccaaaaagggtttttattctctagaggatatcttataccatgaaggatagtcatgtaccagtatctatggacaccattctcagagggatagggaagaagctcttcaccagttaccctcaggaaaaagcccaatgctagtggctatagcagtagcagtaagaggactggacmtttcaaatgtggaacatgttatcaattttgatttgccaagtgatattgaagaatatgtatatggcattggccatacaagatgtgtagaaaaccttggcctggccacctcgttctttaatgaggggaacataaatatcactaaggatttgttgcatcttcttgttgaagctaaacaagaagtgccatcttggttagaaaatatggcttatgaacaccactaccagggtagtaattgtggacgttctaagagtggcagatttagtggaggatttggtgccagaggctactgacaaaatagtggtgcyagccgttccagtttcagcagcagccatgcaagcagcagacacagtggtgraggtggccacggcagcagcagmagatttggtggaggtggctatggaggcttttgcaacactaatagatatggaggaaattataactcccagagagttgactggtgg

SEQ ID NO: 662 - DNA, 1296 bp, Homo sapiens
ctactctacgaggttgctgacattggtttggccgcctggggatgcaaggccctggacactgaggagaacaagaagccaggcctgatgcacgtgtaggagctgtactcagcctccaagccactgaagagcgtccgcatcactggctgcctgcacatgactgtggagacagtcgtcctcactgagaccctccttgtcctgggtgctgaagtgcagtggtccagctgcaacatcttctccacccaggaccatgcagcagctgccattgccaaggctgggattccagtgaacgcctggaagggagaaacggaggagaagtacctttggtgcaccaagcagacactgtacttcaaggacaagctcctcaacatgattctggacatcactgggggcctcaccaacctcactcacactaagtacccacagctcttgtcgggcatcagagacatctccgaggagaccatgactgaggtccacaacctatacaagatgatggccaatgggatcctgaaggtgtccaccatcaacgttaatgattctgtcaccaagagcaagtttgacaacctctatggctgccaccagtccctccccagatggcatcaagtaggccataggtgtgatgattgccagcaaggtagctgtggtagcggtctatggtgatgtgggcaagggctgtgcccaggccctgcagggattcggggctcacgtcattatcaccgagatygaccccatcaatgcactgcaggctgccatgcagcgctatgaggggaccaccatggacaaggcctgtcaggagggcaacatctttgtcaccaccacaggctgtgttgacatcatccttggctagctgcccaacaggcactttgaacagatgaaggatgatgccatcgtgtgtaacactggacactttgacgtgaaaatcgatgtcaggtggctcaacaagaatgctatgaagaaggtgaacatcaactccagatggactagtactggctaaagaatgggcgtggcaccatcctgctggctgagtgtcagctggtctacctgggttgtgctatggaccaacccagctttgtgatgagtaactccttcaccaaccatgtgatggtgcagattgagctgtggacccactcagataagtaccccattgaggttcacttcctgcccaggaagctggatgaggcagtggctgaagcccatctgggcaaggtgaacatgaaactgaccaagcagactgagaagcaggcccagtacctgggcatgtcctgtgatagtctcttcaagctggatcactaccactac

SEQ ID NO: 663 - DNA, 468 bp, Homo sapiens
atggtcaaccctactgtgttcttcgacatcaccgtcgatggcgagcccttgggcagcgtctcctycgagctgtttgcagagaagtttccaaagacagaagaaaactttcatcttctgagcactggagagaaaggatttggttataaaagttcctgctttcacagaattattccmgggtttatgtgtcggrgtgatgacttcacatgccataacagcactggtggcaartccgtctatggggagaartttgttgacgagaacttcgtcctgaagcatacagatcctggcatcttgtccagggcaaatgctggacccagtacaaatggttcccagttttttacctgcactgctaagaccgagtggttcggcaaggtgaaagaacgcatgrttattgtggaggccatggggcgctttgcggggaatgggaagaccagcaagaagatcgctgttgctgactgtgggctactc

SEQ ID NO: 664 - DNA, 651 bp, Homo sapiens
atgcccgtgacactggggtactgggacatctgagggctggcccacgccgtctgcytgctcctgcaatacacagacttaagctatgaggaaaagaagtayatgmtgggggacgctcctgaytatgacagaagccagtggctgaatgaaaaattcaagctgggcctggactttcccaatctgccctacttgattgatggggctcacaagatcacccagagcaaggccatcytgggstgcattgcctacaagcacaacctgtgtggggagacagaaggggagaagatttgggaagacattttggagaaccagcttgtggacaaccacgtgcagctggccagactctgctacaacccagattttaagaaactgaagccagaatacytgsaggmactccctgcaawgctgaagctctactcacagtttctggggaagcagctattgtttcttggggacaagatcacacttgtggatttcatcgcgtatggcatccttgagagaaaccaagtatttgagcccargtggttggaygccttcccaaayctgaaggacttcatctcccgatttgagggcttggagatctctgcctacatgaaatccagctgcttcctcctgagacctgtgttcacaaagatggctgtctggggcaacaag

SEQ ID NO: 665 - DNA, 1061 bp, Homo sapiens
tccctgagacatcatggtgaaggtgaaggccagagtcgacagatttggtcatgttaggtgtctggtcaccagggctgcttttaactctgctaaagtagatattgtggccatcagtgacctcttcattgacctcaactacatggtctacatgttccagtatggttctamccatggcaaattccatggcactgtcaaggctgagaacaggaagcttgtcatcactggaaatctcatcaccatcttccaggagcgagatccctccaaaatcaaatggggtgatgctggcactgagtacagtgtggagtccaccagcatcttcaccatcatggagaagtctggggctcacttgcagggaggagccaaaagggtcatcctttctgccccctctgccaacaccctgatgttcgtgatgggcgtgacccatgagaattatgacagcagcctcaagatcatcagcaatgcctcctgcaccatgaattgcttagcrcccctggccaaagtcatccgtgacaactttggtatcatggaaggactcatgaccacagtccatgctgtccctgccacccagaagactgtggatggaccatccaggagactgtggtgtgatagccatggggctctccagaacatcatccctrcccctagtgacgctgccaaggctgtggccaaggtcatccctgagctgaatgggaagctcactggcatggccttctgtgtccccactgccaacttgtcagttgtggatctgacctgctgtcttgaaaaacctgccaaatatgatgacatcaagaaggtggtaaagcaggtgtcagagggccccctcaagggcatcctgggctacactgagtaccagcttgtctcctctgacttcaacagcracacccactcttccaccttcgacgctggggctagcattgccctcaacgaccactttttcaagctcatttcctggtatgacaatgaatttggctacagcaacagggtgatggacctcatggcccacatgtcctccaaggagtaagacccccagaccaccagccccagtgagagcacaagaggaa

SEQ ID NO: 666 - DNA, 2168 bp, Homo sapiens
ggctacrcagcttgctcctggcacrggcaccttgaatctcctcctcacacagatggagaccatgcttgatttcctgaacttgtagtaagaagaaggaaaacacagcacgctggagccaacagagttaagaggaagatttatgagtcatggaaccctccatcagatttggaagaaagtagaatgagcgcagaggtgacagacagccactgaggcccayggacaatctccacctcasgcttctctatcaaacttgaagatttattagtaatatgctgcctttsgaagatgaaaacaaactagtgccaaggaggcgtattcttcaatatttggaatagacgtgttctcaagacaatggcttcaaaggtctcctgtttgtatgttttgacagttgtgtgctgggccagcgctctctggtacttgagtataactcgccctacttcttcttacactggctccaaaccattcagccacctaacagttgccaggaaaaacttcacctttggcaacataagaactcgacctatcaacccacattcttttgaatttcttatcaacgagcccaataaatgtgagaaaaacattccttttcttgttatcctcatcagcaccactcacaaggaatttgatgcccgtcaggcaatcagagagacgtggggggatgagaacaactttaaggggatcaagatagccaccctgttcctcctgggcaagaatgctgatcctgttctcaatcagatggtggagcaagagagccaaatcttccatgatatcatcgtggaggactttattgactcctaccataaccttaccctcaaaacattaatggggatgagatgggtggccactttttgttcaaaagccaagtatgtcatgaaaacagacagcgacatttttgtaaacatggacaatcttatttataaattactgaaaccctccaccaagccacgaagaaggtattttactggctatgtcattaayggaggaccgattcgggatgtccgcagtaagtggtatatgcccagggatttgtacccagacagtaactacccacctttctgttcggggactggctacatcttttcagccgatgtagctgaactcatttacaagacctcactccacacaaggctgcttcaccttgaagacgtatatgtgggactgtgtcttcgaaagctgggcatacatcctttccagaacagtggcttcaatcactggaaaatggcctacagtttgtgtaggtatcgccgagttatcactgtgcatcagatctctccagaagaaatgcacagaatctggaatgacatgtcaagcaagaaacatctcagatgttaggatttttaccaaygtaaatatgtttcttttctttttttaagaaatgggacctaaggtgttggtattttccaggtgtcgggggaaatgaactggtgaaggggttttgtaaagtttttgcttcctgctatmagttcttttcttggattaccaatttatgaatgttagactctggtcatagaaacaataaatgagttagaagggccagatttcattctcagtcccagagcattgctatttatctcaaaaagtgacttccaaacaactcttaggattgacgtaccgtgcatctgagataaaaatttggttctgggaaactgaaactcacagtaatgtgtcatatcatccctgcaaaaattaatacacaaatagaaaccattttcaaaagcaattcagaaaggatgcacagtcaggaagacacactggatgtgattattaatatcgtgtgtgttgttacattatatttttacatatattcccatgtaatgtgtacagtctttgcagttccaccaagaaatgaacttggtacctgcagagtggctgcagttaaatagatgggagtttaaatttgagaatcaaacattctatgtgtttggaagacaactctgcttgctcatccaaggattaaatctggtcagcaggtggaatgtgtataaaatgctacttaacaaagtaaacaaaagattttttttttctttttttttctttcttttttgktttgctctttcagaacaaacattaaatggtgcctccaaggaaactttgccaaatataatctcacctgcttccttccagacagtgtcgctaagtgcatttcacagtttttggatctggcaggc

SEQ ID NO: 667 - DNA, 2171 bp, Homo sapiens
ggctacrcagcttgctcctggcacrggcaccttgaatctcctcctcacacagatggagaccatgcttgatttcctgaacttgtagtaagaagaaggaaaacacagcacgctggagccaacagcagagttaagaggaagatttatgagtcatggaaccctccatcagatttggaagaaagtagaatgagcgcagaggtgacagacagccactgaggcccayggacaatctccacctcasgcttctctatcaaacttgaagatttattagtaatatgctgcctttsgaagatgaaaacaaactagtgccaaggaggcgtattcttcaatatttggaatagacgtgttctcaagacaatggcttcaaaggtctcctgtttgtatgttttgacagttgtgtgctgggccagcgctctctggtacttgagtataactcgccctacttcttcttacactggctccaaaccattcagccacctaacagttgccaggaaaaacttcacctttggcaacataagaactcgacctatcaacccacattcttttgaatttcttatcaacgagcccaataaatgtgagaaaaacattccttttcttgttatcctcatcagcaccactcacaaggaatttgatgcccgtcaggcaatcagagagacgtggggggatgagaacaactttaaggggatcaagatagccaccctgttcctcctgggcaagaatgctgatcctgttctcaatcagatggtggagcaagagagccaaatcttccatgatatcatcgtggaggactttattgactcctaccataaccttaccctcaaaacattaatggggatgagatgggtggccactttttgttcaaaagccaagtatgtcatgaaaacagacagcgacatttttgtaaacatggacaatcttatttataaattactgaaaccctccaccaagccacgaagaaggtattttactggctatgtcattaayggaggaccgattcgggatgtccgcagtaagtggtatatgcccagggatttgtacccagacagtaactacccacctttctgttcggggactggctacatcttttcagccgatgtagctgaactcatttacaagacctcactccacacaaggctgcttcaccttgaagacgtatatgtgggactgtgtcttcgaaagctgggcatacatcctttccagaacagtggcttcaatcactggaaaatggcctacagtttgtgtaggtatcgccgagttatcactgtgcatcagatctctccagaagaaatgcacagaatctggaatgacatgtcaagcaagaaacatctcagatgttaggatttttaccaaygtaaatatgtttcttttctttttttaagaaatgggacctaaggtgttggtattttccaggtgtcgggggaaatgaactggtgaaggggttttgtaaagtttttgcttcctgctatmagttcttttcttggattaccaatttatgaatgttagactctggtcatagaaacaataaatgagttagaagggccagatttcattctcagtcccagagcattgctatttatctcaaaaagtgacttccaaacaactcttaggattgacgtaccgtgcatctgagataaaaatttggttctgggaaactgaaactcacagtaatgtgtcatatcatccctgcaaaaattaatacacaaatagaaaccattttcaaaagcaattcagaaaggatgcacagtcaggaagacacactggatgtgattattaatatcgtgtgtgttgttacattatatttttacatatattcccatgtaatgtgtacagtctttgcagttccaccaagaaatgaacttggtacctgcagagtggctgcagttaaatagatgggagtttaaatttgagaatcaaacattctatgtgtttggaagacaactctgcttgctcatccaaggattaaatctggtcagcaggtggaatgtgtataaaatgctacttaacaaagtaaacaaaagattttttttttctttttttttctttcttttttgktttgctctttcagaacaaacattaaatggtgcctccaaggaaactttgccaaatataatctcacctgcttccttccagacagtgtcgctaagtgcatttcacagtttttggatctggcaggc

SEQ ID NO: 668 - DNA, 1357 bp, Homo sapiens
ctgaactgctgagtctgacacttaacaggacttcggcattcccctgaatacagactagatcagagattttatttttttaattgaaaagtaacttgggttctctttagaaacccttatttggtgtgcgcatctggctatttcacagagatttcagttttgcaaagaagtcggagttgatttcttccctcagacaagctattggttgttggtgggcaacagaagttgctcagcatagacaggggaaaaaacggttacggatgagactgaaagaaaacctcaaaggagaactctgagaattcatctcaggatgaagctgcaagggcaaaggagaagtacttgtgacacaagcaaatgggtccattgatcaacagatgcaagaagattcttctcccaactactgtacctcctgcaacgatgagaatctggctccttggaggcctgctgccattcctgctgctcctctctggcctgcagagacccacagagggttctgaggttgcaattaaaatcgacttcgacttcgcaccaggttcttttgatgatcagtaccaaggctgtagcaaacaggttatggagaaactaactcaaggggattatttcacaaaagacatagaagcccagaagaattattttaggatgtggcaaaaagcccacttagcctggcttaaccaagkaaaagttctaccccagaacatgactaycacacacgctgtggctattttgttttayacattgaacagcaatgttcattctgactttactagagccatggcctctgttgccaggactccayagcagtatgaacgttcattccacttcaaatatttacactactacctcacctcagcaatccagctgctgaggaaagacagcatcatggagaatggcactctgtgctatgaggtgcattataggacraaggatgtccactttaatgcctacacaggggccaccattckatttggccaattcctytccacatccctcctgaaagaagaggcacaggagtttgggaaccagacactatttaccatattcacctgcctgggtgcacctgtacagtacttctccctcaagaaggaagtcttgatccctccctatgagctgtttaaagttataaatatgagctaccacccaagaggaractggttgcagttgaggtcaactgggaacctgagcacatataactgtcagctgctaaaagcttccagcaagaaatgcatccctgatcctatagctattgcatctstctcctttttgaccagtgtcatcatcttttccaaaagcagagtataaagaaatcttgtggctccttttatttaaaaaaaatatttaaataaaatcttttttattggcc

SEQ ID NO: 669 - DNA, 779 bp, Homo sapiens
ccctctcctagaaatgtgatgcccaagactttggatgggcaaataaccatggagaagactccaagttactttgtgacaaatgaggctcccaagcgcattcactccatggccaaggacatcaaactgattgtggtggtgagaaaccccgtgaccagggccatctctgactacacgcagacactgtcaaagaaacccgagatccccacctttgaggtgctggccttcaaaaaccggaccctcgggctgatcgatgcttcctggagtgccattcgaatagggatctatgcgctgcatctggaaaactggctccagtatttccccctctcccagatcctctttgtcagtggtgagcgactcattgtggaccccgccggggaaatggccaaagtacaggattttctaggcctcaaacgtgttgtgactgagaagcatttctatttcaacaaaaccaaggggttcccttgcctaaagaagccagaagacagcagtgccccgaggtgcttaggcaagagcaaaggtcggactcatcctckcattgacccagatgtcatccacagactgaggaaattctacaaacccttcaacttgatgttttaccaaatgactggtcaagattttcagtgggaacaggaagagggtgataaatgargctagagaggcagaggaaggctagtcaataagctaaggaggctccttgcctgagtccttgaataccccagcttctgcagcttcacttgctggagtgccaagtagatctcctcctccttcatgcagccagg

SEQ ID NO: 670 - DNA, 3436 bp, Homo sapiens
tcaatgcactgttcaaggatgtttgagagattttctgtcttgcctgaatacaaaacactgtagggaacctctttgtgcttgactttgcacacacacgggatcttcagggtgggtacatttaaaactgacaagtattgccaaattgccccccaacgtagtttttacaccccacctactactctcagtgaaaaatcaggccctttttattttaagggctaaattgctaatccctgtgtgaaaatgggtgttaacaaaataaaaaataaggaaaatatgcaggcttacccaattttgttatctatacattttacagtctctaatacttagcatagctcctttgggtgtctgcccaccacccttctttctgaacgtggggttccctgggctttccttgtttgacttcagacctggatctaatagggatctggaggtagaatcaagacgaatgttccctttggccttaggtgagtcctttgcatctctgaggccctgttgatgacatccagttctctagacctctgcccaaaccagagcaatccctcctcaaatatgctaagcagaaatgcagacaatataagacacactmtatttatattttaggagtttacattaccttcccttctgtttggaaaccaacatctctcaaaattaggtatagttaacacagaataccccaaaataccaccattcttcataattccatttccttatttctggattctttcaagggtaaaaaccttgtttcattcatctttggggcagcatttgcctagtatgtggtaggcgcccagtagattttggataaactgacctgattttctgttaatattccaactggattatttctttctcctcttacagaatgaagatattcaaatgttattttaaacataccctacagcagaaagttttcatcctgtttttaaccctatggctgctctctttgttaaagcttctaaatgtgagacgactctttccgcaaaaagacatttacttggttgagtactccctaagtacctcgccttttgtaagaaacagatacactcatgttaaggatgaagtcaggtatgaagttaactgttcgggtatctatgaacaggagcctttggaaattggaaagagtctggaaataagaagaagggacatcattgacttggaggatgatgatgttgtggcaatgaccagtgattgtgacatttatcagactctaagaggttatgctcaaaagcttgtctcaaaggaggagaaaagcttcccaatagcctattctttggttgtccacaaagatgcaattatggttgaaaggcttatccatgctatatacaaccagcacaatatttactgcatccattatgatcgtaaggcacctgataccttcaaagttgccatgaacaatttagctaagtgcttctccaatattttcattgcttccaaattagaggctgtggaatatgcccacatttccagactccaggctgatttaaattgcttgtcggaccttctgaagtcttcaatccagtggaaatatgttatcaacttgtgtgggcaagattttcccctgaagtcaaattttgaattggtgtcagagttgaaaaaactcaatggagcaaatatgttggagacggtgaaacccccaaacagtaaattggaaagattcacttaccatcatgaacttagacgggtgccttatgaatatgtgaagctaccaataaggacaaacatctccaaggaagcacccccccataacattcagatatttgttggcagtgcttattttgttttaagtcaagcatttgttaaatatattttcaacaactccatcvttcaagacttttttgcctggtctaaagacacatactctcctgatgagcacttttgggctaccttgattcgggttccaggaatacctggggagatttccagatcagcccaggatgtgtctgatctgcagagtaagactcgccttgtcaagtggaattactatgaaggctttttctatcccagttgtactggatctcaccttcgaagcgtgtgtatttatggagctgcagaattaaggtggcttatcaaagatggacattggtttgctaataaatttgattctaaggtggaccctatcttgattaaatgcttggcagaaaagcttgaagaacagcagagagactggatcactttgycctcagaaaagttatttatggatagaaatctcactaccacatcatgatagtaaaatcaggatggaaataagagggtgcctgataaatggagtcagtrtggaattgaatacyatactatgcccaatactgtttaaactcagtcctcccatattttaaaaggtgtccaaaattccatacacaagggaaagtgatctagcctttgatgttattagcctgcagttggctaggtttttttaatatttgtttttgcttgtaatctcactgagccaaatcagagatcttaaacattcagtcagtcatcaaacattattgagcacctaactatatgacaggcacttttttagagactgcggcttatcctcatcatagcaacctcggtatctttaagttctccacataacagtcaggattctactgaagaagcttttgaagtttgtggtaatcgtctgatcatataaaccacccatttcagagtagtgtttaagtactgtgaccaacactccacttgtctcttaactcagctttcaagacatttcttaaccatcagagcagaggaggaaagactcactacctcagaaaaatctcaaagaatagtccaatttcctgcttgccaaagcataatctgccttttggtgcattacttggtcaattcagggttgaggagactgttggggggcatttataatgtatgaaagttaaggaagggggtgaggatgtgggttgggacaggtagtacctaaagaggagcgaagggatttatacaacatttttatcatgttacaaaacagtatcatgaatggcctcctttttagttcaactgtttctttaaaatgcatttactgattaaaaataagaactgaccaatagctccaagtgtcacacaccagaacattaagcctaagtcctcaattcataagttatcattctagataagtttctttacaatggaatactttctatggaatcattataattctgttgtatggaactatcaagctaagagtcactaaactttcttcaaaaggttgtgtgaaatatgacagctttctaaattaatttgtatagtcatttaaaattttttcttctctggcaactgtccaactggaatccagatttaaagtgataaaagctctaagtttcttgcagtctttttctcagcttagttccagagagaaaaaagctaattttcctaaggacacagcaagaatattcattaaggatattttctaaaacccacacttgagaaaaccacccaatga

SEQ ID NO: 671 - DNA, 303 bp, Homo sapiens
atggtgctctgtgcttgcggcgagagcagtgaagtggtgagaccagtttctgaatgtaaacwttttatgacaayggctgcgaagatgcccaaacacatggagagaaaccrtaaaggcagtcacatagtgaccagatcacacacagatcagaatggtcgtcttctaatcactatttggcatttgaacccaactgcatgcaacaaaggaaagtgtgaaaggaacaatggtgtcggcactgggctgtttgggggctgttttgttatgtacaatggactttctttgactgaaggaaacaagagatga

SEQ ID NO: 672 - DNA, 3502 bp, Homo sapiens
cagcagcgcgcaggcgcacgtcagtccccgcgcttttcggaggytgccagcgtcccacaccagccgcaggtgaaaaccggcagaaagacattaagagattttcctgcagtcactgctggcagatgatagagccaggatttgaaagcaggcagcctggctccagaccctgtgctcttaactcccgttttgcatcaagaacagaatcctatgaaaggcttgyacagtgcttggatagcagcatcaaggagcattgtgtacatgcagaagtgcacagtacctggagtgaaactgcttgtgttcgatttctgataccattcataactggctgtgtgatctcaaaacctctaaaatgcagacctccagctctagatctgtgcacctgagtgaatggcagaagaattacttcgcaattacatctggcatatgtaccggaccgaaggcagatgcataccgtgcacagatattacgcattcagtatgcatgggcaaactctgagatttcmcaggtctgtgctaccaaactgttcaaaaaatatgcagagaaatattctgcaattattgattctgacaatgttgaatctgggttgaataattatgcagaaaacattttaactttggcaggatctcaacaaacagatagtgacaagtggcagtctggattgtcaataaataatgttttcaaaatgagtagtgtacagaagatgatgcaagctggcaaaaaattcaaagactctctgttggaacctgctcttgcatcartggtaatccataaggaggccactgtctttgatcttcctaaatttagtgtttgtggtagttctcaagagagtgactcattacctaactcagctcatgatcgagaccggacccaagacttcccggagagcaatcgtttgaaactccttcagaatgcccagccacctatggtgactaacactgctaggacttgtcctacattctcagcacctgtaggtgagtcagctactgcaaaattcyatgtcacaccattgtttggaaatgtcaaaaaggaaaatcacagctctgcaaaagaaaacataggacttaatgtgttcttatctaaccagtcttgttttcctgctgcctgtgaaaatccacagaggaagtctttttatggttctggcaccattgatgcactttccaatccaatactgaataaggcttgtagtaaaacagaagataatggcccaaaggaggatagcagcctgcctacatttaaaactgcaaaagaacaattatgggtagatcagcaaaaaaagtaccaccaacctcagcgtgcatcagggtcttcatatggtggtgtaaaaaagtctctaggagctagtagatcccgagggatacttggaaagtttgttcctcctatacccaagcaagatgggggagagcagaatggaggaatgcaatgtaagccttatggggcaggacctacagaaccagcacatccagttgatgagcgtctgaagaacttggagccaaagatgattgaacttattatgaatgagattatggatcatggacctccagtaaattgggaagatattgcaggagtagaatttgctaaagccaccataaaggaaatagttgtgtggcccatgttgaggccagacatctttactggtttaaggggaccccctaaaggaattttgctctttggtcctcctgggactggtaaaactctaattggcaagtgcattgctagtcagtctggggcaacattctttagcatctctgcttcatccttaacttctaaatgggtaggtgagggggagaaaatggtccgtgcattgtttgcygttgcaaggtgtcagcaaccagctgtgatatttattgacgaaattgattccttgttatctcaacggggagatggtgagcatgaatcttctagaaggataaaaacagaatttttagttcaattagatggagcaacaacatcttctgaagatcgtatcctagtggtgggagcaacaaatcggccacaagaaattgatgaggctgcccggagaagattggtgaaaaggctttatattcccctcccagaagcttcagccaggaaacagatagtaattaatctaatgtccaaagagcagtgttgcctcagtgaagaagaaattgaacagattgtacagcagtctgatgcgttttcaggagcagacatgacacagctttgcagggaggcttctcttggtcctattcgcagtttacaaactgctgacattgctaccataacaccggatcaagttcgacccatagcttacattgattttgaaaatgcttttagaactgtgcgacctagtgtttctccaaaagatttagagctttatgaaaactggaacaaaacttttggttgtggaaagtaagtgggatacttggaatcaaggcatctctgtaktacagtcttctttattttttagcatagaaagttggggatgtgttaattgtatttttaagaatatattctaarttctgtacttcaaataatagcacagattttacatctgattgacatagtgtatgttaatgtaagttttgctttccagtgattacctgatacgtaagcctatttgaacaaagtgagaatgaacttttgtttctaagaagtctttatcttgaagctatataacatgaaaagtgagctcaaattttttttagttgaagattacatataaagttgtgtctgattaatattcatcttttattgaagaaagtgccttctgatggccacataattcttaatgtcagctagtataatggtttacatttggacaaagtattgcttagtgttatttaagtagatttaagatctyaaagctaaagtgccaatttttactttcttcagccaatttgttacctcttttatggtttttaatttttatcaggactaacattttcagaaatagcaaggtgtgatctagtattagattcacagaactgaaaggttaattaagaatgttggttattttcacgggagcgtgtgatatttaacattaatattttatttgacactacagcctgtaatactgctctctttcaaaarcaagttttcagatttttataacagacccattttgttttatgaaacatgttcattacagaaacatgagaaaatagagataagtaaaaagaataaaagtcactattatcctaccactttgcgggacacactattaatatttaagcatagattcttccagatgttttgttttatacagcrgtaggattgtgtaatgtattctctcttgtagcctattcttcaaagcgtatcttmactttccatgttaacataaatgtccttttatgattgtctaggattccatggatggatggaatataattgagtcatctggtagagcgcatataggacaggacgctaggttgtttatcttttgtttattgtaaaggaactatgtgggatgcatttggtgatctttttaaaaaatgtataaatttcttgagtaattcctggattaaagaatatgcacttttta

SEQ ID NO: 673 - DNA, 2128 bp, Homo sapiens
gattcaacacgcgttcctcttggaaaaagcaaggactacatcaatgctagttatattagaatagtcaattgtggagaagagtatttttatrtcgctactcaaggaccactgctgagcaccatagatgacttttggcaaatggtgttggaaaataattcraatgttattgccatgataaccagagagatagaaggtggaattatcaaatgctaccattactggcccatttctctgaagaagccattggaattgaaacacttccgtgtattcctggagaactaccagatacttcaatatttcatcattcgaatgtttcaagttrtggagaagtccacgggaactagtcactctgtaaaacagttgcagttcaccaagtggccagaccatggcactcctgcctcagcagatagcttcataaaatatattcgttatgcaaggaagagccaccttacaggacccatggttgttcactgcagtgccggcataggccggacaggggtgttcctatgtgtggatgtcgtgttctgtgccatcgtaaagaactgttcattcaacatcatggatatagtggcccaaatgagagaacaacgttctggcatggttcaaacgaaggagcagtatcacttttgttacgatattgtgcttgaagttcttcggaaacttctgactttggattaagaaagacttctgttgcctctcacttgaaattaccaagtgggtttgcacctcctcataaagaacatgtttgcactgtgctgaagggctttgctatgcatacaatctgctttcttggtttatcagtttattttctttctaaaagctccctgaagggcaatatcatttggcttggggtgatcagtgtttacttattgatcttgctagacaatatcaaaataacttcccacattttccagtgaaacagatgttacataaaacgattgcagcttggctatttggttgaagggattacagagcccaataaaggatttaaaatatattcattaagattttatttggaaaggtggctggagagagctgaggatttccaggactttgtaagttcttattctgggagaacataaggccaataatcatgacctcttccaggcatttttaagacagatgtctattcatgttctttagctagagcctgtactttttgctggcatttgaataacccagtttaaaaagagtccagttagggtggactaactttggacacaaattggcttccatttcctacattttcatactgctgccttcctacagctgctagaccaagacctgttggtctgggaagcatttcatggatagggagagctcctctcggtgaacagtccaaaactaaaatagatgtttatatagaaagcccaagaggagayttttgccatgcctgagttctttcctatcccaccctaacacttaacatattacttagtctgctttgttaaaagcaagtattacctttaacttgcctcttactctttgccctttagctaactaataaagtttgatataggcattattatataattctgagtcattcatggtatctctcatgtttgatgtatttttcaaactaagatctatgatagttttttttccagagttccattaaatcatttatttcctttactttctcacctctgttgaaacatttagaaactggatttgggaacccaattttggaaaaccagattcatagtcatgaaaatggaaacttccatattctgtttttgaaaagatgtggccattattacagtaattttattataggactttgcctcgtacaattaatagtgatattttggacaaggagttctggtgacaagctatacctaattataagctataaaacaatagatatgagtgtttgtacagtttaactcaatggagatcagaatattctatgtattgagaaaatgtttaatatcaatctataaatcttgaatttctaagaggcttattttgttcttttggctgaatgagtatatttgaattggttgaataattaataattctcattgtaaaaataattatatgccaaaaatatatttgatgttaaatcaaatagatgattctgtttacattgttcatatgaataataatctgtgttaatttcattttg

SEQ ID NO: 674 - DNA, 1170 bp, Homo sapiens
atggtttccgctagtgggacatcattttttaagggtatgttgcttgggagcatttcctgggttttgataactatgtttggccaaattcacattcgacacagaggtcagactcaagaccacgagcaccatcaccttcgtccacctaacaggaacgatttcttaaacacttcaaaagtgatactcttggagctcagtaaaagtattcgtgttttctgtatcatctttggagaatccgaagatgagagttactgggctgtactgaaagagacctggaccaaacactgtgacaaagcagagctctacgatactaaaaatgataatttgttcaatatagaaagtaatgacaggtgggtacagatgaggaccgcttacaaatacgtctttgaaaagtatggygacaactacaactggttcttccttgcacttcccactacgtttgctgtcattgaaaatttaaagtaccttttgtttacaagggatgcatcccagcccttctatctgggccacactgttatatttggagacctcgaatacgtgactgtggaaggagggattgtcttaagcagagagttgatgaaaagacttaacagacttctcgataactctgagacctgtgcagatcaaagtgtgatttggaagttatctgaagataagcagctggcaatatgcctgaaatatgcaggagttcatgcagaaaatgcagaggattatgaaggaagagatgtatttaatacaaaaccaatcgcacagcttattgaagaggcattgtctaataaccctcagcaagtagtagaaggctgctgttcagatatggctattactttcaatggactgaccccccaaaagatggaagtaatgatgtatggcctgtaccggctcagggcatttggacactatttcaatgacacactcgttttcttgcctccagttggttcagaaaatgactgaggsctggagaataatagacctgtgctgtccaagagcacttgaaatgtggctagtccaaattctgatacagtgtaagtgtaaaatacgtacttcattcaataattcatatattattagaaaacagtatgaagatgtaaaacatctcagtaatatttcatattgactccacattgaaataatgttttggatattttgcattaaataaaatatactattaaaatt

SEQ ID NO: 675 - DNA, 3515 bp, Homo sapiens
ggagtggatagttgggggagctaaccaggggagttgatgcttcttcccaatccccagaaaggcgaatttggggtgtgagcacccagaccagcccttcccagagggactgagagtgaggaggctccctctcagggattagtccccactctgaggccggagtgctcctggcgccggggcggagctgagctccagaagtctgggcgcgcacagctggagggtcacgtggcacggcaccggtcccccttcctgccaacgctgcatttggctcgggcccggtccatggcggcccctcggaccctgcgctgagccccggaggccagggcgtccggggctgcgccacttccgagggccgagcgctgccggtcccggcggtgcgacacggccgggaggaggagaacaacgcaaggggctcaaccgtcggtcgctggagccccccccggggcgtggcctcccgccccctcagctggggagggcggggctcgctgccccctgctgccgactgcgacccttacaggggagggagggcgcaggccgcgcggagatgaggaggaggctgcgcctacgcagggacgcattgctcacgctgctccttggcgcctccctgggcctcttactctatgcgcagcgcgacggcgcggccccgacggcgagcgcgccgcgagggcgagggagggcggcaccgaggcccacccccggaccccgcgcgttccagttacccgacgcgggtgcagccccgccggcctacgaaggggacacaccggcgccgcccacgcctacgggaccctttgacttcgcccgctatttgcgcgccaaggaccagcggcggtttccactgctcattaaccagccgcacaagtgccgcggcgacggcgcacccggtggccgcccggacctgcttattgctgtcaagtcggtggcagaggacttcgagcggcgccaagccgtgcgccagacgtggggcgcggagggtcgcgtgcagggrgcgctggtgcgccgcgtgttcttgctgggcgtgcccaggggcgcaggctcgggcggggccgacgaagttggggagggcgcgcgaacccactggcgcgccctgctgcgggccgagagccttgcgtatgcggacatcctgctctggsccttcgacgacaccttttttaacctaacgctcaaggagatccactttctagcctgggcctcagctttctgccccgacgtgcgcttcgtttttaagggcgacgcagatgtgttcgtgaacgtgggaaatctcctggagttcctggcgccgcgggacccggcgcaagacctgcttgctggtgacgtaattgtgcatgcgcggcccatccgcacgcgggctagcaartactacatccccgaggccgtgtacggcctgcccgcctatccggcctacgcgggcggcggtggctttgtgctttccggggccacgctgcaccgcctggctggcgcctgtgcgcaggtcgagctcttccccatcgacgacgtctttctgggcatgtgtctgcagcgcctgcggctcacgcccgagcctcaccctgccttccgcacctttggcatcccccagccttcagccgcgccgcatttgagcaccttcgacccctgcttttaccgtgagctggttgtagtgcacgggctctcggccgctgacatctggcttatgtggcgcctgctgcacgggccgcatgggccagcctgtgcgcatccacagcctgtcgctgcaggccccttccaatgggactcctagctccccactacagccccaagctcctaactcagacccagaatggagccggtttcccagattattgccgtgtatgtggttcttccctgatcaccaggtgcctgtctccacaggatcccaggggatgggggttaagcttggctcctggcggtccaccctgctggaaccagttgaaacccgtgtaatggtgaccctttgagcgagccaaggctgggtggtagatgaccatctcttgtccaacaggtcccagagcagtggatatgtctggtcctcctagtagcacagaggtgtgttctggtgtggtggcagggacttagggaatcctaccactctgctggatttggaaccccctaggctgacgcggacgtatgcagaggctctcaaggccaggccccacagggaggtggaggggctccggccgccacagcctgaattcatgaacctggcaggcactttgccatagctcatctgaaaacagatattatgcttcccacaacctctcctgggcccaggtgtggctgagcaccagggatggagccacacataagggacaaatgagtgcacggtcctacctagtctttcctcacctcctgaactcacacaacaatgccagtctcccactggaggctgtatcccctcagaggagccaaggaatgtcttcccctgagatgccaccactattaatttccccatatgcttcaaccacccccttgctcaaaaaaccaatacccacacttaccttaatacaaacatcccagcaacagcacatggcaggccattgctgagggcacaggtgctttattggagaggggatgtgggcaggggataaggaaggttcccccattccaggaggatgggaacagtcctggctgcccctgacagtggggatatgcaaggggctctggccaggccacagtccaaatgggaagacaccagtcagtcacaaaagtcgggagcgccacacaaacctggctataaggcccaggaaccatataggagcctgagacaggtcccctgcacattcatcattaaactatacaggatgaggctgtacatgagttaattacaaaagagtcatatttacaaaaatctgtacacacatttgaaaaactcacaaaattgtcatctatgtatcacaagttgctagaccaaaatattaaaaatgggataaaattatacatttytcttctcagttcttttcaaaaggattaatatttttaaagcacatatatgctactttccattagcaagacccatgaagggactgagcagcccagccttccttgagcccccagaggctttgagccatgaaatggcccagccaggggccagtgcccagggttggggcagagagccagcccacagtgcagaacagaatgctgaaacacaacaaaagtaggaagatgtctttggctaaaactttggcattaaataaaagaggcaaacaggatggaaacatgcagccctgccagccaggatggggcagagcaggggcacaggcaatcttgaaagctgactccaacaggggtgagaaccaggcctgggcatgtacctggatggtagaaagctgtgtttcaaccagtttggtgtgcccaggcagggagcgcgtgcaagaaaggaacagggaagggcaggtgggccaccctggccacagccagctcatcaagtaactaaagtggatgtagtgcaaatgtcgcaaccaagtactatggacacgctacctgcttgccttaagggtcatgtggcaatgtggagccaaaggcaggac

SEQ ID NO: 676 - DNA, 2589 bp, Homo sapiens
gttcccacttcctccccgccccaggaaacctgccatggcctcctggtgagctgtcctcatccactgctcgctgcctctccagatcttcagttgcttcaggccatttgaacgtatatgagccggtcgtaggggatatgatggcttagcttgggctcagaggcctgaaaatcgcccccaccaatcacctgtttcccccaatctaccctcctgaaggtcactgacaaagacttcattgtctcctaggagaggctgccatatatccagggctgacgtaattccatcttaatatcagttacattataaaaatttacctcgtgcctgaggccccagagcccaagggtgcaaagcagtaattggtcaaagttcaacttccctcccactctgggctcaggctgtcccctgagggcctgtgttttgagtctctttccagaaccttggtgtgaacttaggtcttggcgtcgggatcccttttcgtcacactcaggtgacctacagggagctccgctcgacactgcaaggcttagaccagttcggtccaacagagraagcaggcaaccaccatgtcatttgaaaacagtttcatcgggatataattcgcaacccatacagtgaatccatttaagatactctgacccatggatcccctgggtgcagccaagccacaatggccatggcgccgctgtctggccgcackgctatttcagctgctggtggctgtgtgtttcttctcctacctgcgtgtgtcccgagacgatgccactggatcccctagggctcccagtgggtcctcccgacaggacaccactcccacccgccccaccctsctgatcctgctayggacatggcctttccacatccctgtggctctgtcccgctgttcagagatggtgcccggcacagccgactgccacatcactgccgaccgcaaggtgtacccamaggcagacayggtcatcgtgcaccactgggatatcatgtccaaccctaagtcmcrcctcccrccybccccsaggccgcaggggcagcgctggatctggttcarcwtggagycaccccctaactgccrgcacctggaagccctggacrgatacttcaatctcaccatgtcctaccgcagcractccgacatcttcacgccctacrgctggctggagccgtggtccggccagcctgcccacccaccgctcaacctctcggccaagaccgagctggtggcctgggcggtgtccaactggaagccggactcvgccagggtgcgctactaccagagcctgcaggctcatctcaaggtggacgtgtacrgacgctcccacaagcccctgcccaaggggaccatgatggagacgctgtcccggtacaagttctayctggccttcgagaactccttgcaccccgactacatcaccgagaagctgtggaggaacgccctggaggcctgggccrtgcccgtggtgctgggccccagcagaagcaactacgagaggttcctgccrcccgacgccttcatccacgtggacgacttccagagccccaaggacctggcccggtacctgcaggagctggacaaggaccacgcccgctacctgagctactttcgctggcgggagacrctgcggcctcgctccttcagctgggcactggatttctgcaaggcctkctggaaactgcagcaggaatccaggtaccagacggtgcgcagcawagcggcttggttcacctgagaggccggcatggtgcctgggctgccgggaacctcayctgcctggggcctcacctgctggagtcctttgtggccaaycctctctcttacctgggacctcacacgctgggcttcacggctgccaggagcctctcccctccagaagacttgcctgctrgggacctcgcctgctrgggacctcgcctgytgrggacctcacctgctggggacctcacctrctggggaccttggctgctggaggctgcacctactgaggatgtcggcggtcggggactttacctgctgggacctgctcccagagaccttgccacactgaatctcacctgctggggacctcaccctggagggccctgggccctggggaactggcttacttggggccccacccgggagtgatggttctggctgatttgtttgtgatgttgttagccgcctgtgaggggtgcagagagatcatcacggcacggtttccagatgtaatactgcaaggaaaaatgatgacgtgtctcctcactctagaggggttggtcccatgggttaagagctcaccccaggttctcacctcaggggttaagagctcagagttcagacaggtccaagttcaagcccaggaccaccacttatagggtacaggtgggatcgactgtaaatgaggacttctggaacattccaaatattctggggttgagggaaattgctgctgtctacaaaatgccaagggtggacaggcgctgtggctcacgcctgtaatyccagcactttgggaggctgaggtaggaggattgattgaggccaagagttaaagaccagcctggtcaatatagcaagaccacgtctctaaataaaaaataataggccggccaggcacg

SEQ ID NO: 677 - DNA, 1145 bp, Homo sapiens
cggattccgggcgcagccgcggctgagcccggggcgttgaatgcgggtggaatttccagtctgggaaggggcggggccttggaccgccgggaagtttggtcctcagcggcttccgtcctgcagcaagtccggaagaaggtccgggggctggagtcctgggacctagctcgggaccggcctggagatggagttcgactgcgagggcctgagacggctgcttggcaagtacaagttcagggacctaactgtggaagaactaaggaatgtaaatgtatttttcccacatttcaaatattccatggacacctatgtttttaaagatagttctcagaaagacctgctgaattttactggcacaattcctgtgatgtatcagggtaatacatataacataccaattcgtttctggattttggattctcaccctttcgctccccctatttgcttcttgaagccaactgcaaatatgggaatcttagtcggaaaacatgtggatgctcaaggcagaatatatttgccctatctccaaaactggagccatcctaaatctgtcattgttggattaattaaagaaatgattgccaagtttcaagaggaacttcccatgtattctctatcatcatctgatgaggcacggcaggtagacttgctagcctatattgcaaaaatcactgaaggtgtttcagatacaaattcaaagagctgggcaaatcatgagaataaaacagtcaataaaattactgtggttggaggtggagaactcggtattgcctgcacattagcaatttcagcaaaggtggagtctcgctctgttacccaggctggagtgtagtggtacaatcttggctcactacagcctccgcctcctgggttcaagcgattctcctgcctcagcctccagagtagctgggactacaggcatgcgccacgacgcccagctaatttttgtatttttagcagagacagggttttgccatgttggccaggctggtctcgaacttctgacctcaagtgatccacctgccctggcctcccaaagtgctgggattacaagtgtgagccaccgtacctggcctgctattacctcttaattagaatttgagttgtattcagtcttttgtcactaaataaatgyttctataaac

SEQ ID NO: 678 - DNA, 3176 bp, Homo sapiens
cggattccgggcgcagccgcggctgagcccggggcgttgaatgcgggtggaatttccagtctgggaaggggcggggccttggaccgccgggaagtttggtcctcagcggcttccgtcctgcagcaagtccggaagaaggtccgggggctggagtcctgggacctagctcgggaccggcctggagatggagttcgactgcgagggcctgagacggctgcttggcaagtacaagttcagggacctaactgtggaagaactaaggaatgtaaatgtatttttcccacatttcaaatattccatggacacctatgtttttaaagatagttctcagaaagacctgctgaattttactggcacaattcctgtgatgtatcagggtaatacatataacataccaattcgtttctggattttggattctcaccctttcgctccccctatttgcttcttgaagccaactgcaaatatgggaatcttagtcggaaaacatgtggatgctcaaggcagaatatatttgccctatctccaaaactggagccatcctaaatctgtcattgttggattaattaaagaaatgattgccaagtttcaagaggaacttcccatgtattctctatcatcatctgatgaggcacggcaggtagacttgctagcctatattgcaaaaatcactgaaggtgtttcagatacaaattcaaagagctgggcaaatcatgagaataaaacagtcaataaaattactgtggttggaggtggagaactcggtattgcctgcacattagcaatttcagcaaagggtattgcagacaggcttgtcctcttagacctctcagaagggactaaaggagccacgatggaccttgaaatcttcaaccttcctaatgtggagatcagcaaagatttgtctgcctctgctcattccaaggtggtgatcttcacagtcaactctttgggwagttctcagtcgtaccttgatgtggtacagagcaatgtggatatgttcagagcccttgtcccagctctgggacattatagtcaacacagtgtcctgctcgttgcatctcaaccagtggaaatcatgacctatgtaacatggaaactgagtacatttcctgcaaatcgagtgatcggaattggatgtaatctggattcacagagattacagtatattattacaaatgttttgaaggcacagacttcaggcaaagaagtatgggttattggcgagcaaggagaagacaaagtgctcacatggagtggccaagaagaagtagtgagtcatacctctcaagtgcagctgtccaacagagccatggaactgctaagagtaaaaggtcaaagatcctggtctgttggactatcagtagctgacatggttgacagtattgtaaacaataagaagaaagtgcattctgtatcagctttagcaaagggatattatgatataaatagtgaagtgtttttaagtttgccttgcatccttggaaccaatggagtatctgaagttatcaaaaccacactgaaagaagatacagttactgagaaactccaaagcagtgcatcctcaatccacagtctccaacaacagttaaaactttgattctcaaatgcaatttgagaggctggacttctacctaaagggaaaagtcatttaattttacctatatataggtttgaggatttctgtatcctgctacttacttttacaaactgcttggttaaagtagagggtttcttgattagctttgtgatgtaaatccttaaggagttatacaaggaggggaaaaattaattttatttggggttcttgagatatctatgctgttctttaaatctacagcaggggtaaacattcatctgcagtgtgcatcaatttaaatcatatatcctaaactaaaagcacaattcatacttcgggaatattttataagtaatatatctttaaaagaaaattaccctttgacttttataatcaacataagttccaggcccagtatggatttacaaaatctgtgtcagttgtacattcacaggatccacagcttaagttactaatgtttcttgtgtaaaatcctgttggtagtaatagtaaagcattgtatttcccttcttcaaattaattacctaccaaaaaatggaaaagaattttacatgcactttaaaatagtaaaatggaaagtgaatttttaaaatatatgcattaaaagtttactttaatttccagtgggacttcctttatgaaattttccataacctcttcctggagtattacaagatctccaacatctcataaactaattgtgatattagtggaaccataagcaaatrtatatttttagtggaaatagattatgaatgaaagccaagcaccttactttaaagccaaaatatgagattttcattaaaaacattggtcataatagggagaggttttttatttgttctgagcaaatcctttaacctctcctgatgatacagttcagagtacacacactttggtgatggatcaagagcaatattttcttatgtgaaagatagcttattattactattgtgacatacaactaatagtaacagttaacatcaacacttcatatataccaggcagcatgataagcactttattattttactgaatcctcacaacagaccactgaggtagggactattgccatcatcattttataaaaggaaattgaggtttagtcctcaagaagtcttggctattaaggggcacttatccatacaacctctactttttctaggcactaaaagggggaaaaggcttaatagccaaaatagttatcaaaagaccctaaagctggggtcctgtacaccatgaaaggattactttcattctcatgtaagggcatgcttttataaaaaacaaacatgggctaggcgcagtgactcacgcctgtaatcccagcaccttgggaggctgaggcgggcagatcacgaggtcaggagattgagatcatcctggctaacatggtgaaaccctgtctctactaaaaatacaaaaagttagccaggcgtggtggcaggtgcctgtagtcccagctactcggaaggctgaggcaagagaatggcgtgaacccggtaggtggagcttgcagtgagcagagatcgcgccactgcactccagcctgggcgacagagcaagactctgtctc

SEQ ID NO: 679 - DNA, 2918 bp, Homo sapiens
caagtgaatgagccgtgccaaaaagacggttggatcctgcatagtggtgagaggggtgatccattctgcctcatcatttaagctgtctggagtacaagttcagggacctaactgtggaagaactaaggaatgtaaatgtatttttcccacatttcaaatattccatggacacctatgtttttaaagatagttctcagaaagacctgctgaattttactggcacaattcctgtgatgtatcagggtaatacatataacataccaattcgtttctggattttggattctcaccctttcgctccccctatttgcttcttgaagccaactgcaaatatgggaatcttagtcggaaaacatgtggatgctcaaggcagaatatatttgccctatctccaaaactggagccatcctaaatctgtcattgttggattaattaaagaaatgattgccaagtttcaagaggaacttcccatgtattctctatcatcatctgatgaggcacggcaggtagacttgctagcctatattgcaaaaatcactgaaggtgtttcagatacaaattcaaagagctgggcaaatcatgagaataaaacagtcaataaaattactgtggttggaggtggagaactcggtattgcctgcacattagcaatttcagcaaagggtattgcagacaggcttgtcctcttagacctctcagaagggactaaaggagccacgatggaccttgaaatcttcaaccttcctaatgtggagatcagcaaagatttgtctgcctctgctcattccaaggtggtgatcttcacagtcaactctttgggwagttctcagtcgtaccttgatgtggtacagagcaatgtggatatgttcagagcccttgtcccagctctgggacattatagtcaacacagtgtcctgctcgttgcatctcaaccagtggaaatcatgacctatgtaacatggaaactgagtacatttcctgcaaatcgagtgatcggaattggatgtaatctggattcacagagattacagtatattattacaaatgttttgaaggcacagacttcaggcaaagaagtatgggttattggcgagcaaggagaagacaaagtgctcacatggagtggccaagaagaagtagtgagtcatacctctcaagtgcagctgtccaacagggatattatgatataaatagtgaagtgtttttaagtttgccttgcatccttggaaccaatggagtatctgaagttatcaaaaccacactgaaagaagatacagttactgagaaactccaaagcagtgcatcctcaatccacagtctccaacaacagttaaaactttgattctcaaatgcaatttgagaggctggacttctacctaaagggaaaagtcatttaattttacctatatataggtttgaggatttctgtatcctgctacttacttttacaaactgcttggttaaagtagagggtttcttgattagctttgtgatgtaaatccttaaggagttatacaaggaggggaaaaattaattttatttggggttcttgagatatctatgctgttctttaaatctacagcaggggtaaacattcatctgcagtgtgcatcaatttaaatcatatatcctaaactaaaagcacaattcatacttcgggaatattttataagtaatatatctttaaaagaaaattaccctttgacttttataatcaacataagttccaggcccagtatggatttacaaaatctgtgtcagttgtacattcacaggatccacagcttaagttactaatgtttcttgtgtaaaatcctgttggtagtaatagtaaagcattgtatttcccttcttcaaattaattacctaccaaaaaatggaaaagaattttacatgcactttaaaatagtaaaatggaaagtgaatttttaaaatatatgcattaaaagtttactttaatttccagtgggacttcctttatgaaattttccataacctcttcctggagtattacaagatctccaacatctcataaactaattgtgatattagtggaaccataagcaaatrtatatttttagtggaaatagattatgaatgaaagccaagcaccttactttaaagccaaaatatgagattttcattaaaaacattggtcataatagggagaggttttttatttgttctgagcaaatcctttaacctctcctgatgatacagttcagagtacacacactttggtgatggatcaagagcaatattttcttatgtgaaagatagcttattattactattgtgacatacaactaatagtaacagttaacatcaacacttcatatataccaggcagcatgataagcactttattattttactgaatcctcacaacagaccactgaggtagggactattgccatcatcattttataaaaggaaattgaggtttagtcctcaagaagtcttggctattaaggggcacttatccatacaacctctactttttctaggcactaaaagggggaaaaggcttaatagccaaaatagttatcaaaagaccctaaagctggggtcctgtacaccatgaaaggattactttcattctcatgtaagggcatgcttttataaaaaacaaacatgggctaggcgcagtgactcacgcctgtaatcccagcaccttgggaggctgaggcgggcagatcacgaggtcaggagattgagatcatcctggctaacatggtgaaaccctgtctctactaaaaatacaaaaagttagccaggcgtggtggcaggtgcctgtagtcccagctactcggaaggctgaggcaagagaatggcgtgaacccggtaggtggagcttgcagtgagcagagatcgcgccactgcactccagcctgggcgacagagcaagactctgtctc

SEQ ID NO: 680 - DNA, 248 bp, Homo sapiens
agcagtggagccaactataggctcaaactagccatcaaagytgccatgatcacaggatctacaaacaggttcggcttcgccattgcccagcgtctggcccacgatagggcccacgtagtcatcagcagcgggaagcagcagaacgtggactgggctgtggccacgctctagggggaggggctgagcatgtgccagacaccctgtgccacacggggaaggctgaggactgggagtggctggtggtcatg

SEQ ID NO: 681 - DNA, 1300 bp, Homo sapiens
acatgtgcatcaaatatgctgaaaggtaatgctatagtagttccgaaattgttggattagggagctctactaatggaaaaacaaatttagatgagtttgctatgagatctggaaatgcagaaggcrtatttggaccagttaaaaacccctggagttattcaaaacaatatagagaaaagaggaagcagaatctcyactttgagaatgaagattcagactggctgataactggaggaagctcaggtgggagtgcagttgccatatcggcattcacatgctatgcggctttaggatcagatactggagggctgaccagaaatcctgctgcctactgtgggcttgttggtttcaaaccaaactatggcttagtttcccatcatggtctcatttccctggaggatttgatggaagtgcaaggaatcttaaccagatgtgtggatgatgcagcaattgtcttgggtgtactggctgaacatgaccctacggattctaccacagcacaggatcctgttaaaccattcatgattcccagtttgacaaatgtgagcaaactatgtataggtattccagaggaatatcttgtactggaattatcaagtgaagtacagtctctttggtccaaagctgctgacctctttgagtctgagggggccaaagcaattgaagtatccttttctcacattacttattcaattgtctgctaccatctattgtgcacatcagaagcagcatcgagtatagcaagatctgatgggctacaatatggtcacagatgtgacactgatgtatctactgaagccatgtatgctgcaaccagacgagaagggttcaatgattttgtaagaggaagaattctctcaggaaatgttttcttgttaaaataaaaatatgaaaattatttcatcaaagcacagaaagtgagatgcctcattgctaatgattttgtgaatgcttttaactctggagtatgctaactcccaccaccttgagtaaggcagtaccatacctggaattcatcaaagaagaccacagaacaggaagtgcccaggatgatatttttacacaggctgtaaacatggcaggactgtcagcagtgagtaaccctgttgcactctcaaaccaagcgttgcccacagggctgccgtttactggacatgcattttgtgactagcagcttcttacagtagccagatggcttgaaaaacaagtaaagtttcctgttattcaacttcaagaacttatggatgattgttcatcaatccttgaaaatgaaaagttagtctctgtctctctaacacag

SEQ ID NO: 682 - DNA, 498 bp, Homo sapiens
aaaaaaggggtccccgtgaaagtgaccatcaagatggcaccacctcaccagacctccttggagctcttcgtgtacctgaacraagtcacgggcaagcacggcatgggctgtattgacattatggagaactgcttcattagaataaagtccagaggtatctacaagaccccagcaggcaccatccttcaacaggctgatttagacatcgaggacttcactatggatcgggaagtgcacaaaatcaaccctgagtgtaaatctgtccaccattgcatcaccaagtcccaggagcaaatggaaggaaaagtgyaggtgcccatcttcaagggccaggtgcacatcctcagccaggagtctctactctctctctrcaaggaggagctggtgagcgtcaacgtgcaggggaattatgagccaatcgatgccaccrgtttcatcaacatcaattacctcagactgaaggaatatcattatttccagagtaaggtcactgycaaa

SEQ ID NO: 683 - DNA, 2808 bp, Homo sapiens
tcctcagtctcgcgggaagctccgttgtgggcgccccggctggtggctgagctcaggccttcaggcagaggggaggcgagggcggggcggtcacgtgagagcactgccgcggtgggttgtgggggtgctgcggcgccgtttgctttgccaaaccgacaaaagagagatgatggccaacgacgccaagcccgacgtgaagaccgtgcaggtgctgcgggacacagccaaccgcctgcggatccattccatcagggccacgtgtgcctctggttctggccagctcacgtcgtgctgcagtgcagcggaggtcgtgtctgtcctcttcttccacacgatgaagtataaacagacagacccagaacacccggacaacgaccggttcatcctctccaggggacatgctgctcctatcctctatgctgcttgggtggaggtgggtgacatcagtgaatctgacttgctgaacctgaggaaacttcacagcgacttggagagacaccctaccccscgattgccgtttgttgacgtggcaacagggtccctaggtcagggattaggtactgcatgtggaatggcttatactggcaagtaccttgacaaggccagctaccgggtgttctgccttatgggrgatggcgaatcctcagaaggctctgtgtgggaggcttttgcttttgcctcccactacaacttggacaatctcgtggcggtcttcgacgtgaaccgcttgggacaaagtggccctgcaccccttgagcatggcgcagacatctaccagaattgctgtgaagcctttggatggaatacttacttagtggatggccatgatgtggaggccttgtgccaagcattttggcaagcaagtcaagtgaagaacaagcctactgctatagttgccaagaccttcaaaggtcggggtattccaaatattgaggatgcagaaaattggcatggaaagccagtgccaaaagaaagagcagatgcaattgtcaaattaattgagagtcagatacagaccaatgagaatctcataccaaaatcrcctgtggaagactcmcctcaaataagcatcacagatataaaaatgacctccccacctgcttacaaagttggtgacaagatagctactcagaaaacatatggtttggctctggctaaactgggccgtgcaaatgaaagagttattgttctgagtggtgacacgatgaactccaccttttctgagatattcaggaaagaacaccctgagcgtttcatagagtgtattattgctgaacaaaacatggtaagtgtggcactaggctgtgctacacgtggtcgaaccattgcttttgctggtgcttttgctgccttttttacyagagcattcgatcagctccgaatgggagccatttctcaagccaatatcaaccttattggttcccactgtggggtatccactggagaagatggagtctcccagatggccctggaggatctagccatgttccraagcattcccaattgtactgttttctatccaagtgatgccatctcgacagagcatgctatttatctagccgccaataccaagggaatgtgcttcattcgaaccagccaaccagaaactgcagttatttataccccacaagaaaattttgagattggccaggccaaggtggtccgccacggtgtcaatgataaagtcacagtaattggagctggagttactctccatgaagccttagaagctgctgaccatctttctcaacaaggtatttctgtccgtgtcatcgacccatttaccattaaacccctggatgccgccaccatcatctccagtgcaaaagccacaggcggccgagttatcacagtggaggatcactacagggaaggtggcattggagaagctgtttgtgcagctgtctccagggagcctgatatccttgttcatcawctggcagtgtcaggagtgcctcaacgtgggaaaactagtgaattgctggatatgtttggaatcagtaccagacacattatagcagccgtaacacttactttaatgaagtaaactaggcttatttctaaaaagtcaagtctattggctttggcccaaaagcactggtatctttgtattaaattcatgtttattgtcacaaaaccattatttatacctatacagttgtactgtttcttttaaagcaaagccatttaacatctttcttcattcctaatttggaaattaaagtttacctttctgttaatctatgtataaatgttactctgagttattaatgtggattttaaaattgtaagcaatagaataggaaataaaacaactacctaatacaaatatttctgataagactacaaatatctgactgagctggggattaaagtagaggtaactgtatcttaaatgagtatgatttccttgtaagttaaaaaaattgaaatttaattgtagacttcaatagtccaagttttgaaggatgtttgagcttttgtataatgccatttatacctgcagttttacagataatgtttgactgcagttgccttggaaattcctccaaagtttgccttcatctctcctctacagtttggaggtgatggtgcagcagtggaacatctcttgatgcaccacactacttgtgttctgtgaagtgatgaaagtataactggttctagtttgcacactacacacatagttttgtgaagcttcagaaatgttttttcttttccttgtggccaaaccagtttgttaatctgattatattcatctgctaatgatactaaagttaatgtaataaagcatttaaaaatcagata

SEQ ID NO: 684 - DNA, 1451 bp, Homo sapiens
cagactatatggtgcagctgactggtggaagagatgaggctgagaagacacgaaaggcttatgggaacacagtaggagcaagggaagggcagaggggcttatttcatataagggcttcttgtcgcctgaactatggttgaagttccctcacagaacagagcagctggtcacagctctgcccaggcatttctgtgtctgcatcttcctgctgtacttgcatatcaagaagcatttcagaccacaggaatgcaggattccaaggcgccaatttaccttggaatttgaaaagatgatggaaatgatgttaaagaaaaagaaaattcgagtgattttcttatttgaggtcaaaatgggtcataaagcagtggagacaactcgcaaaatcaacaacacatttggttcaggaactgctaacaaatgtacagtgcagtggtggttcaagaagttttgcaaaggagaggagagccttgaaaacgaggaaaacagtggctggctataggaagttgacaatgaccaactgagagcaaccatggaagctgatcctcttacaactgcgtgagaagttgccaaggaactcagcgttgagcattctagagtctttcagcatttgaagcaarttgggaaggtgaaaaagctggataagtggatgcctcatgagatgagtgaaaatttaaaaaaaaataaaataaaaaacaaaattgtcattttgaagtgtcatcttctcttactctaagcaacaacaacaaatcatttctcaatcagtttgtgacgttcaatgaaatgtggattttatacgacaactggtgatgaccagctcagtggctagaccaagaagctccaaaacacttcccaaagccaaacttggaccaaaaaaaggtcatgttcgctgtttggtggtctgctgctggtctgatccactattgctttctgactcccggcgaaaccattacatctgagaagtatgctcagcaattcaaagagatgaaccgaaaacttcaacccctgcagtcagcaatggtcaacagaaagggcccaattctccacgacaatgcatgatcgcacattacacaactaaagcttcaaaagttgaactaactgggctacgaagttttgcctcatccaccatattcacctgacctcccgccaaccgactaccacttcttcaatcatctcgacaactttttgcaaggaaaacacttccacaaccagtagaatgcaaaaagtgctttccaagagttcactgaatcctgaagcacggatttttatgctacaggaataaacaaacttatttttcattggtaaaaatgtgttgattgtaatggttcctattttgattaatgaagatgtgtttgagcctagttataatgatttaaaattcacgatccaaaaccgcaattacttttgcatcagcctaatatgaggaagtaatagttgaacagaataattctttc

SEQ ID NO: 685 - DNA, 2587 bp, Homo sapiens
cccgcgctggaggcgggcgagggccgaggggcagctagggagcgcggcttgaggagggcggggccgcyccgcaggcccgccagtgtcctcagctgcctccgcgcgccaaagtcaaaccccgacacccgccggcgggccggtgagctcactagctgacccggcaggtcaggatctggcttagcggcgccgcgagctccagtgcgcgcacccgtggccgcctcccagccctctttgccggacgagctctgggccgccacaagactaaggaatggccaccccgcccaagagaagctgcccgtctttctcagccagctctgaggggacccgcatcaagaaaatctccatcgaagggaacatcgctgcagggaagtcaacatttgtgaatatccttaaacaattgtgtgaagattgggaagtggttcctgaacctgttgccagatggtgcaatgttcaaagtactcaagatgaatttgaggaacttacaatgtctcagaaaaatggtgggaatgttcttcagatgatgtatgagaaacctgaacgatggtcttttaccttccaaacatatgcctgtctcagtcgaataagagctcagcttgcctctctgaatggcaagctcaaagatgcagagaaacctgtattattttttgaacgatctgtgtatagtgacaggtatatttttgcatctaatttgtatgaatctgaatgcatgaatgagacagagtggacaatttatcaagactggcatgactggatgaataaccaatttggccaaagccttgaattggatggaatcatttatcttcaagccactccagagacatgcttacatagaatatatttacggggaagaaatgaagagcaaggcattcctcttgaatatttagagaagcttcattataaacatgaaagctggctcctgcataggacactgaaaaccaacttcgattatcttcaagaggtgcctatcttaacactggatgttaatgaagactttaaagacaaatatgaaagtctggttgaaaaggtcaaagagtttttgagtactttgtgatcttgctgaagactacaggcagccaaatggttccagatacttcagctttgtgtatcttcgtaacttcatattaatataagtttctttagaaaacccaagtttttaatcgtttttgttttaaggaaaaaagatttttaaaatgaatcttatgcaaaactttttgaycagtttcttttcttttgttttttttttaaaaaagacatttaaagacaaagacattatttctcatagcaggaaatgtagaggtagatggttccagtatcagcatagtgactaaactacattataaaagatccagcttccttctgtcattcccctcttttgtcttcctcagcaggttggcttttttccctggtgcctctcacttcgttggtgaccagtttcttaaactgaaagctttaatgttacatagtaaatggtagtgtgtcctgtgtaaattagtgtacctattaaaagttgcaaagtggaattaaaggaatccctagaataaggattctgaagttttattttaaattattatcttcttaacagtttagtcccacctcttacttcctgcctcagtctgctttctctactgtctggattaattaggcagcctgctataaagttaaagtcacacatttctattttgcaaacactgtgattactctttgctttgtagtttgctttgctttgtagggttctgcttttaagtttttctctttttcagacaaattactgataaaaatgatattgctctatatgtaatatatcctgaaagcattattttttgttgaataggaaataaaattaatgaagacagaggctagaaagcatccattaattaatgagacacacttaactacttatctctaaaccatctatgtgaatatttgtaaaaataatgaatggactcatcttagttctgtatataaatatattttctttctagtttgtttagttaaggtgtgcagtgtttttcctgtgtattaaacctttccattttacgttttagaaaattttatgtattttaaaataaggggaagagtcattttcacttttaaactactatttttctttccaagtcatttttgtttttggtttcttattcaaagatgataatttagtggattaaccagtccagacgcactgatctttgcaaaggagacttaatttcaaatctgtaattaccatacataaactgtctcattatacgtatgcatttttttagtttgtttttgtttggtataaattaatttgttaattaartatttcttaagtataaaccttatgaactacagtggagctacactcattgaaatgtaatttcagttctaaaaagatgtaataatcattttagaattaaaatttattctacttttaaataaattatgaatattaaaggtgaaaattgtataaattactttgattccattttaagtggagacatatttcagtgatttttagtaacctttaaaaatgtataatgacttttaaaatttgtagaattgaaaagacgctaataaaaatttattatttatttgtcatgactcaaaa

SEQ ID NO: 686 - DNA, 291 bp, Homo sapiens
atgcaaggaaggttctacttgtatgatgggtacctgctctggaacatgatatttttgcatgaggttttccagcttctgggtggaaacatcttggtggccaccgatgcagctggagggctcaaccccaagtctgaggttggaaggatcatgcttctctgtgatcacatcaagctmcttggtttctgtgatcagaactctcccaaagggcccaatgatgaaaggtttggagttcattttcctgccacgtctgatgcctacaactggacaatgaagcaaaaggcgctcaattct

SEQ ID NO: 687 - DNA, 1715 bp, Homo sapiens
agatgataagatggttgattcacagaacccaggctggacgggacttgtggcgagcagtccagcacagcctcacagtgcagagcatgagctttggagcctgcccccaccctagctttgtgaccttaagtgagctacatagcttctcatgtgtaaactactcatcataatggttctgacctcagtggtttgttgtgttctaggaaatgatgccagtgaatgcgtagtcccagcctcagcacaggggagccaccttgaagctctcaaatatcactgttgtgaatacagagagggaaaaccaactgtaacgtgccacccaaataaagctcattactagtcctgtccagcaacgtgcctctcctggccctagagttcttggaaatagcccaggccaaagagaaggcctttctccccatggtcagccacacgttccacatgcgcacagaggagtctgatgcctcacaggagggcgatgacctacccaagtcctcagcaaacaccagccatcccaagcaggatgacagccccaagtcctcagaagaaaccatccagcccaaggagggtgacatccccaaggccccagaagaaaccatccaatccaagaaggaggacctccccaagtcctcrgaaaaagccatccagcccaaagagagtaacatccccaagtcctcagcaaaacccatccagcccaagctgggcaatattcccaaggcctcagtgaagcccagccagcccaaggagggtgacatccccaaggccccagaagaaaccatccagcccaaagagggtgacatccccaagtcctcagcaaaacccatccagcccaagctgggcaatattgccaagacctcagtgaagcccagccacccaaggagggtgacatccccaagtcctcagcaaatgaagcccagccagcccaaggagggtgacatctccaagtccccagaagaagccatccagcccaaggagggtgacctccccaagtccctagargaagcyatccagcccaaggagggtgacatccccaagtcccyagaggaagccatccagcctaaggagggtgacatccccaagtccccagaagaarccatccagcccaagaaggrtgacatccccaagtccccagaagaagccatccagcccaaggagggtgacattcccaagtctccaaaacaagccatccagcccaaggagggtgacattcccaartccctagaggaagccatcccacccaaggagattgacatccccaagtccccagaagaaaccatccagcccaaggaggatgacagccccaagtccctagaagaagccaccccatccaaggagggtgacatcctaaagcctgaagaagaaacaatggagttcccggagggggacaaggtgaaagtgatcctgagcaaggaggactttgagrcatcactgaaggaggccggrgagaggctggtggctgtggacttctcggccacgtggtgtgggccctgcaggaccatcasaccattcttccatgccctgtctgtgaagcatgaggatgtggtgttcctggaggtggacgctgacaactgtgaggaggtggtgagagagtgygccatcatgtgtgtcccaacctttcagttttataaaaaagargaaaaggtggatgaactttgcggcgcccttaaggaaaaacttgaagcagtcattgcagaattaaagtaaacatgtattctgaaaacatt

SEQ ID NO: 688 - DNA, 2959 bp, Homo sapiens
agatgataagatggttgattcacagaacccaggctggacgggacttgtggcgagcagtccagcacagcctcacagtgcagagcatgagctttggagcctgcccccaccctagctttgtgaccttaagtgagctacatagcttctcatgtgtaaactactcatcataatggttctgacctcagtggtttgttgtgttctaggaaatgatgccagtgaatgcgtagtcccagcctcagcacaggggagccaccttgaagctctcaaatatcactgttgtgaatacagagagggaaaaccaactgtaacgtgccacccaaataaagctcattactagtcctgtccagcaacgtgcctctcctggccctagagttcttggaaatagcccaggccaaagagaaggcctttctccccatggtcagccacacgttccacatgcgcacagaggagtctgatgcctcacaggagggcgatgacctacccaagtcctcagcaaacaccagccatcccaagcaggatgacagccccaagtcctcagaagaaaccatccagcccaaggagggtgacatccccaaggccccagaagaaaccatccaatccaagaaggaggacctccccaagtcctcrgaaaaagccatccagcccaaagagagtaacatccccaagtcctcagcaaaacccatccagcccaagctgggcaatattcccaaggcctcagtgaagcccagccagcccaaggagggtgacatccccaaggccccagaagaaaccatccaatccaagaaggaggacctccccaagtcctcagaagaagccatccagcccaaagagggtgacatccccaagtcctcagcaaaacccatccagcccaagctgggcaatattgccaagacctcagtgaagcccagccagcccaaggagagtgatatccccaagtccccagaagaaaccatccagcccaaggagggtgacatccccaagtcctcagcaaagcccatccagcccaagctgggcaatattcccaaggcctcagtgaagcccagccagcccaaggagggtgacatctccaagtccccagaagaagccatccagcccaaggagggtgacctccccaagtccctagargaagcyatccagcccaaggagggtgacatccccaagtcccyagaggaagccatccagcctaaggagggtgacatccccaagtccccagaagaarccatccagcccaagaaggrtgacatccccaagtccccagaagaagccatccagcccaaggagggtgacattcccaagtctccaaaacaagccatccagcccaaggagggtgacattcccaartccctagaggaagccatcccacccaaggagattgacatccccaagtccccagaagaaaccatccagcccaaggaggatgacagccccaagtccctagaagaagccaccccatccaaggagggtgacatcctaaagcctgaagaagaaacaatggagttcccggagggggacaaggtgaaagtgatcctgagcaaggaggactttgagrcatcactgaaggaggccggrgagaggctggtggctgtggacttctcggccacgtggtgtgggccctgcaggaccatcasaccattcttccatgccctgtctgtgaagcatgaggatgtggtgttcctggaggtggacgctgacaactgtgaggaggtggtgagagagtgygccatcatgtgtgtcccaacctttcagttttataaaaaagargaaaaggtggatgaactttgcggcgcccttaaggaaaaacttgaagcagtcattgcagaattaaagtaaacatgtattctgaaaacattgcagacagtcaggtgtttatagcttttgagttctcttttattatttacacaaagtgatcaggtataacaaaagtgtatgtccaaatggcactgcttgtacatgataatattaactctacccttttcaaaaaacagtccaagcattaaagtacattgcgactgtgtttctgttagtgggagagtataaaattagaaattcccatggtgaagactgctaagtcccatggtttcctatttttcaatcttgatatgtatttatttttcacttgtctttgaaaatttcacgcatttagtgtttgcagcaagactgaaaatttagataatttttctatagaggtagatgactgaaaggtgaatggaaacttcttttctcatgtcacacatctttggggattctgataagatatgtttggaaataaggaatttgaaagattcacatcttagctaacctccttcttgtgccggaagtgctacggaggccttgggaaattcagtgggttttccaagatctgatttgttggtgacggaartgagatcaaggccgcttccagatttcaagtccagggctctacctactataatctacgctcacaaaatctcagacaagagrtcggaacttcaggtttctcggaggttgaagtcctctggatctttgctgcctttatgacatcagtgccctgatggcagagttcctggttcgtctccctggtaattgagttcataatacctagaccttcctctgacttttttacttaaatttgttcttattttcaatattgaacaagccagcctttaacatgactctaccagcttagacatataggcctagactttaaygaattaacctaatcacagtgctaccagagtcttgtttggacaacttagtgagccccagatgtctatgagcccaaagtcccaggtctgaaccatagacagaggcttagtccagagtgggtttttaaaaatgaataaaaccagcttcattaggtataattgatatacaaagaacwgcacatatttaatggagggagttggatgagtttggatgtgttgcatatgcccttgattgccatctccaccatcaaagtaattaacaccttcattgcctccag

SEQ ID NO: 689 - DNA, 1702 bp, Homo sapiens
gtggatgcggcagggcgttgggcggaaggggttcgcacgccaagaaccgccatgcctggggatcaccgccgcatccgcggccctgaagaatcgcagccgccgcagctgtacgcggccgacgaggaggaggcgcccggcacccgcgacccaacgcggctacggcccgtgtacgcgcgcgccgggctgctgagccaggccaagggctcggcctacctggaggcgggaggcaccaaggtsstgtgtgccgtgtcgggcccgcgacaggccgagggcggcgagcgcggcggcggcccggccggagcaggcggcgaggccccggccgcgctgcgcggtcgcctgctctgcgacttccgccgcgcacccttcgcgggccgccggcgccgcgctcccccgggcggctgcgaggagcgtgagctggcgctggcgctgcaggaggcgctggagccggctgtgcgcctgggccgctacccgcgcgcgcagctcgaggtgtcggcgctgctgctggaggacggtggctcggccctggccgccgcgctcaccgccgccgcgctcgccctggccgacgcgggcgtggagatgtacgacctggtggtgggctgcggcctcagcctcgcgccggggcccgcgcccacctggctcctggaccccacgcggctcgaggaagagcgcgccgccgccggcctcaccgtggcgctcatgcctgtgctgaatcaggtggccgggctgctgggcagcggcgagggcggcctgacagagagctgggcggaggccgtacgcctgggcctcgagggctgccagcgcctctaccccgtgctgcagcagagcctggtgcgggccgcccgccgcaggggcgccgccgcccagccctgaaccagaagcctgagcaactacggacgcaagccgaggaccgtgctgccgccgtccacgaaaagacccgcgccatcggcctccagtttgcgtcgagaattcctggaagggccctgatatgactgtggttggactgacctgactgccagatggtgggacttggtctggagcagggactacttggaatgataaaggcaaaactcaacagcccctggagctgcgcttgtggtggagctggaccctgaaattacctggaccttttttttagagacagggtttctttctgcagtctcaaactcctagccttgattgatcctcctgccttggcctcccaaagtgctgggactacaggtgcatgcaaccacacctggctaattttcttttcttctttctttcttttttttttttttttttttttgatggagtcttgttctgttgcccaggctggagtgcaatggtgcaatcttggctcactgcaacctctgcctcctgggttcaatccattctcctgcctcagcctcccaagtagctgggattacaggcacatgcctccataccgggctaatttttgtatttttagtagagatggggtttcgccatgtgggccaggctgttctcgaatgcctgacctcaggtgatccacccgccttggcctcccaaagtgctggaattacaggtgtgagccactgtgcccagctgagtaaatttcttgattgcacagaatgtacggtgatattggcggacttaaggacatcgaattgtttatcaggaataaagtattatgtgtgttttctgcggccctggataatgctgtagcattcagggtcgattgagt

SEQ ID NO: 690 - DNA, 2902 bp, Homo sapiens
tgaaagtttccaccatatatgttcaaaaattgctgaatgagcacaaggatttgaaggtgctaaagcaagggataaaccaaaaggacagccagtaggtgaggagaggccatggaatacccgccaacaagataatcatcgctggaataatagggacctgtctgaatgtaggctgcagcagtcctgaaggttgatggagggccatgctattcaaacagcaggcgtggctgagacagaagctcctggtgctgggaagccttgccgttgggagtctcctgtatctagtcgccagagttgggagcttggataggctacaacccatttgccccattgaaggtcgactgggtggagcccgcactcaggctgaattcccacttcgcgccctgcagtttaagcgtggcctgctgcacgagttccggaagggcaacgcttccaaggagcaggttcgcctccatgacctggtccagcagctccccaaggccattatcattggggtgaggaaaggaggcacaagggccctgcttgaaatgctgaacctacatccggcagtagtcaaagcctctcaagaaatccacttttttgataatgatgagaattatggtaagggcattgagtggtataggaaaaagatgcctttttcctaccctcagcaaatcacaattgaaaagagcccagcatattttatcacagaggargttccagaaaggatttacaaaatgaactcatccatcaagttgttgatcattgtcagggagccaaccacaagagctatttctgattatactcaggtgctagaggggaaggagaggaagaacaaaacttattacaagtttgagaagctggccatagaccctaatacatgygaagtgaacacaaaatacaaagcagtaagaaccagcatctacaccaaacatctggaaaggtggttgaaatactttccaattgagcaatttcatgtcgtcgatggagatcgcctcatcacggaacctctgccagaacttcagctcgtggagaagttcctaaatctgcctccaaggataagtcaatacaatttatacttcaatgctaccagagggttttactgcttgcggtttaatattatctttaataagtgcctggcgggcagcaaggggcgcattcatccagaggtggacccctctgtcattactaaattgcgcaaattctttcatccttttaatcaaaaattttaccagatcactgggaggacattgaactggccctaaaataatatgtcatacaacactatgtgttgtgcctggagacacacaatgtctcctgtagattaaaatatgcacttttcctaggcagagctatccaagtcatttttccatgtatatttgtacatacgcagtgtgtgaccaaatataagatcagttctttttctactgaaaatttacgaaaaaaaaaaaattgctgtctgcatagtcgcatcttttaagctatttacaaaagagaagaggtggtggtattgggggaaagtgacttcagctattctcaragagttagtcttcctttgattcagaatttgtcacccgccattttcatagatttaagccaaaagataaatgtgtgaaaatgtaccaatggctgcgaagcttcaggaagtagaggatccagtgatgcattttttttttcctaagggaaagctggctctttaattcagatgctgaattggtgccatgaaaacagaaaatgctattttcttattatttaaaagaacgtcttatctcataaaattgacattgttccaaagttcttgtggtgattttgcactattgttttctcgtatggaccatggtgtcacttgtagcatgtcaatcacacattggaaagtcaagtccttttacttccatgttgtatgtcaacagagagaaatgtcatgtacataatgtatattgttgtaaatactggtttcacactaagtaattctattttgtaaactgaatatggctatttaatttattgtgaaaattaaatttattgtggtatttaaaaatggaatggattaaaattactctatgtgcaattttttttttttttactcattttgttttacgtgccccctgctggcttccaaaatggaagctgtttacgtgcatatgagagcacttggaaagatgtgcttccctgctggatttctgtaccccagtgaaaatgtatttatgaagtgaggttgagtatattaaaaaagaaaaacctcaaccatctggaaatcaagtataatagccacctcaaagaaccctagtgctgctctgctacaactttgtaacaattaatttactcgcagttgctgctgctcaggaagagagacaaggaatattttaacagaatcaaggcatagaagaatcaccattttatttgaacctctaatcagagtcagaccagtagagaaattaaataagattagaaaactctgtactgaaagctgctgatgcttcaaaaatgaaaacaagatctcacaactctccctgttagttgaaaatatatcaatttgctctgaaaggattcagctgcctagtgttgccattactaacataaacatatggctcatatttccatccagagaaattaatgctaaattggtgcctcgctaacatcagatacactgtattatgcttaaatatattcagtaaaatgtggaaaggggtattaacaacgacaacaaaaagatggattttttttttctcacaatcacagttgctaatccagtgggagatgtttgagagagttttgttcaacatcacagtgagagtgcctagggaaatcagaaaattacaatggattcccctttgattgtaataagtgttgattttctccatgagttgtttatcctgtctagtgatttgatggtgaacttttctaaataaatagccctttcccctcc

SEQ ID NO: 691 - DNA, 1033 bp, Homo sapiens
tgaccttttgtgacttttgggagagctgccaaaagtgaaacttagtgcctcagacaagcaggggcaagtctgctaaggaagctgtggccagaagcacagatcagaaacacgatggctctgttaacagccgaaacattccgcttacagtttaacaacaagcgcckcctcagaaggccttactacccgaggaaggccctcttgtgttaccagctgacgccgcagaatggctccacgcccacsagaggctactttgaaaacaagaaaaagtgccatgcagaaatttgctttattaacgagatcaagtccatgggactggacgaaacgcagtgctaccaagtcacctgttacctcacgtggagcccctgctcctcctgtgcctgggagctggttgacttcatcaaggctcacgaccatctgaacctgsgcatcttcgcctcccgcctgtactaccactggtgcaagccccagcagrasgggctgcggcttctgtgtggatcccaggtcccggtggaggtcatgggcttcccaragtttgctgactgctgggaaaactttgtggaccacgagaaaccgctttccttcaacccctataagatgttagaggagctagataaaaacagtcgagccataaagcgacggcttgasaggataaagcagtcctgaagtgtggatgttttagagaatgacttaagaagtttgcagcttggacccgtatcccactcaytatcaagaagcaactcaagatgactttccctggggcatgtcagttgcctcatagcctgctggtcctgtaagcaagcactaagctccacagtgccagttccttgccccaacctggccccatccaagtacagaagaccttyctttcctcctttttccatattgctttctgttctaagtgggtgaataattttataattgaaaaaataaagataaagtctgtaaatccagccgggtacggtggctcacgcctgtaatcctagcactttgggaggctgagatgctcggccaataaatttctattgtttatgaa

SEQ ID NO: 692 - DNA, 995 bp, Homo sapiens
gcccttctgtgcctcagccctggcctcccgctgccccagccccagccctgggctccttctcctctggctcccctgccatccccactcccacccaggctctttgccctgctaaacacgatggctctgttaacagccgaaacattccgcttacagtttaacaacaagcgcckcctcagaaggccttactacccgaggaaggccctcttgtgttaccagctgacgccgcagaatggctccacgcccacsagaggctactttgaaaacaagaaaaagtgccatgcagaaatttgctttattaacgagatcaagtccatgggactggacgaaacgcagtgctaccaagtcacctgttacctcacgtggagcccctgctcctcctgtgcctgggagctggttgacttcatcaaggctcacgaccatctgaacctgsgcatcttcgcctcccgcctgtactaccactggtgcaagccccagcagrasgggctgcggcttctgtgtggatcccaggtcccggtggaggtcatgggcttcccaragtttgctgactgctgggaaaactttgtggaccacgagaaaccgctttccttcaacccctataagatgttagaggagctagataaaaacagtcgagccataaagcgacggcttgasaggataaagattccaggggtacgtgcgcagggtcgttacatggatatattgtgtgatgctgaggtctgagtcacccaatctactggaacatagcacccaatagcagtcctgaagtgtggatgttttagagaatgacttaagaagtttgcagcttggacccgtatcccactcaytatcaagaagcaactcaagatgactttccctggggcatgtcagttgcctcatagcctgctggtcctgtaagcaagcactaagctccacagtgccagttccttgccccaacctggccccatccaagtacagaagaccttyctttcctcctttttccatattgctttctgttc

SEQ ID NO: 693 - DNA, 2049 bp, Homo sapiens
ccggcgcgcaagccggatccggcagtgctgcggggaggagagaggacgaggcggctgccggccccacgctgctcgcccacagatcgcactgggttccgcttggagcgggcggaggcaccgggcccgagctgggtcggaggtcctctccgccgcctgcgcgccccaagcagaggatccgccgcggagaaccgctcccggactggaggcgcccgcggcctcgggtgcgtccgctgcgccagatctcggcctgatggacgcctggtgtggacgatgagggaagaacgtgccccccacacccaagaggtgacccctgagccagccccggatgaccctgcgacctggaacaatgcggctggcctgcatgttctcttccatcctgctgttcggagctgcaggcctcctcctcttcatcagcctgcaggaccctacggagctcgccccccagcaggtgccaggaataaagttcaacatcaggccaaggcagccccaccacgacctcccaccaggcggctcccaggatggtgacttgaaggaacccacagagagggtcactcgggacttatccagtggggccccgaggggccgcaacctgccagcgcctgaccagcctcaacccccgctgcagaggggaacccgtctgcggctccgccagcgccgtcgccgtctgctcatcaagaaaatgccagctgcggcgaccatcccggccaacagctcggacgcgcccttcatccggccgggacccgggacgctggatggccgctgggtcagcctgcaccggagccagcaggagcgcaagcgggtgatgcaggaggcctgcgccaagtaccgggcgagcagcagccgccgggccgtcacgccccgccacgtgtcccgtatcttcgtggaggaccgccaccgcgtgctctactgcgaggtgcccaaggccggctgctccaattggaagcgggtgctcatggtgctggccggcctggcctcgtccactgccgacatccagcacaacaccgtccactatggcagcgctctcaarcgcctggacaccttcgaccgccagggtatcttgcaccgtctcagcacctacaccaagatgctctttgtccgcgagcccttcgagaggctggtgtccgccttccgcgacaagtttgagcaccccaacagctactatcacccggtcttcggcaaggccatcctkgcccggtaccgcgccaatgcctctcgggaggccctgcggaccggctctggggtgcgttttcccgagttcgtccagtacctgctggacgtgcaccggcccgtggggatggacattcactgggaccatgtcagccggctctgcagcccctgcctcatcgactacgatttcgtaggcaagttcgagagcatggaggacgatgccaacttcttcctgagcctcatccgcgcgccgcggaacctgaccttcccccggttcaaggaccggcactcgcaggaggcgcggaccacagcgaggatcgcccaccagtacttcgcccaactctcggccctgcaaaggcagcgcacctacgacttctactacatggattacctgatgttcaactattccaagccctttgcagatctgtactgaggggcgccgcagctggccggggccgccctgccccggtcactcacctgtgctcccgggcatcctcctgtccctggctcctcatcctgggagcaacagggctctgaggacgtgaggagccatcgctgtgggaggcagcaggccccgggtggggggcagaggcgcccagccttggatggggaccccagcccctggcctgtacctgtttcctcattccttggctgagggagaggctgagaactgggcagacacccctggagctcagccgacagttttgatgagcagggaagtctgaggcccagaggacggggggcccagcggtaagggatgtcccgcactcccttagccattgccttggaccaaaccacgtggtttgcagcttttctacragccaggggggaggttcccttggattaaggttccaaataaagcacatggtttccagagcagcg

SEQ ID NO: 694 - DNA, 2146 bp, Homo sapiens
gggagccttcccggcgcgcaagccggatccggcagtgctgcggggaggagagaggacgaggcggcggcggcagcaggaggtgggggaccgatcgcgccgggggccgaagaggaacgccgccccgcgccctctcgctccccgcacgctccggctgccggccccacgctgctcgcccacagatcgcactgggttccgcttggagcgggcggaggcaccgggcccgagctgggtcggaggtcctctccgccgcctgcgcgccccaagcagaggatccgccgcggagaaccgctcccggactggaggcgcccgcggcctcgggtgcgtccgctgcgccagatctcggcctgatggacgcctggtgtggacgatgagggaagaacgtgccccccacacccaagaggtgacccctgagccagccccggatgaccctgcgacctggaacaatgcggctggcctgcatgttctcttccatcctgctgttcggagctgcaggcctcctcctcttcatcagcctgcaggaccctacggagctcgccccccagcaggtgccaggaataaagttcaacatcaggccaaggcagccccaccacgacctcccaccaggcggctcccaggatggtgacttgaaggaacccacagagagggtcactcgggacttatccagtggggccccgaggggccgcaacctgccagcgcctgaccagcctcaacccccgctgcagaggggaacccgtctgcggctccgccagcgccgtcgccgtctgctcatcaagaaaatgccagctgcggcgaccatcccggccaacagctcggacgcgcccttcatccggccgggacccgggacgctggatggccgctgggtcagcctgcaccggagccagcaggagcgcaagcgggtgatgcaggaggcctgcgccaagtaccgggcgagcagcagccgccgggccgtcacgccccgccacgtgtcccgtatcttcgtggaggaccgccaccgcgtgctctactgcgaggtgcccaaggccggctgctccaattggaagcgggtgctcatggtgctggccggcctggcctcgtccactgccgacatccagcacaacaccgtccactatggcagcgctctcaarcgcctggacaccttcgaccgccagggtatcttgcaccgtctcagcacctacaccaagatgctctttgtccgcgagcccttcgagaggctggtgtccgccttccgcgacaagtttgagcaccccaacagctactatcacccggtcttcggcaaggccatcctkgcccggtaccgcgccaatgcctctcgggaggccctgcggaccggctctggggtgcgttttcccgagttcgtccagtacctgctggacgtgcaccggcccgtggggatggacattcactgggaccatgtcagccggctctgcagcccctgcctcatcgactacgatttcgtaggcaagttcgagagcatggaggacgatgccaacttcttcctgagcctcatccgcgcgccgcggaacctgaccttcccccggttcaaggaccggcactcgcaggaggcgcggaccacagcgaggatcgcccaccagtacttcgcccaactctcggccctgcaaaggcagcgcacctacgacttctactacatggattacctgatgttcaactattccaagccctttgcagatctgtactgaggggcgccgcagctggccggggccgccctgccccggtcactcacctgtgctcccgggcatcctcctgtccctggctcctcatcctgggagcaacagggctctgaggacgtgaggagccatcgctgtgggaggcagcaggccccgggtggggggcagaggcgcccagccttggatggggaccccagcccctggcctgtacctgtttcctcattccttggctgagggagaggctgagaactgggcagacacccctggagctcagccgacagttttgatgagcagggaagtctgaggcccagaggacggggggcccagcggtaagggatgtcccgcactcccttagccattgccttggaccaaaccacgtggtttgcagcttttctacragccaggggggaggttcccttggattaaggttccaaataaagcacatggtttccagagcagcg

SEQ ID NO: 695 - DNA, 2484 bp, Homo sapiens
gagggactcgtcccagagtttgctgccgccgccgccgctgccattagagcggttttaattagctgcaggatttttaatgagctgaaatcaagaagagccccatctcagaagtaagcgagagccgcgcgcagggaagaactagtctgacaaaacagaaggaggtggtgctctygggggactgggctgtaggctcccaccgatcgatcggcgacgagcagatgagttcccgaggccaggaggctgaggagggaagccagggctcagagaccagcgcccggtgcagagtccccgctgctgccaccgcggcagaaggcacggtgccggattcaaggtgacggcagtgcctggctccattctcctcaagttgccatagcagcctctctcccaacaagcagcttctccgggagccctcagccgggagggacgtcattgttctctcctgcccgtgtggtgcaaggagacccaccggacagagaactttcccgagcccggggtccgctgaccacgtgggtgcacccatgctgcctggagccaggcacagggacaggtccccacggccacagggaatcctctgggcagctgaggggagcgtccaggcccagaagcagctgcagccaagcgtgtccttggagccgtccatgcgtctgtccgcctgctgccggtcgccactggagatctcggcctgatggacgcctggtgtggacgatgagggaagaacgtgccccccacacccaagaggtgacccctgagccagccccggatgaccctgcgacctggaacaatgcggctggcctgcatgttctcttccatcctgctgttcggagctgcaggcctcctcctcttcatcagcctgcaggaccctacggagctcgccccccagcaggtgccaggaataaagttcaacatcaggccaaggcagccccaccacgacctcccaccaggcggctcccaggatggtgacttgaaggaacccacagagagggtcactcgggacttatccagtggggccccgaggggccgcaacctgccagcgcctgaccagcctcaacccccgctgcagaggggaacccgtctgcggctccgccagcgccgtcgccgtctgctcatcaagaaaatgccagctgcggcgaccatcccggccaacagctcggacgcgcccttcatccggccgggacccgggacgctggatggccgctgggtcagcctgcaccggagccagcaggagcgcaagcgggtgatgcaggaggcctgcgccaagtaccgggcgagcagcagccgccgggccgtcacgccccgccacgtgtcccgtatcttcgtggaggaccgccaccgcgtgctctactgcgaggtgcccaaggccggctgctccaattggaagcgggtgctcatggtgctggccggcctggcctcgtccactgccgacatccagcacaacaccgtccactatggcagcgctctcaarcgcctggacaccttcgaccgccagggtatcttgcaccgtctcagcacctacaccaagatgctctttgtccgcgagcccttcgagaggctggtgtccgccttccgcgacaagtttgagcaccccaacagctactatcacccggtcttcggcaaggccatcctkgcccggtaccgcgccaatgcctctcgggaggccctgcggaccggctctggggtgcgttttcccgagttcgtccagtacctgctggacgtgcaccggcccgtggggatggacattcactgggaccatgtcagccggctctgcagcccctgcctcatcgactacgatttcgtaggcaagttcgagagcatggaggacgatgccaacttcttcctgagcctcatccgcgcgccgcggaacctgaccttcccccggttcaaggaccggcactcgcaggaggcgcggaccacagcgaggatcgcccaccagtacttcgcccaactctcggccctgcaaaggcagcgcacctacgacttctactacatggattacctgatgttcaactattccaagccctttgcagatctgtactgaggggcgccgcagctggccggggccgccctgccccggtcactcacctgtgctcccgggcatcctcctgtccctggctcctcatcctgggagcaacagggctctgaggacgtgaggagccatcgctgtgggaggcagcaggccccgggtggggggcagaggcgcccagccttggatggggaccccagcccctggcctgtacctgtttcctcattccttggctgagggagaggctgagaactgggcagacacccctggagctcagccgacagttttgatgagcagggaagtctgaggcccagaggacggggggcccagcggtaagggatgtcccgcactcccttagccattgccttggaccaaaccacgtggtttgcagcttttctacragccaggggggaggttcccttggattaaggttccaaataaagcacatggtttccagagcagcg

SEQ ID NO: 696 - DNA, 321 bp, Homo sapiens
gtgaccatgatgaaattagcacaatggctttgggaactggtgatcctgggctctacctggttggccctgaccatgggagccctgggcctggagctgcccttgtcctgctgggaggtcctgtggtgactgcccgcctacttgctggtatcctccaggtgctatgccctgggcactgtgggttatggagcggccackttgcctratagcaaggacaccatacatgagctgcataatcagaaccaggagcccaaagctgactcagcccacagacaccctaccctcattcctgcgcagacagccctctctcccattccccattaa

SEQ ID NO: 697 - DNA, 1071 bp, Homo sapiens
tttctgtctgtagtcgtctgccccagtagactgactgggcatcaggtgcaagtgygtgactgtccccctgtgtgtgagtctgggcctgctgtgatygccggtcccgagtcagtcaaggctggtrtgccygttactgtggccagcccaagtgtgtgcaggccccagtccttgttccagcagtccccacccactggaagaagctggccccctgcctgtgggggcccaggccagtccctcatcracattgactttcacagggtccggcggaactctaccctagggcccttcatcttccgaggctatgactcagcacctccaggcccttggaccctggagaatgacagccacacaagtcagcaccctgtgaaccacctggagatttgggaggctgggctgctgttgcctgtctaccgcgcactgcagctgcacttcaactgccggcggtgggggggcccgaggcgagcagactcrgagcacagcctggacaggcagcgccaggctatggaggtagactcgggaacaaggtggggtggccggagtgctcccacggaggtgagagagagcaagatgcacgtggtccacagtaacacaaagtaccagagcatggaggaggcaccacgccacggtgatgggctcgagtgcaggccctgctgctggakaacccctygcacttggagcccctcccaggagcaggactgyagcaacaccaacttctgcgccatagtgtcgggcttgaggaargtgcctgagccagtgaatctgakgtccaccttcccgctggcgtcgatgcggcccaacacctcgagctactgtcgcttcgctgggtcgctgaccccgcctgactgygagcccacggtgctctggaccgtcttcgaggaccccatacccatccggtgggtgcagatgaccctgttctacascctgccccaggctggaccctcccactttcaccccataccgctcacggcagccccctgctcttcccccaccctagcagttgtgcactgcgctctgatgggcctggggctcagcctgtggttctgtcaaccgtgggcgaccctccrtgtgaaa

SEQ ID NO: 698 - DNA, 549 bp, Homo sapiens
gctgcctccctgaccccccccccaccccaaaggccccagtccttgttccagcagtccccacccactggaagaagctggccccctgcctgtgggggcccaggccagtccctcatcracattgactttcacagggtccggcggaactctaccctagggcccttcatcttccgaggctatgactcagcacctccaggcccttggaccctggagaatgacagccacacaagtcagcaccctgtggagcaggactgyagcaacaccaacttctgcgccatagtgtcgggcttgaggaargtgcctgagccagtgaatctgakgtccaccttcccgctggcgtcgatgcggcccaacacctcgagctactgtcgcttcgctgggtcgctgaccccgcctgactgygagcccacggtgctctggaccgtcttcgaggaccccatacccatccggtgggtgcaggtggagccaccgtyccccctcgccccccacacccctccccgggccttgcctggctcctcccgcaggcgctgcccctctcccaccccgttttga

SEQ ID NO: 699 - DNA, 1061 bp, Homo sapiens
atggccctgtgtccccgtcaggcagcgtgcatgccactcatgggcacctggctcttcacctccgtgagcaagatggcgactgtgaagagtgagcttattgagtgcttcacttccgaggagcyctttcatcacagaaaggtctccatcacaggaactggatcagtgggcatggcctgcgctaccagcatcttattaaaaggcttgagtgatgaacttgcctttgtggatcttgatgaaggcaaactgaaaggtgagacaatggatcttcaacatgrcagccctttcatgaaaatgtcaaatattgtttgtagcaaagattaccttgtcacagcaaacccccatctagtgattatcacagcaggtgcacgccgagaaaagggagaaatgcgctttaatttagtccggcaaaatgtggccatcttcaagttaatgatttccagtattgtccagcagagccccctctgcaaactaattattgtttccaatccagtagatatcttaacttacgtagcctggaagttgagtgcatttcccaaaaaccgtgttattggaagcggctgtaatctggatactgttcgttttcaattcttcattggacaaaagcttggtatccactctgaaagctgccgtggatggatcctcggagagcatggagactcaagtgttcctgtgtggagtggaatgaacatagctggtgtccttttgaaggatctgaactctgatataggaactgataaagatcctgagaaatggaaaaatgtccacaaagaagtgattgctagtgcctatgagattattgaaatgaaaagttctacttcgtgggccattggcctatctggagctgatttaacagaaagtattttgaagaatcttaggagaaaacatccagtttccaccataattaagggcctctacggaataaatgaagaagtcttcctcagtattccttctttggagagaagggtattaccaaccttataaagagaaagctgacccctgaagaggaggcccatctgaaaaagagtgcaaaaacactttgggaaattcagaaggagcttgag

SEQ ID NO: 700 - DNA, 777 bp, Homo sapiens
atgtcaaatgttcaaaatgttgatgtcgagagcccgcggcactggcagcttggcctgcgctgcgctgcgatgttagaggagtcagccaggagcccggggaagggaagcacgcccctggggctggtcccagagggcctgatctgcatytgcagcatgaggttctgcccgtttgctgagaggacgcatctggttctgaaggccgagggaatcagkcatgaagtaatctatatcaacctgaaagataagcctgagtggttctttragaaaaatccctttagtttggtgccagttctggaaaacagtcagggtcagctgatctacgagtctgccatcacctgtgagtacctggatgaagcatactcagggaagaagctgttgccrgatgacccctatgacaaagcttgccagaagatggtctttgagttgttttctaaggtgccatctttggtaggaagcttccttagaacccaaaataaggaagatggtgctggcctgaaagaagcattgtgtaaagaatttagcaagctagaggaggttctgattaataagaagacaaccttctttggtggcagttccatctctatgattgactacgtcatctggccctcgtttgaacggctggaagcaatgaagttaaatgagtgtgtagamcacactccagaacttaaactgtggatggcagccatgrgggaagatcccacagtctcagccctgctcactggtgtgaaggactggcaaggtttcacagagctctacttacagcctggaggcctgtga

SEQ ID NO: 701 - DNA, 864 bp, Homo sapiens
atgttggtgctaaactgttctaccaaattactgatactggagaaaaygttgaagagttgctttcctgaatcwctcaaggtttacggagcggtgatgaacataaatcgtgggaacccctttcaaaaggaagtggtgttggattcatggccggatttcaaagctgttatcacccgacgacaaagagaggctgagacagataaccttgatcattatactaatgcctatgctgtgttctacaaggatgtcagggcttatcgacagctattggaagaatgtgatgtttttaactgggaccaagtttttcaaatamaagggctgcagagtgagttatatgatgtttccaaagcggttgmcaattcaaagcagttgaatataaagctaacttccttcaaggctgttcatttttctcctgtttcatctctgccagataccagtttcctcaaggggccttccccacgactaacctacctgagtgttgccratgcggatctactcaaccggacttggtcccggggaggcaatgaacaatgtctccggtacatcgccaacctcatctcctgcttccctagtgtgtgtgtccgggatgagaagggaaacccggtctcctggtccatcacagaccagtttgccaccatgtgccatggctacaccctgccagaacatcgcaggaaaggttacagccggctggtggccctcacgctggccaggaagttgcaaagccggggattcccctctcaggggaacgtcctggatgacaacacggcgtctataagcctcctgaagagtctccatgctgagttcttgccttgtcgcttccacaggcttattctcacccctgcgactttctctggcctgcctcacctc

SEQ ID NO: 702 - DNA, 509 bp, Homo sapiens
agggaagggctggcggccgggaggggatcggggtggccaaaactgggctaggggattgctccgcggagtccgccggcctcaaggggctgccctgcggagtgcacccaccctccgcgcccaaaggcggaaaggccagagcgcggggcaggtttcgcaactccgagggtggatgcaggctgtggccgggcgggatggagcggccgtgcgtttccagcgcccccggcctggcggagccccattctcggcctgcgccccctgcacgagtgcgacacgcaagggagcgcaggtgtcctcgcggtcccgcatcacatccgcaagccgatttccccagctcgggggctgttatctggcccggattccgcaggatggcgggtccaccccagcgcccccactccccgccctccttcgggtcgccaggccctcgggtgattcagaaattcrtcaaatccaaatggcagcgggctctctgtcaggcaggaaacaagccgcaccgaaggctmggcaggttc

SEQ ID NO: 703 - DNA, 663 bp, Homo sapiens
atgccagccaagccatcctgccggccaagccttcagtttgttggaaatgcactatctgtgagtaacagactagctagagacaatgaattaagggaaaatgacaaagaacagctcaaagcaatttctacacgagatcctctctctgaaatcactgcgcaggagaaagattttctatggaccacagattggcctccaatcaaacctgaacaggctatggaacttctggactgtaattacccagatcctatggttcgaagttttgctgttcagtgcttggaaaaatatttaacagataacaaactttctcagtatttaattcagctagtacaggtcctaaaatatgaacaatatttggataacttgcttgtgagatttttactgaagaaagcattgactaatcaaaggattgggcactttttcttttggcatttaaaatctgagatgcacaataaaacacttagccagaggtttggcctgcttttggagtcctattgtcgtgcatgtgggatgtatttgaagcacctgaataggcaagtcraggcaatggaaaagctcattaacttaactgacattgtcaaacaggagaagaaggatgaaacacaaaagttgtgtgactctagtctgtgtttgagactcttttcactgcagkggggcagagttgtt

SEQ ID NO: 704 - DNA, 620 bp, Homo sapiens
acagagtaacagactagctagagacaatgaattaagggaaaatgacaaagaacagctcaaagcaatttctacacgagatcctctctctgaaatcactgcgcaggagaaagattttctatggaatgtattgcttggtaaaagattggcctccaatcaaacctgaacaggctatggaacttctggactgtaattacccagatcctatggttcgaagttttgctgttcagtgcttggaaaaatatttaacagataacaaactttctcagtatttaattcagctagtacaggtcctaaaatatgaacaatatttggataacttgcttgtgagatttttactgaagaaagcattgactaatcaaaggattgggcactttttcttttggcatttaaaatctgagatgcacaataaaacacttagccagaggtttggcctgcttttggagtcctattgtcgtgcatgtgggatgtatttgaagcacctgaataggcaagtcraggcaatggaaaagctcattaacttaactgacattgtcaaacaggagaagaaggatgaaacacaaaagttgtgtgactctagtctgtgtttgagactcttttcactgcagkggggcagagttgtt

SEQ ID NO: 705 - DNA, 2177 bp, Homo sapiens
ccccaaaggcctgaaaggcctaaaggctactttgtggcctgcacaccgtgtttttctcaaggttcatcctgccacagaaattctttctcctccttctcctcccattcctcagccactggcctgattagggccggctccaaagactgcctcatttggagcatttggagttcctttcgtccttgtgatccccagtgcactctgccagccccgtttttaaagaaatggcttctctggaggagggtatctacagccttaaaattaattccaaacgtagctcctataattccatgaaccctcaatttacagctggaagtgagggtcaaaatgaaactgaggaaccaaacaagttccagagcaggaagggtagacctcaagatagtggctcttcattgtctctgagtgttctccaggagatcctgggagatgacattccaaaagtaaaggaagaggctgtcattagttcacaatcagacctaggagagtgtccctactgtggagaaagaccagccaggaatgccactatctttgctcctcaaaaagagaaagagtcagccccagaaatgagcagctcctgtgacaagagggtgactgttaatcctcctgagaaattcagtgaggggcgacctaaaamacaaaatacactcatttgtgaaaaatgctctcagccttcaaattttctggatgactataacccccatgtaataatccaaaagcgamttagcaaccaaagtagagtcatttgtgaaaaaagctctccacctttaaatgttccggataactataactcccattcagtaattcaaaagcrcaaagaaaagatggcaattgagcgcccctcttcagggagtgactggtctgatgtaggtggaaccacagtcatattctctgaaragaagccattctcactgtgtcttcctgtagtgtcagagcctccatactacgccactgactacaccacttttccacctcattatagtccttggcatgactacaccagctcttggttcagcagtaccaagtcttcttgctrtccctccttgggcagcagcagtaacacattgcaggctgggaagagcagctgtagcagcagcagcagaagcaacaacaacatattccagggtgagaggagcagccaccagagcttcctgagtgattattccaccagttttccagygagctccgaaaacacatccagagatctgaagatgacagaggaaggcagatccaagaattcttccttattttactactccagaaatgtggaagcagaggcgaaggaggagagagtatatcaagaggagacattaggacatccttatggaggacgtgcatctagctttccgccaaggaccatctggcagccagagcaaccgggtttcattgatacccactgtcatttagacttgctatattccaggctgcctttcaaaggcacctttaccaaattcagaaaaatttatagcaacaccttccccaaggagtttcagggctgcatttcttgcttctgcaatcctcaaaacctaagtgataacctgtgggaggatcagttgaaagatgatctggtttggggggtctttggctgtcgccctcattttgcccattattataacaactatcaagaaagaagtattttaaaagccttacgacaccccaaggctgtggcattcggcgaaatgggcttggattactccagtaagtgcaccacgcatatcccagagcagcagaaagtatttaagagactgctgcggctggccgtctctctaaagaagcccatgatgatccactgccgagaagccgatgaagacctactgcacatcttgaaaaattacgtgccctctgaccacaagatacatcgccattgcttcactgggagttactcagtcatcgagcccctgttgaaccactttcccaacctgtatgtgggcttcacggcaattctgacttactcttctgctgggcaagcccgagaaactgtgagaaagatcccgctagagagaattattgtagaaaccgatgctcccttcttcctccctcgctgggttcccaaaagctattgccagtatgcccacccaggcctggccctgcatactgtgcgagagattgccagaatcaaaggtgtgtcgctctcccacaccttgaccgtcttgcgggagaacacccatcgcctctaccatctt

SEQ ID NO: 706 - DNA, 651 bp, Homo sapiens
atgaagctgaatctggtgcagatctttttcatgttgctgatgctgctgctgggcctggggatgggcctggggttgggacttcatatggctrcagcagtcttggaggakagtgatcaaccgctcaatgaattttggtccagtgactcacaggacaaagctgaggccactgaggagggagacggcacccaaaccacagaaacgctggtgcttagcaacaaagaagtggtgcaacctggctggccagaagatcccatcctcggtgaagatgaggttgggggtaacaagatgctcagagcctcagctctctttcagagcaacaaagactatcttaggcttgascagacagatagagaatgcaatgatatgatggcacacaagatgaaggagcccartcagagttgcatagcccagtatgcattcatccatgaggatctaaacacagtcaaagctgtctgtaacagtcctgtcattgcctgtgagctcaaggggggaaaatgtcacaaaagctcccgaccttttgatttgacattgtgcgagctgtcccaaccagaccaggtcactcctaactgcaattacctaacttctgttataaaaaagcacattattataacctgtaatgacatgaagcgccagttaccaactggacaatga

SEQ ID NO: 707 - DNA, 1769 bp, Homo sapiens
ytctgttgaagatgcactggacaccagaacacgcccagcccctcaaccagtggccagagcagcacctggacgtctcctccaccaccccgtcgccggcccacaagttggagttgccccctgggggtcgccaacgctgccactacgcttgggcacacgacgacatctcagccctcactgcctccaacctcctaaagcgctatgcagagaagtactctggggtcttggattctccctacgagcgtccggccctgggcgggtacagcgacgcctccttcctcaacggcgccaaaggggatcccgagccctggccagggccggagccaccctaccccttggcctcactccacgaaggcctcccaggaaccaaatcgggcggtggcggcggttccggggccctggggggctccccagttttagccgggaacctccctgaacccctctacgccggcaatgcgtgcgggggcccatcggcggcgcccgagtacgcggccggctacggcggggggtacctggcgccgggttagcccctgcccgcgccggcaccgcccaccgcmtatggcttccccacggccgcgccgggtgccgaatccgggctgtcgctgaagcgcaaggccgccgacgaggggcccgagggccgctaccgcaagtacgcgtacgagcccgccaaggcccccgtggctgacggagcctcctaccccgccgcggacaacggcgaatgtcggggcaacgggttccgggccaagccgccaggagccgcggaggaggcgtcgggcaagtacggtggcggcgtccccctcaaggtcctgggctcccccgtctacggcccgcaactggagccctttgaaaagttcccggagcgggccccggctcctcgtggggggttcgccgtgccgtcgggggagmctcccaaaggcgtggaccctggggccctggagctggtgacgagcaagatggtggactgcgggcccccggtgcagtgggcggatgtggcgggccagggcgcgctcaaggcggcgctggaggaggagctggtgtggcccctgctcaggccgcccgcctacccgggcagcctgcgcccgccgcggaccgtcctgctctttgggccgcggggcgcgggcaaagcgctgctgggccgctgcctcgccacgcagctgggcgccacgctgttgcgcctgcgcggcgcgaccctggctgcgcccggcgccgccgagggcgcgcgcctcctccaggccgccttcgcggccgcgcgctgccgcccaccctccgtactcctcatcagcgagctagaggcgctgctccccgcccgggacgacggcgcggcggcagggggcgcgctgcaggtgccgctcctggcctgcctggacgggggctgcggcgcgggggctgacggcgtgctggttgtgggcaccacctcgcggcccgcggctctggacgaggcgacccgccggcgcttctctctccgcttctacgtggcgctgcccgacagcccggcccgcgggcagatcctgcagcgggcgctggcccagcagggctgcgcgctcagtgagcgggaactggcggcgctggtgcagggcacgcagggcttctctgggggcgagctggggcagctgtgccagcaggcggcggccggggcgggcctcccggggctgcagcgccccctctcctacaaggacctggaggcggcgctggccaaggtgggccctagggcctctgccaaggaactggactcgttcgtggagtgggacaaaatgtacggctccggacactga

SEQ ID NO: 708 - DNA, 2268 bp, Homo sapiens
ggcttgaagatgcagtggacgccagagcatgcccagtggccagaacagcactttgacatcacctcaaccactcggtctcctgcccacaaagttgaagcctacagaggtcatctgcagcgcacctatcagtacgcctgggcgaatgatgacatatctgctctgactgcatccaacctactaaaaaaatatgcagagaagtattccggcattttggaaggtcctgtggaccgacccgtactcagcaactattcggacacaccatyaggactagtgaacggtcggaaaaatgaaagtgaaccctggcagccttccttgaattcagaagctgtttatcccatgaactgtgttccggatgttatcactgccagcaaagctggagtcagttcagccctccctccagcagatgtctctgcgagtataggaagctctcctggggtagccagcaacctgacagaacctagttattcaagtagtacctgtggaagccacactgtacccagtcttcatgcagggctcccatctcaggaatatgccccaggatacaacggatcatatttgcattctacttatagtagccagccagcacctgcacttccttcacctcatccgtctcctttgcatagctctgggctactacagcccccaccaccacctcctccgccaccagccttggtcccaggctacaatgggacttctaacctctccagttacagctatccgtctgctagctatcctcctcagactgctgtggggtctgggtacagccctgggggggcaccgcctccgccttcagcgtacctgccttcaggaattcctgctcccacccccctwccccccaccactgttcctggctacacctaccagggccatggtttgacacctattgcaccgtcggctctgacaaacagttcagcaagttctctcaaaaggaaagctttctacatggcagggcaaggagatatggactccagttatggaaattacagctatggccaacagagatctacacagagtcctatgtacagaatgcccgacaacagcatttcaaacacaaatcgggggaatggctttgacagaagtgctgaaacatcatccttagcatttaagccaacgaagcagctaatgtcctctgaacagcaaaggaaattcagcagccagtccagtagggctctgacccctccttcctacagtactgctaaaaattcattgggatcaagatccagtgaatcctttgggaagtacacatcgccagtaatgagtgagcatggggacgagcacaggcagctcctctctcacccaatgcaaggccctggactcygtgcagctacctcatccaaccactctgtggacgagcaactgaagaatactgacacgcacctcatcgacctggtaaccaatgagattatcacccaaggacctccagtggactggaatgacattgctggtctcgacctggtgaaggctgtcattaaagaggaggttttatggccagtgttgaggtcagacgcgttcagtggactgacggccttacctcggagcatccttttatttggacctcgggggacaggcaaaacattattgggcagatgcatcgctagtcagctgggggccacatttttcaaaattgccggttctggactagtcgccaagtggttaggagaagcagagaraattatccatgcctcttttcttgtggccaggtgtcgccagccctcggtgatttttgttagtgacattgacatgcttctctcctctcaagtgaatgaggaacatagtccagtcagtcggatgagaacsgaatttctgatgcaactggacactgtactaacttcggctgaggaccaaatcgtagtaatttgtgccaccagtaaaccagaagaaatagatgaatcccttcggaggtacttcatgaaacgacttttaatcccacttcctgacagcacagcgaggcaccagataatagtacaactgctctcacagcacaattactgtctcaatgacaaggagtttgcactgctcgtccagcgcacagaaggcttttctggactagatgtggctcatttgtgtcaggaagcagtggtgggccccctccatgccatgccagccacagacctttcagccattatgcccagccagttgaggccygttacatatcaagactttgaaaatgctttctgcaagattcagcctagcatatctcaaaaggagcttgatatgtatgttgaatggaacaaaatgtttggttgcagtcagtgataacttctttag

SEQ ID NO: 709 - DNA, 770 bp, Homo sapiens
atggacattacagtatattttgaaagaactggttataagaactctaggaacaaattaaacttggaaatattaactgctatcttcagcaacaggtctgagctgttccctctgagaactttagcatgcattgtggggaacacatggagtagggcttaaagtccatttttttttatcamgttataagaagacccccagggtgggtggtgtctctgggttgatcgatttctgtaaagggctctgaccacaactggctttgagaccacgatattggcagggaatgtttatatccctctggccaaaaaatatagcgctgacatggttcaccttcttctgcaggtgaccgttaacggcaagtaccacatcactgatggtcagtttggaagctccttccagatgtggcagcctctggggtttatttctgggaaggatcagcctcaggtgtcactcattttctgcttgagagagagagtggattctgctacctggatcaccttagaagaygtcagcacatttcaaactaagattttcttaattctgatctccgggaagaaaagaaataacaaaaaaaaatctactcctttactcctgaatcctgaacaattgaagattttgagtctgtgagtacatacctgtagacatctccaacatctccatttacaagcacattattttgttctgtgcaaaccccagaaggtatgcactgcttggtgggcttcactctcaactgtaggagattctgctataaggacaatatggatctcgtagagttt

SEQ ID NO: 710 - DNA, 1271 bp, Homo sapiens
atgaatacaatttgaagactgctggggagtaatgacgtctcatagctcaacctatctggccattaaaaatggtatgagttaggcgggcatggtggcttgtgcctgtaatcccagcaatttgggatgctgaggcaagaggattgcttaagcccaggagttcaagaccagcctgggcaacatagtgagaccctctctaaaacaattaaaatttaaattagctagacctggtggcacatgcctgtaatccaagctacttgggaagctgaggtgggaggatcacttgagcccaggagtttgaggctacagtgagctatgatcgcaccactgcactccagcctgggccacagagccatatcccatcttaaaaaaatggtatgagtcaattgtgtttcwctgctgaagactacctcaactatgtcatctacatatatgattcctcccatgaaaagttcaacattattgtcaaggctaagaaatggaaacttgtctatattaggaaacccatttccactttctaggagtgagatattgccaatatcaagtaagataatgctagcatctaatatgttatgtagcccactagtctctttcttctcttggagaaggctagagttcatgttagagatggaggcacattatctcttcctattctgcagatggcccaacgtttgtgatggaagtgaaccatgagaagtatgaccacttctcctcttgtactgcaaactctctggccccctaatcaaggttatccatccatgacaactttggatcatggagatactcattatcacagttcacaccatcacttccatcgtgaaaaatccagatggtttcttaataggaaactgtggtatgttagtcataccacagttggtgctgtccagattatcattgctgcaaacactgacaccaccaaggctatggggaaggtcattcctgtgctgaatgggaagctcattgatatggttttctgtatctccaacatgtctgtcatggacctgacctgcattctggagaaagtatacaagtatagcgacatcaataaagtgttgagtcaggcattggaaggccccttagaggacaccctggcctacgctaaagaccaagttatctcctgtgactttaacagtgacacccattcctccatctttgatgcttgggctagcattgatctccatgaccatattgttaagttcatttactggtaggacaatgagtttggctgtaggaaccaaattgcagacttcatggttcatgtgaccactagggag

SEQ ID NO: 711 - DNA, 2108 bp, Homo sapiens
cagaaggcgccaccatggcggcgcccccgcagcccgtcacccacctcatctttgacatggacggacttcttctgggtgggtagtgtgcagccgccgcctccaatactgaacggctgtattcagtggtgtttcaagaaatatgtaatcgctatgacaagaaatacagctgggatgtaaagtccctggttatgggtaagaaggcattagaggcggcacagattataatagacgtcttgcagctcccgatgtccaaagaggagctggtggaagaaagccaaacgaagttaaaggaagtgttccccayggctgcgctcatgccaggggcggagaaactcatcatccacctgcggaaacatggcatcccctttgcactrgccaccagctcggggtccgcrtcgttcgatatgaagacaagccgccacaaggagttcttcagcttkttttcccacattgtgctgggagatgaccccgaagtgcagcatggcaagccagacccrgacatcttcctagcttgtgccaagaggttctctcccsctcctgctatggagaagtgccttgtctttgaagatgctcccaatggggtggaggcggccctggcagctgggatgcaggtggtcatggttcctgacggaaacttgagccgagatctgacaacaaaggccaccctggtgctgaattccctgcaggacttccagcccgagctgtttggtttgccctcctatgagtgagagggagggcctcagtcttccgcccccagcccactctcatggtccacactgctgggggaaagggaaaggaaatcagcaactcttcaatcccaacctgcgctgtgattttagcctcctgagattggagtttccatcccatgttggtttgtcccagtctaacgtgttgataaaatgtgacttgacggttgagacaaaaaatacagtagagacagaaacgaagcccagaacaaagatgaaacttgaattaccatctcagaagtcaagctgatggagtatgtgataaagtgaatgtacatgtatatacacacacacctccatatatacaygtgtgtatcagtttggtaatatgcaggtaggcattacatgcatakgtatgtagacatatgcatgcatgtatatgtaaaatatatacttttccaagacaaaatggaacatcacttctctcttctagtttttctgaacactggctgggaaatgtaaactgtgtatgcatataagtatatgctttatgtatgcatatgtatgtagatrtgtttatatctatcgtctgcatcactctcctcagtgttgatgtcaacatgcaatgacaactgataaagcgagatggtagttctgcctggtttgcagtctgagtgggaaagtcctgtttttgatgagcactccttgttagctaacatttaaattctttttgtgacctcagaatgtctctggatctttcctcattgactgactctgtgccwcgtcatccatagtttattgttagtatgaacacaactgtaacatttacctggtatctacatccttacctgcattggaaaatgtttgctacctcacaacaaccatttgcctcctttaagaacactgatgggctgcactttttggatagaaatagaatttgatttcagaatgtatgcttggtgagtctcagtgcccaggaacacttttggaataatttatcagacattgaacttctgtgattaatygcttttatagatttactcagtctttaaaattcgtctctgatttgccagagaaaaacggtggtagccatggaaatcgggagtgaaggagcactgcttcattgtggctcagcccttcctaggggcctctgccctttgatgtccttgagctactcttcagctctggaagttgtggacaaacygtaggaatgtatgtgtgcgtgtggtggagtgattgtctgtgaatgacaggccctggctattgattgatgttgcatcaatttagcaaattcatttcctcattcttgatggcctgaatatatgtctgcacttttaatgctcctcttaaccagttgtaacatcttaccatttccctaacaaattgaattagtttaataaaatcttttgacacatgttgata

SEQ ID NO: 712 - DNA, 2137 bp, Homo sapiens
cgcgtgcgcggggcgggcgggtgcgcgcgcacttcctcctcgcccccacccagacccagaaggcgccaccatggcggcgcccccgcagcccgtcacccacctcatctttgacatggacggacttcttctggatactgaacggctgtattcagtggtgtttcaagaaatatgtaatcgctatgacaagaaatacagctgggatgtaaagtccctggttatgggtaagaaggcattagaggcggcacagattataatagacgtcttgcagctcccgatgtccaaagaggagctggtggaagaaagccaaacgaagttaaaggaagtgttccccayggctgcgctcatgccaggggcggagaaactcatcatccacctgcggaaacatggcatcccctttgcactrgccaccagctcggggtccgcrtcgttcgatatgaagacaagccgccacaaggagttcttcagcttkttttcccacattgtgctgggagatgaccccgaagtgcagcatggcaagccagacccrgacatcttcctagcttgtgccaagaggttctctcccsctcctgctatggagaagtgccttgtctttgaagatgctcccaatggggtggaggcggccctggcagctgggatgcaggtggtcatggttcctgacggaaacttgagccgagatctgacaacaaaggccaccctggtgctgaattccctgcaggacttccagcccgagctgtttggtttgccctcctatgagtgagagggagggcctcagtcttccgcccccagcccactctcatggtccacactgctgggggaaagggaaaggaaatcagcaactcttcaatcccaacctgcgctgtgattttagcctcctgagattggagtttccatcccatgttggtttgtcccagtctaacgtgttgataaaatgtgacttgacggttgagacaaaaaatacagtagagacagaaacgaagcccagaacaaagatgaaacttgaattaccatctcagaagtcaagctgatggagtatgtgataaagtgaatgtacatgtatatacacacacacctccatatatacaygtgtgtatcagtttggtaatatgcaggtaggcattacatgcatakgtatgtagacatatgcatgcatgtatatgtaaaatatatacttttccaagacaaaatggaacatcacttctctcttctagtttttctgaacactggctgggaaatgtaaactgtgtatgcatataagtatatgctttatgtatgcatatgtatgtagatrtgtttatatctatcgtctgcatcactctcctcagtgttgatgtcaacatgcaatgacaactgataaagcgagatggtagttctgcctggtttgcagtctgagtgggaaagtcctgtttttgatgagcactccttgttagctaacatttaaattctttttgtgacctcagaatgtctctggatctttcctcattgactgactctgtgccwcgtcatccatagtttattgttagtatgaacacaactgtaacatttacctggtatctacatccttacctgcattggaaaatgtttgctacctcacaacaaccatttgcctcctttaagaacactgatgggctgcactttttggatagaaatagaatttgatttcagaatgtatgcttggtgagtctcagtgcccaggaacacttttggaataatttatcagacattgaacttctgtgattaatygcttttatagatttactcagtctttaaaattcgtctctgatttgccagagaaaaacggtggtagccatggaaatcgggagtgaaggagcactgcttcattgtggctcagcccttcctaggggcctctgccctttgatgtccttgagctactcttcagctctggaagttgtggacaaacygtaggaatgtatgtgtgcgtgtggtggagtgattgtctgtgaatgacaggccctggctattgattgatgttgcatcaatttagcaaattcatttcctcattcttgatggcctgaatatatgtctgcacttttaatgctcctcttaaccagttgtaacatcttaccatttccctaacaaattgaattagtttaataaaatcttttgacacatgttgata

SEQ ID NO: 713 - DNA, 2949 bp, Homo sapiens
atggagatggctaacagctagagcaggctgtcctcggagggagacattccatctccagacacccagagacgctccagaatggaggtcctgagggagaaggtggaggaggaggaggagsccgagcgggaggaggcggccgagtgggctgaatgggcgaggatggagaaaatgatgaggccagttgaggtgcggaaggaggaaatcaccttaaagcaggagacgctcagagacctggagaagaagctgtcagagatccagatcactgtctcagcggagctcccggcctttaccaaggacactattgacatctccaagctgcccatttcctacaaaaccaacacacccaaggaggaacacctgctgcaggtggcagacaacttctcccgccagtacagccatctgtgcccrgaccgcgtgcccctcttcctgcaccccctgaacgagtgtgaagtgcccaagttcgtgagcacaaccctccggcccacactgatgccctaccccgagctctacaactgggacagctgtgcccagtttgtctccgacttcctcaccatggtgcccctgcctgaccctctcaagccgccctcgcacctgtactcctcgaccactgtgctcaagtaccagaaggggaactsctttgacttcagtacgctgctctgctccatgcttatcggctctggctatgatgcttactgcgtcaacggytacggctcgctggacctgtgccacatggacctgacgcgggaggtgtgcccactcactgtgaagcccaaggaggaagcggagaaggcaaagccggatgccctgcacggcctgcgggtgcactcctgggtccttgtgctatcggggaagcgcgaggtgcctgagaacttcttcatcgacccattcacaggacatagctacagcacccaggatgagcacttcctgggcatcgaaagcctgtggaaccacaagaactactggatcaacatgcaggattgctggaactgctgcaaggtscctagggagggggagctgsgtgaccctgaggaacggctcgctcatttgtttggtggcttggactgtctgtccatctgcatggcggacgtagccagtctgctgctcctgaactcccgtctcaccatcctgtcccagctgccctcatggtgtatgagcctcttcctgcaacaacaggacttgatctttgacctgggtgaccctgtgagatgggagtacatgctcctggggactgataagtctcagctgtccttgactgaagaagacgacagtgggataaacgatgaggatgatgtggaaaatctgggcaaggaggatgaggataagagcttcgacatgccccactcgtgggtggagcagattgagatctccccggaagaggaggccatgggcagtgcccagatggtgcggggggtctcaggaccggagaggggcagcaagaagagaccacagctgactgtgtccacagcatttgagacccgctgccygaacgggaagaaggtgattcagtacaagagggcaaagctggagaagtgggmcccgtacctcaatagcaatggccttgtgagccgcctcaccacctatgaggacttgcagtgtaccaatattttggagataaaggagtggtaccagaaccgggaagacatgctggagctgaaacacataaacaagaccacagacctgaagacagactacttcaagcctggccacccccaggctctgcgcgtgcactcgtacaagtccatgcaacctgagatggaccgtgtcattgagttttatgaaacggcccgtgtggatggcctgatgaagcgggaggagacacccaggacaatgacagagtactatcaaggacgcccagacttcctctcctaccgccatgccagcttcggaccccgagtcaagaagctcactctgagcagtgcagagtcaaamccccggcccattgtgaaaatcacagagcggttcttccgcaacccagcgaagcccgcggaggaggacgtggcagagcgcgtgtttctggtcgcggaggagcgcatccagctgcgctaccactgccgtgaggaccacatcacggcctccaagcgcgagttcctgcggcgcaccgaggtggacagcaaaggcaacaagatcatcatgacgcccgacatgtgcatcagcttcgaggtggagcccatggagcacaccaagaagctgctctaccagtacgaggccatgatgcacctgaagagggaggagaagctgtcyagacatcaggtctgggagtcagagctggaggtgctggagattctgaagcttcgagaggaagaggaggcggcgcacacactgaccatctccatctatgacaccaagcggaatgagaagagcaaggaatatcgggaggccatggagcgcatgatgcacgaagagcacctgcggcaggtggagacccagctggactacctcaaggatgagtgcctcagcgacttcaagcagcggctcatcaacaaggccaacctcatccaggcccgctttgagaaggagacccaggagctgcaaaagaagcagcagtggtaccaggagaaccaggtgacgctgacacccgaggatgaagacctgtacctgagttactgctctcaggccatgttccgcatccgcatcctggagcagcgcctcaatcgacacaaggaactggccccactgaagtacctggctctggaggaaaagctctacaaggacccacgcctgggggagctccagaaaatattcgcttgatgtccctcctggggcctcagccagagctgccagagaaaggaaacctcttcccgcagcctggctcctgtgttccctctatccagccaatgcctgtttacacagacacctggcctcactgccagcccacctcccctacagccctgtttgttcctgcttctcatgattttcctgtaaataaacacactcttaatttgccatttg

SEQ ID NO: 714 - DNA, 3012 bp, Homo sapiens
atggagatggctaacagctagagcaggctgtcctcggagggagacattccatctccagacacccagagacgctccagaatggaggtcctgagggagaaggtggaggaggaggaggagsccgagcgggaggaggcggccgagtgggctgaatgggcgaggatggagaaaatgatgaggccagttgaggtgcggaaggaggaaatcaccttaaagcaggagacgctcagagacctggagaagaagctgtcagagatccagatcactgtctcagcggagctcccggcctttaccaaggacactattgacatctccaagctgcccatttcctacaaaaccaacacacccaaggaggaacacctgctgcaggtggcagacaacttctcccgccagtacagccatctgtgcccrgaccgcgtgcccctcttcctgcaccccctgaacgagtgtgaagtgcccaagttcgtgagcacaaccctccggcccacactgatgccctaccccgagctctacaactgggacagctgtgcccagtttgtctccgacttcctcaccatggtgcccctgcctgaccctctcaagccgccctcgcacctgtactcctcgaccactgtgctcaagtaccagaaggggaactsctttgacttcagtacgctgctctgctccatgcttatcggctctggctatgatgcttactgcgtcaacggytacggctcgctggacctgtgccacatggacctgacgcgggaggtgtgcccactcactgtgaagcccaaggaggaagcggagaaggcaaagccggatgccctgcacggcctgcgggtgcactcctgggtccttgtgctatcggggaagcgcgaggtgcctgagaacttcttcatcgacccattcacaggacatagctacagcacccaggatgagcacttcctgggcatcgaaagcctgtggaaccacaagaactactggatcaacatgcaggattgctggaactgctgcaaggtscctagggagggggagctgsgtgaccctgaggaacggctcgctcatttgtttggtggcttggactgtctgtccatctgcatggcggacgtagccagtctgctgctcctgaactcccgtctcaccatcctgtcccagctgccctcatggtgtatgagcctcttcctgcaacaacaggacttgatctttgacctgggtgaccctgtgagatgggagtacatgctcctggggactgataagtctcagctgtccttgactgaagaagacgacagtgggataaacgatgaggatgatgtggaaaatctgggcaaggaggatgaggataagagcttcgacatgccccactcgtgggtggagcagattgagatctccccggaagaggaggccatgggcagtgcccagatggtgcggggggtctcaggaccggagaggggcagcaagaagagaccacagctgactgtgtccacagcatttgagacccgctgccygaacgggaagaaggtgattcagtacaagagggcaaagctggagaagtgggmcccgtacctcaatagcaatggccttgtgagccgcctcaccacctatgaggacttgcagtgtaccaatattttggagataaaggagtggtaccagaaccgggaagacatgctggagctgaaacacataaacaagaccacagacctgaagacagactacttcaagcctggccacccccaggctctgcgcgtgcactcgtacaagtccatgcaacctgagatggaccgtgtcattgagttttatgaaacggcccgtgtggatggcctgatgaagcgggaggagacacccaggacaatgacagagtactatcaaggacgcccagacttcctctcctaccgccatgccagcttcggaccccgagtcaagaagctcactctgagcagtgcagagtcaaamccccggcccattgtgaaaatcacagagcggttcttccgcaacccagcgaagcccgcggaggaggacgtggcagagcgcgtgtttctggtcgcggaggagcgcatccagctgcgctaccactgccgtgaggaccacatcacggcctccaagcgcgagttcctgcggcgcaccgaggtggacagcaaaggcaacaagatcatcatgacgcccgacatgtgcatcagcttcgaggtggagcccatggagcacaccaagaagctgctctaccagtacgaggccatgatgcacctgaagagggaggagaagctgtcyagacatcaggtctgggagtcagagctggaggtgctggagattctgaagcttcgagaggaagaggaggcggcgcacacactgaccatctccatctatgacaccaagcggaatgagaagagcaaggaatatcgggaggccatggagcgcatgatgcacgaagagcacctgcggcaggtggagacccagctggactacctggccccattcctggcccagctcccgccaggagagaaaytaacaygctggcaggcggtgcgcctcaaggatgagtgcctcagcgacttcaagcagcggctcatcaacaaggccaacctcatccaggcccgctttgagaaggagacccaggagctgcaaaagaagcagcagtggtaccaggagaaccaggtgacgctgacacccgaggatgaagacctgtacctgagttactgctctcaggccatgttccgcatccgcatcctggagcagcgcctcaatcgacacaaggaactggccccactgaagtacctggctctggaggaaaagctctacaaggacccacgcctgggggagctccagaaaatattcgcttgatgtccctcctggggcctcagccagagctgccagagaaaggaaacctcttcccgcagcctggctcctgtgttccctctatccagccaatgcctgtttacacagacacctggcctcactgccagcccacctcccctacagccctgtttgttcctgcttctcatgattttcctgtaaataaacacactcttaatttgccatttg

SEQ ID NO: 715 - DNA, 1289 bp, Homo sapiens
tgcactcgtacaagtccatgcaacctgagatggaccgtgtcattgagttttatgaaacggcccgtgtggatggcctgatgaagcgggaggagacacccaggacaatgacagagtactatcaaggacgcccagacttcctctcctaccgccatgccagcttcggaccccgagtcaagaagctcactctgagcagtgcagagtcaaamccccggcccattgtgaaaatcacagagcggttcttccgcaacccagcgaagcccgcggaggaggacgtggcagagcgcgtgtttctggtcgcggaggagcgcatccagctgcgctaccactgccgtgaggaccacatcacggcctccaagcgcgagttcctgcggcgcaccgaggtggacagcaaaggcaacaagatcatcatgacgcccgacatgtgcatcagcttcgaggtggagcccatggagcacaccaagaagctgctctaccagtacgaggccatgatgcacctgaagagggaggagaagctgtcyagacatcaggtctgggagtcagagctggaggtgctggagattctgaagcttcgagaggaagaggaggcggcgcacacactgaccatctccatctatgacaccaagcggaatgagaagagcaaggaatatcgggaggccatggagcgcatgatgcacgaagagcacctgcggcaggtggagacccagctggactacctggccccattcctggcccagctcccgccaggagagaaaytaacaygctggcaggcggtgcgcctcaaggatgagtgcctcagcgacttcaagcagcggctcatcaacaaggccaacctcatccaggcccgctttgagaaggagacccaggagctgcaaaagaagcagcagtggtaccaggagaaccaggtgacgctgacacccgaggatgaagacctgtacctgagttactgctctcaggccatgttccgcatccgcatcctggagcagcgcctcaatcgacacaaggaactggccccactgaagtacctggctctggaggaaaagctctacaaggacccacgcctgggggagctccagaaaatattcgcttgatgtccctcctggggcctcagccagagctgccagagaaaggaaacctcttcccgcagcctggctcctgtgttccctctatccagccaatgcctgtttacacagacacctggcctcactgccagcccacctcccctacagccctgtttgttcctgcttctcatgattttcctgtaaataaacacactcttaatttgccatttg

SEQ ID NO: 716 - DNA, 2916 bp, Homo sapiens
atggagatggctaacagctagagcaggctgtcctcggagggagacattccatctccagacacccagagacgctccagaatggaggtcctgagggagaaggtggaggaggaggaggagsccgagcgggaggaggcggccgagtgggctgaatgggcgaggatggagaaaatgatgaggccagttgaggtgcggaaggaggaaatcaccttaaagcaggagacgctcagagacctggagaagaagctgtcagagatccagatcactgtctcagcggagctcccggcctttaccaaggacactattgacatctccaagctgcccatttcctacaaaaccaacacacccaaggaggaacacctgctgcaggtggcagacaacttctcccgccagtacagccatctgtgcccrgaccgcgtgcccctcttcctgcaccccctgaacgagtgtgaagtgcccaagttcgtgagcacaaccctccggcccacactgatgccctaccccgagctctacaactgggacagctgtgcccagtttgtctccgacttcctcaccatggtgcccctgcctgaccctctcaagccgccctcgcacctgtactcctcgaccactgtgctcaagtaccagaaggggaactsctttgacttcagtacgctgctctgctccatgcttatcggctctggctatgatgcttactgcgtcaacggytacggctcgctggacctgtgccacatggacctgacgcgggaggtgtgcccactcactgtgaagcccaaggaggtatrtggttgggtgatgggaggggagatgggccgtcacactccggttgatggtgcagtctacatcagaactcagctctcctgctggttccccagycccagggagwtgtctgggcccctgacactcctcttccagccatctgactygtagtcacccacctttccttggcaggaagcggagaaggcaaagccggatgccctgcacggcctgcgggtgcactcctgggtccttgtgctatcggggaagcgcgaggtgcctgagaacttcttcatcgacccattcacaggacatagctacagcacccaggatgagcacttcctgggcatcgaaagcctgtggaaccacaagaactactggatcaacatgcaggattgctggaactgctgcaaggacttgatctttgacctgggtgaccctgtgagatgggagtacatgctcctggggactgataagtctcagctgtccttgactgaagaagacgacagtgggataaacgatgaggatgatgtggaaaatctgggcaaggaggatgaggataagagcttcgacatgccccactcgtgggtggagcagattgagatctccccggaagcatttgagacccgctgccygaacgggaagaaggtgattcagtacaagagggcaaagctggagaagtgggmcccgtacctcaatagcaatggccttgtgagccgcctcaccacctatgaggacttgcagtgtaccaatattttggagataaaggagtggtaccagaaccgggaagacatgctggagctgaaacacataaacaagaccacagacctgaagacagactacttcaagcctggccacccccaggctctgcgcgtgcactcgtacaagtccatgcaacctgagatggaccgtgtcattgagttttatgaaacggcccgtgtggatggcctgatgaagcgggaggagacacccaggacaatgacagagtactatcaaggacgcccagacttcctctcctaccgccatgccagcttcggaccccgagtcaagaagctcactctgagcagtgcagagtcaaamccccggcccattgtgaaaatcacagagcggttcttccgcaacccagcgaagcccgcggaggaggacgtggcagagcgcgtgtttctggtcgcggaggagcgcatccagctgcgctaccactgccgtgaggaccacatcacggcctccaagcgcgagttcctgcggcgcaccgaggtggacagcaaaggcaacaagatcatcatgacgcccgacatgtgcatcagcttcgaggtggagcccatggagcacaccaagaagctgctctaccagtacgaggccatgatgcacctgaagagggaggagaagctgtcyagacatcaggtctgggagtcagagctggaggtgctggagattctgaagcttcgagaggaagaggaggcggcgcacacactgaccatctccatctatgacaccaagcggaatgagaagagcaaggaatatcgggaggccatggagcgcatgatgcacgaagagcacctgcggcaggtggagacccagctggactacctggccccattcctggcccagctcccgccaggagagaaaytaacaygctggcaggcggtgcgcctcaaggatgagtgcctcagcgacttcaagcagcggctcatcaacaaggccaacctcatccaggcccgctttgagaaggagacccaggagctgcaaaagaagcagcagtggtaccaggagaaccaggtgacgctgacacccgaggatgaagacctgtacctgagttactgctctcaggccatgttccgcatccgcatcctggagcagcgcctcaatcgacacaaggaactggccccactgaagtacctggctctggaggaaaagctctacaaggacccacgcctgggggagctccagaaaatattcgcttgatgtccctcctggggcctcagccagagctgccagagaaaggaaacctcttcccgcagcctggctcctgtgttccctctatccagccaatgcctgtttacacagacacctggcctcactgccagcccacctcccctacagccctgtttgttcctgcttctcatgattttcctgtaaataaacacactcttaatttgccatttg

SEQ ID NO: 717 - DNA, 1392 bp, Homo sapiens
atgggtgataggcctgtccagtttgaaattctcagtgatcaatcagtcaactttggttttagtaagtttccatgggtgaactatcaagatggcaatctcarcatttcaattccagtgtttagtattcatggtaatcatgacgaccccatgggggcagatgcacgctgtgccctggacattttaagttgtgttggatttgtaaatcactttggactttcaatgtccgtggagaagatagacattagtctggttttgcttcaaaaaggaagcacaaacattgcactctatgatttaggatccattccagatgaaaggctctctcgaattccagaacaatttttggatgacttcattgatcttgttatctggggccatgcacatgagtataatcctaaagtaaaccaagccatacaaagcttctgtttggcgaagattgaagaaatgcttgaaaatgctaaatrggaacatctaggtaattcttgccagccagagaagtctcttataccactgcgartggactatagtggaggttttgaacctttcaacgttcttcgctttagccagaaatttgtacatcgggtagctaatccaaaagacattatccattttttcaggcatagagaacaaaaggaaaaaacaggggaagagatcaactttgggaaacttaccgcaaaaccttcttcagaaggaacaactttaagggtagaagatcttgtaaaacagtattttcaaactgaagagaagaatgtgccactctcactgctaacagaaagagggatggaacgtcatattgatgccctagaagataaaatcaatgaggaagtatgtcgattcagagaaaacagacaaaaaaatactagtgaagatgatgacgtccatgaggctattaacagggccagagaagcctttaaatctacaagacagcagccttcccaaaatgtcactaaaaattattcagaggtgattgaggtagatgaatcagatatggaagaagacatttttcctrccacttcacagacacatcaaaagtggtccagcacatcatccagcaaaaacatgtcccagagccaacatgatgtgggacagcatccaaacgtttctctagcagcggtccctgccatcaaaagtcrtgcaggaatgcctgaggaagccagcagctgcgaaagctggggtcgagatcaaggggatacgaagtgcacaaatggggccctggaggcccacagattccactctccatcctctttcctcaatggaaatgcctgttactctgaagctagcccctactatcttgaaaacaggttctttacaccttcctccatccctgctgtgctccagacccgaagcctttcttcctcatcttatgttgacacattgtccctatgccttgctaca

SEQ ID NO: 718 - DNA, 2700 bp, Homo sapiens
aacttgtttaaaatcttagttgcaacagatattgatcttggatttatggagaaagatgtagtcagaggaaatgatacatgtgtaacgcttgatgaaattttaaaacttgcccaggaaaatgaagtggattttattttgttaggtggtgatctttttcatgaaaaaagccctcaaggaaaacattacatacctgcctcaagttattaagaaaatgttgtatgggtgataggcctgtccagtttgaaattctcagtgatcaatcagtcaactttggttttagtaagtttccatgggtgaactatcaagatggcaatctcarcatttcaattccagtgtttagtattcatggtaatcatgacgaccccatgggggcagatgcacgctgtgccctggacattttaagttgtgttggatttgtaaatcactttggactttcaatgtccgtggagaagatagacattagtctggttttgcttcaaaaaggaagcacaaacattgcactctatgatttaggatccattccagatgaaaggctctctcgaatgtttgtcaataagaaataacaatgttgagatcaaaagaagatgagaactcttggtttaacttatttgtgattatttgtgattacagaagtaaacatggctaagtactaacttcagtccagaacaatttttggatgacttcattgatcttgttatctggggccatgcacatgagtgtaaaatagctccaaccaaaaatgaacaacaggtcaggcgcaatggctcatgcctgtagtcccagaactttgtgaggccaaggtgggtggatcacatgaggtcaggagttcgagaccagcctgaccaacatggtaaaaccccgtctctactaaaaatacaaaattagctgggcatggtgccacatgcctgtaatcccagctacgtgggaggctgaagcaggagaatcacttgaacctgggaggtgaaggttgcagtgagccaagatcgcaccattgtgctatagcctggacaacaggagtgaaactccatctaaaaaaaacaaaaaacaaaaatgaacaacaactattttatacctcacaacctggaagctcagtggttacttctctttccccaggagaagctgtaaagaaacatgttggtttcctgtgtattaaaggaagaaaaatgaatatgcagaaaattcctcttcacacagtgcggtagtttttcatagaggatgttgttctggctaatcatccattttttaacccagataatcctaaagtaaaccaagccatacaaagcttctgtttggcgaagattgaagaaatgcttgaaaatgctaaatrggaacatctaggtaattcttgccagccagagaagtctcttataccactgcgartggactatagtggaggttttgaacctttcaacgttcttcgctttagccagaaatttgtacatcgggtagctaatccaaaagacattatccattttttcaggcatagagaacaaaaggaaaaaacaggggaagagatcaactttgggaaacttaccgcaaaaccttcttcagaaggaacaactttaagggtagaagatcttgtaaaacagtattttcaaactgaagagaagaatgtgccactctcactgctaacagaaagagggatgggtgaagcagtacaagaatttgtggacarggaggagaaagatgccattgaggaattaatgaaatgccagttgtaaaaaacacagcaatttcgtctgggcgcggaggctcacatctctaatcccagcactttgggaggccgaggcgggtggatcacaaggtcaggagatcgagaccatcctggctaacacagtgaaacgccatctctactaaaaaatagaaaaaaaattagctggacatggtggcaggcgcctgtacttccagctacacgggaggctgaggcaggagaatggcgtgaacctgagaggcggagcttgcagtgagccgagatcgcaccactgcactccagcctgggtgacagagagagactctgtctcaaaaaaacacaaaaaaaaacaaaaaaacaaaaaaaaaaaacacagcattttctttaagaacgtcatattgatgccctagaagataaaatcaatgaggaagtatgtcgattcagagaaaacagacaaaaaaatactagtgaagatgatgacgtccatgaggctattaacagggccagaggtctcagatctcaatcagaggaacctgcttctgcctttagtgctgatgaccttatgagtatagatttagcagaacagatggctaatgactctgatgttaacatctcagcagcaaccaacaaagaggctgaggaagaggtggaagaggaggaagaggacagaattcagcatcagaggagggtctcaaagaggaagagcaggccctggtctggagacttctactcatagcaggaactcaaagaccatggtgccagcatctagaaatatgtctattacagaagcctttaaatctacaagacagcagccttcccaaaatgtcactaaaaattattcagaggtgattgaggtagatgaatcagatatggaagaagacatttttcctrccacttcacagacacatcaaaagtggtccagcacatcatccagcaaaaacatgtcccagagccaagtattgaaaggggttgattttgaatcagatgaggatgacgatgatgatcctttt

SEQ ID NO: 719 - DNA, 1462 bp, Homo sapiens
atggccagtgtagactggagagagccggagggactggtctcccctcaaggcccgaagcaggactggcaccagcggatttttgtcaaccgcagcctggcgctggggaagattcgttgctttggcttcgacatggactacactctggctgcctacaagtccccagcttatgaggccctgaccttcgagctgctgctggagcrcctggtgtgcattgggtacccgcatgagatcctgcgctacacctacgaccccaccttccccaccaggcggctggtgttcgatgaactctatgggaacctgctgaaggtggacgcccacgggaatgtgctgctgggtgcctatggcttcaccttcctctcggaggcagagatctggagcttctaccccagcaagttcattcagagggacgacctgcagtgtttctacatactcaacatgctcttcaacctgcctgaaacctacctctatgcctgcttggtggacwtcttctctggctgctcccgttacactaattgtgacaccggctatcagcatgggaacctcttcatgtccttccgaagcctcttccaggatgtgactgatgccatgaataacatccaccagtcgggctgtctcaagaagaccctggaggacttggagaaatatgtgaagaaggatccaygcctccccatcctgctggggaagatgaaggaggttgggaaagtgtttctggccaccaacagcagctacaactacaccaatgccatcatgacctacctgttcagcatcagtgaggctgaagcctcgggcaggccctggaggtcctactttgacctgatcgtggtggacacgcagaagccccacttctttgcagaggggttggtcctgaggcaggtcaacacggtaatggcaggtgcagaggactcaggaaagctccacgtgggcacctmcacagggccccaccagcactgtgctgtctactctggaggctcttcggacatggtgtgcgagctgcttggggttcgggggatggacatcctgtacattggggaccacatttttggggacattctcaagtccaagaagcgtcagggctggcggacttgcctggtggttcctgagctgtcctgggagctggacatctgggcccaggagaaggagcggttggaggagctgaagagactggacacgcacctggcagacatataccagcacatggatgggagcagttgtgagctgcaagtcatcaacttcaccaagagagagatccagagggtcacccaaggagctggacctgtgctacagcaccatgggcagcttgttccgctgcggtttccgccagacactcttctccagccagctgatgcgctatgccgacctytacactgccgcctgcctcgacytcctgtacttccgagtgagctcagctctctcgggcggccccggagttggtgggtccctgcggaatctccacggctgtttg

SEQ ID NO: 720 - DNA, 1133 bp, Homo sapiens
atgcctataacatgcctgcatggtgggacagcaagcggctgattgcccgcacacactcagatgcacgcttgcacacatgctcacacatgcttacatgcacactcacacttgccttcagacacacatgggtccaggcagggccctggcttggcctgacctgcttcccctgtgctttctgcagctgcagggggtgctctgccctcctctgcggggtttccaccccctctgtccttgggccttggattctggggggctggtggactgatgccaacatcctcctctctctccccaggatttttgtcaaccgcagcctggcgctggggaagattcgttgctttggcttcgacatggactacactctggctgcctacaagtccccagcttatgaggccctgaccttcgagctgctgctggagcrcctggtgtgcattgggtacccgcatgagatcctgcgctacacctacgaccccaccttccccaccaggcggctggtgttcgatgaactctatgggaacctgctgaaggtggacgcccacgggaatgtgctgctgggtgcctatggcttcaccttcctctcggaggcagagatctggagcttctaccccagcaagttcattcagagggacgacctgcagtgtttctacatactcaacatgctcttcaacctgcctgaaacctacctctatgcctgcttggtggacwtcttctctggctgctcccgttacactaattgtgacaccggctatcagcatgggaacctcttcatgtccttccgaagcctcttccaggatgtgactgatgccatgaataacatccaccagtcgggctgtctcaagaagaccctggaggacttggagaaatatgtgaagaaggatccaygcctccccatcctgctggggaagatgaaggaggttgggaaagtgtttctggccaccaacagcagctacaactacaccaatgtgagtatgtgtatggaggggtggaccgtyggcctccttcctggccccaggggacacagwggcactgcaagcaacagggaggggtggggcggggagccaagaccctcctacccccaccactgggctggtctcctggactccatttcttggcctttcaaggcctcagargaatga

SEQ ID NO: 721 - DNA, 1641 bp, Homo sapiens
aattagccgggtgtggtggcgtatgcctgtaatcccagctactcgggaggctgaggcaggagaatcgcttgaacctgggaggtggaggttgcatgagcrgagattgtgccactgcactccagccagagtgacagagcaagactccatctcaaaaaataataataaaaataaacaaatctgtttaaattactgttgcctttcagcattagactttgagtttaataactacaaattgagactgctcacaatattaactttttttgtaggttattttgttgtttagataacttgcctccctagaggagcattcaggagataaagacctagctacatgtaatgatatgatcatttcaaaaatgtgccaagaaagcaaaattcattattgaactctaaatttctgggtgtttttttttttaaagtagcattttctctgggtaaagggaaaggcaatgaatgattgccaacatgtaaactccctgctgcccgccttcccccagtcccctccatctaacataatacagtaaatttgtagccagttgtagaaaaagaaattgatatctttctgagtaaggtttcatgccctgtgactaagaataggtggaggaatcatggccaaatcaaatatgaattgtttagcttggtcctgttgcagttggctttctgtagtgttctgaaacaagaggacgattccattccttctcaggaacctagaaacaacaccgcttgagcaactggaatatgtttgctgcaagcagaatattttggggagaggaagagtagtttaattcaagtagtttaattgaacatattagtcattggtctgtctgggacgtgcagtgttcatagtagcaatgtatgtaccatttattttatctggttgtgtgtgatgtgtgtgtatgcctatttaatatgtacacatatattcactacatatgtatgtatgatatattcatatatacatgcagtctgcttgattatcagcaaaatggtcagcctttatcagatagtttcttcatgtggagttcatctgcatgtggcccttactctgaagcctcttcctgatctggagccacagtctgtctgtcttccagttcatctcagtcctcgagaaaggccctttaaatatgtcactttcccattttcctttaaccatgggttgtgtgagccagaaagagctttgagaaagatggctgcttccaccagggtggaggcttctaggtctgcatgatgatggggcccgtttctggccagagggtggctctgggagcagttgtgctgygggcttgctgggggagaactctaactgttgcagaaacagagcttcatggcttgcttaaattacttagctggaatattttaaagtgtcagataatgtgatgtacaaagagagtatgccgatgcatttcattgtttttgcattatctgtatcagtrtttcccattgctagcccgaataatcaagaccagactgtttcttgtcactggattctggaagccttgccctttcaactggatttatgtttgtttctgctgctgtgaaaccccaaagtaatgcagtaggttttaattgaaaattgtttaattctattattgataattatttattgtaataaaagtaaaagagtaatttttaaatcctttt

SEQ ID NO: 722 - DNA, 8040 bp, Homo sapiens
  misc_feature (1)...(8040): n = A,T,C or G
gctctcctaccttctcgggcagcccagtctttgccatccttgcccagccggtgtggtgcttgtgtgtcacagccttgtagccgggagtcgctgccgagtgggcgctcagttttcgggtcgtcatggctggctacgaatacgtgagcccggagcagctggctggctttgataagtacaagtacagtgctgtggataccaatccactttctctgtatgtcatgcatccattctggaacactatagtaaaggtatttcctacttggctggcgcccaatctgataactttttctggctttctgctggtcgtattcaattttctgctaatggcatactttgatcctgacttttatgcctcagcaccaggtcacaagcacgtgcctgactgggtttggattgtagtgggcatcctcaacttcgtagcctacacgctagatggtgtggacggaaagcaagctcgcagaaccaattctagcactcccttaggggagctttttgatcatggcctggatagttggtcatgtgtttactttgttgtgactgtttattccatctttggaagaggatcaactggtgtcagtgtttttgttctttatctcctgctatgggtagttttgttttctttcatcctgtcccactgggaaaagtataacacagggattcttttcctgccatggggatatgacattagccaggtgactatttcttttgtctacatagtgactgcagttgtgggagttgaggcctggtatgaacctttcctgtttaatttcttatatagagacctattcactgcaatgattattggttgtgcattatgtgtgactcttccaatgagtttattaaactttttcagaagctataaaaataacaccttgaaactcaattcagtctatgaagctatggttcccttattttctccatgcttgctgttcattttgtctacagcgtggatcctttggtcaccttcagatattttagagctacatcctagagtattctactttatggttggaacagcytttgccaacagtacatgtcagctgattgtttgccaaatgagtagtacccggtgtccaactttgaattggttgctggttcctctcttcttggttgtcttagtggtaaacctaggagtagcctcttacgttgagagcattctcctgtatacattaacaactgcttttactctggcccacatccattatggagtacgagtggtaaagcagctgagcagccattttcagatttaccccttctcattraggaaaccaaactcagattgactaggaatggaagaaaagaatattggcctgtaataatctttctttgggcacaaagaagtactgtaaataaatgcttgtaaatatttcctccatcaccattgaactagactgatctgcttgacagacgtgggatctcagtatggtacttggacagcaggaatgatacatataatctgaacttgggaaattttggacctactaactctaagcctattttattttttataaaactatgtgacattttggttgagcagaatgtacgttagaccagcaaaatgttcctaatggttctaacttcgtgagtttacaatgttgtgattcatgcagggttaaagatgctttgtttttattttttaagtaccaaaattggtttcagaacactgataacactcagaaaaccacagtgtgttttcatatttggaactttgtaatagcgggagtagcagtagtccaaacctagtatagggaaaggataaaaataagtcaccttcaccaagagatgccaatgattaccaaacaacagacagttgccaaatactggtttctctttcccctgaaaatggcttttgttctcaaatgataagagagctaatacatttagctaatattctagctctctttattatggaacagatcttgatagatggtttaattttctcctaaagagaaataatcagttgagaatttgagaatgggttgtaattatcgctcacccattgggatggttcattgtttaaatatggcattttccccccttcagctgcaggttcctgagatttggtgcctgtgagctctgattgtaggaatgcatgtgacagtcccagtcctatggtaatgacttaggaggaatgcagataaaagtaccttgtaagataaatataaattggagttaggaatttcatgaacctcactatgaccaaaattaattttttgattcagtttgtctgtctgtctgtccttcccctctcttcttttttcagggtgaggtgctgtgtttcttatttcatacgagataaaacagagagaagttctctcttctccagcttgtccatttccccacttgaagaaaacttttgatatatatgccttactgagtacatgccccctttaatgttaayatgacttggagtaatttctgaggtttactgacaaacataaaaatccctttaattgtagtgtagttgttctataaaccatattttttcatgatgtggatattttcttctatttctttgtcttcatttaatttggtggtggtgaactttacttgctgattttcttttatttttcactgaatgaagtttgtgcttgaatgaagagtgtatcttaaaccccctttttttggacaggctgcacttggataaaataggcaccactgtgttgatatgtarttaaattcataactatttatgaatgtgaccattgttaaatttaattatagtgtatttctttcttgaatttcagtctgctgctttgtaaaaaataactgtaattgatatttcatttttaaaatttataaattccaatcattgtcattcaagttattagaaatgagtcacggcactaactcatggttctatactcattttaagaaattgtaaaggttgaggtgtatttggtgactttctctgagacacagatgaacgttggaaatagatgagaaatggatgcagaataatgcagatagtgatcccatgtttgttaattgccatcatggaagtcagagaattaaccaattaagtgacggtaactattttttgtataccttgttctttgtgatctataaaattaaactggataaaatgttaattgggggtagggaaaaagctttgttttaagatttctaagctaattattttaccgttttgttgaccttgtacacaagaatgagattaatctgtattatataagaaaagaactgataaatatttataaaatgacaaacttggaccacaggctttcttgaccttgtacagtatagtaaaaataccctttacttctgacattaaggtcacgtcctatagtttgggggctcttttacttcaaaggtgtgtttctgccctcttttggttgtatcaaatttatttgaaaattgttttgtgctgtactttatgacttgtttccctatggtggtaaagaatgatgccatagtcagttttattgacattgttagatgaaagaaaagtagctgtcaacaaggggaaagtgaaattgagcaattcactgtttcaggatacttgaggatctttagtgtactgctgactctttttcttgttttgtctgccattcttgaaagtgcatcttgagagcccccatttgttgtgtagagatatagcagctgaagcaggacttcattccagatagctgtgtgcatttatgtcatgccaattactataacatttccaaagtatgaaaggtctttcaggcttatgcatgatattgtgggtgacttcatgccccagcctttctccccagcatacagtgagctgccttttggggagcaatgccatgataaggagcatacgtgcatgttttccgtactttcagaatagagtgccttagctaggccagaggctcgtattgtgtttctgctgaccaaagttgcatacacctgtaagaagtgtctttttaggttatggtattaaaaaagtcgtttcaggcttatcagataataattctcctatatttgaggggggcatgggataaaaagatttaataatacctggatagagaatgctaatgctgccttttgtgatcctttaatattatccatgcttttataaagtgcagtacacattttgacattgccacagtttacagtgtcattcttccacgaataggtaattgatagagtttatgggtcttagtcttaagggtaacagagtgaataccttccaaataaaaagctaaatattcctccttgtcattttaatgtcattattgaaatacttttaattctaattttcaaaagaaagctaamtgctgattgtggtttaggatgttacagtactaataccatcatgttatttattctaatatagaggcattgagaggaggggagtgtatgtctagagttaccccaattctaaataggtaccaaaagagtattgattatgacctggagcctgagctttgggagaatatacaaaggaaaaagcaggcatagtttccacttyaaagggaagaagggactttaacatcctatgaatttgaaacatcctatgaatttgaaagtttcctaagtgttgttttcaaagaactggtttattttatagtcagtcaaaatgcatttggaatgtaccttgcttccataacagactttgactctatgacctatgaagaataaaaagataatctgaaggtgtttgagtcagaggctacttttcccctttatattttatatagaagcctatttgtaattcttcctcttcgttcttcacctgggtttcctcttatctacccaccacctaggacagaggctgcccactcaggtcttgccttgttgcccctagatgttgccacattcacatctccttgatggccttagatctcttgactagtcaaggactgggaacgtgccagggggaacaaagtaagcttgatgggctggaacttttgactttgggtccccaaacagccaaaaacagatacagaaatctttggttgtgtggatgcctgtgttcagagtggccttatcttgacctcagttctggatttaagtactctatagaaaatttgtgaagtcagaccagaattttctttgtcccatgaggtgtctttgtaagtcagcatgctcttgcttgaacaccctgtgggtgaataactttagtaagttagctgccagcattagaaccttccaggaagaattttaactagtatgctacatttgaagcactctgacatgtacatttaaagtgacagttttaaaagtaaaatggtgttaaatctctgaaacttgaacgtatgatgctctggacattttaggaagcttaagtaaatttctgattttcctttattgattatgtaacccacgtgatttgcatattttagtttttatgtttgacagtggtacaaatgactgacattggcaggcagttattgtagggtatatggttaatcacgattgtctaacttttccagagaaagtggtgatatgcttcttccttgcatggagctgtgggaattggatttgttggctcttcatttccagtgtttctacagtgcagaataaatgtaactttttaagcctgcatgctagtaatatgctttgctctttagtaaacaaatatgcaatagatagtaatctatctactttttttaaagcagggatctgctccctatctagacagatcttttaatgcattaatatttagagtagcaaaagaagttttgccatttgtagctctctcacaggtagcttaagcgagggggttgtgttgcatgtgcttagaaaggccaggwtcccagaattggaaggtgccacatatacttttagaatattttaacaaaggcttgtctctaggaaaanccacttggactgcagcaggattgttctggtcttccacagaccattcacatggtctttctctccagagaatcattcttagaaagccaggctaaatcagagtagtgctgtttttaaagcaagtatattggatgatggctatagggtaccttaatgctstgttgaaattggaagcagactgctcttcagcagcacatatactgcaactgaagttagagacagtactgaagacgagggagtagctaaatgctgtggatatttcatgtctgtttggctaatgtcttctcttgaggagtttctatgggtagcaattaaaattagaatttattttaaggtttttattaaaatatatacaatttgccataaattctagattctgatattcttgacaagcactttttgaatatctcaagagtaagttcttgacctggaacatatatagttagtacttgatgtcactaaccaagttgtagaaggagcctgttataattctgcaagatctgtgaatagcattataaatctggggcaggtgcctgtaatcccagcactttgggaagccaaggcaggtggattgcttgagcccaggagttcgacaccaacctgagcaacatggcgaaaccccgtctgtaataaaaatacaaaaaaattagctgggcatggtggcatgtgcctgtaatcccagttactggggaggctgaggcaggagaatcacttgaacctgggagatggagattgcagtgagcrgagattgtgccactgcactccagccagagtgacagagcaagactccatctcaaaaaataataataaaaataaacaaatctgtttaaattactgttgcctttcagcattagactttgagtttaataactacaaattgagactgctcacaatattaactttttttgtaggttattttgttgtttagataacttgcctccctagaggagcattcaggagataaagacctagctacatgtaatgatatgatcatttcaaaaatgtgccaagaaagcaaaattcattattgaactctaaatttctgggtgtttttttttttaaagtagcattttctctgggtaaagggaaaggcaatgaatgattgccaacatgtaaactccctgctgcccgccttcccccagtcccctccatctaacataatacagtaaatttgtagccagttaataggtggaggaatcatggccaaatcaaatatgaattgtttagcttggtcctgttgcagttggctttctgtagtgttctgaaacaagaggacgattccattccttctcaggaacctagaaacaacaccgcttgagcaactggaatatgtttgctgcaagcagaatattttggggagaggaagagtagtttaattcaagtagtttaattgaacatattagtcattggtctgtctgggacgtgcagtgttcatagtagcaatgtatgtaccatttattttatctggttgtgtgtgatgtgtgtgtatgcctatttaatatgtacacatatattcactacatatgtatgtatgatatattcatatatacatgcagtctgcttgattatcagcaaaatggtcagcctttatcagatagtttcttcatgtggagttcatctgcatgtggcccttactctgaagcctcttcctgatctggagccacagtctgtctgtcttccagttcatctcagtcctcgagaaaggccctttaaatatgtcactttcccattttcctttaaccatgggttgtgtgagccagaaagagctttgagaaagatggctgcttccaccagggtggaggcttctaggtctgcatgatgatggggcccgtttctggccagagggtggctctgggagcagttgtgctgygggcttgctgggggagaactctaactgttgcagaaacagagcttcatggcttgcttaaattacttagctggaatattttaaagtgtcagataatgtgatgtacaaagagagtatgccgatgcatttcattgtttttgcattatctgtatcagtrtttcccattgctagcccgaataatcaagaccagactgtttcttgtcactggattctggaagccttgccctttcaactggatttatgtttgtttctgctgctgtgaaaccccaaagtaatgcagtaggttttaattgaaaattgtttaattctattattgataattatttattgtaataaaagtaaaagagtaatttttaaatcctttt

SEQ ID NO: 723 - DNA, 849 bp, Homo sapiens
agcaaagactatggtgctaacttattgacttctgtgaatttagggatggtgtctgcctacaacctgaaccgtgccttcacgtggcttggtgggtcaggtggtcttcccaccaatgaaacgacttttgccaagctgctgcagcaccgtggctaccgcacgggactcataggcaaatggcacctgggtttgagctgcgcctctcggaatgatcactgttaccacccrctcaaccatggttttcactacttttacggggtgccttttggacttttaagcgactgccaggcatccaagayaccagaactgcaccgctggctcaggatcaaactgtggatctccacggtagcccttgccctggttccttttctgcttctcattcccaagttcgcccgctggttctcagtgccatggaaggtcatctttgtctttgctctcctcgcctttctgtttttcacttcctggtactctarttatggatttaytcgacgttggaattgcatccttatgaggaaccatgaaattatccagcagccaatgaaagaggagaaagtagcttccctcatgctgaaggaggcacttgctttcattgaaaggtacaaaagggaaccttttctcctctttttttccttcctgcacgtacatactccactcatctccaaaaagaagttygttgggcgcagtaaatatggcaggtatggggacaatgtagaagaaatggattggatggtggcgatggtgtttcattttggaatacagtacttttcttcttcttctgagtgcaaacttctgaaaacggtgctctgccgaaccattgaaacgaacaatctcccagttatcagccgcctctgt

SEQ ID NO: 724 - DNA, 2281 bp, Homo sapiens
caggaaaccgcgaagccgcggtccctgcctctgagtctctctcgaccatggccaaattcgtcatcgcgggtagagcagattgtccatattatgctaaaacagaacttgtggcagactatttacaaaagaatcttcctgattttcggatacataaaatcacacaacgtcctgaggtttgggaggattggctaaaagatgtgtgtgaaaagaataagtggagtcacaagaattcccctatcatctggagagagctgttggatcgtggaggaaagggtttgcttttgggaggatataatgagttcctggagcatgctcagctttaytatgatgtcacctctagcatgacgactgaactgatgatggtaattgctcaagagaacctgggggcacatatagaaaaagagcaggaggaagaagccctgaaaacttgcatcaaccccttgcaggtctggatcaccagtgcctctgctcctgcctgctacaacctaattcccatattgacgagtggcgaagtgtttgggatgcatacagaaattagcataactctatttgacaacaagcaggcggaagaacatctcaaaagccttgtggtggagacccaagacctggcatctcccgtcctgcgcagtgtctccatctgcacgaaggtggaggaggccttccgccaggcccacgtcattgtggtgctggatgacagcaccaacaaggaggtgttcactctggaggactgcctccgaagcagggtgcctctctgcaggctctatgggtacctgatagagaaaaatgctcatgagtctgtcagagtcatcgtgggagggagaacctttgtaaacctgaagacagttttactcatgagatatgccccacgcattgcacacaacattattgctgtggcgctgggggtggaaggygaagcraaagccatactggccagaaaactgaagacagctccttcatacattaaagacgtgatcatttggggtaatatcagtggaaataattacgttgatctgagaaaaacaagggtgtacaratatgagagtgccatttggggacctcttcattattcacgccctgttttaaacttgatttttgacagtgagtgggtaaaaagagaatttgtggcaattcttaaaaacttgaccaccacaggaagacaatttggaggcattttggctgcacacagtatagccactacactgaaatactggtaccatggctcaccacctggggagattgtatctttaggaatattgagtgaaggccagtttggtattccgaaagggatcgtcttttctatgcctgtgaaatttgagaatggaacttgggtggttcttacagatctcaaagatgttgaaataagtgaacaaataatgacccgaatgacaagtgatctaattcaggagaaacttgttgcacttggagacaagatacattttcagccataccaatcaggacataaagatctggtccctgatgaagaaaaaaatctagctatgtcagatgcagcagagtttccaaatcagattcctcaaaccacctttgaaaagccacagagtcttgagttcctaaatgamtttgaaggcaaarccgtggaatcctaacagatcaaattggatgaaatatataattacttgatagcacaataaacatagaaagaatttatatgaatgtctatatttaaggaagaataatttgaaagatttatgtcagtcttagataataccatgcaaggcaattaaatcactgtgacagcacagaggtcagagttccgtcattttgcattacttgtatccactcatgtttgtttcataataattgcattttcttagaactattttggtgtcaaatgctattttttatattacattaaaatagagttgtcagtcattgcatctgcccatacatcttctgagagaamctgcttccttccatcagccatacctaagacctgcacctaagtggccatgtttgctcaaatgtcctcatcaccttggcctcaactaattaggccaaacagatgtacttcactcaaggagaaccaatcatattttctctctgtctctcaaaaaaaaattgaactgagaccagtgagtaagttggtgtctgggtcaggttaatggtggtgaactatgtgcctgtgagctcttcagagctggttgggttcaccaccttcataagacctgcctctgtaccatttttccttgagtgtgctttgtataaaggtctgtacaataaatcacacttttttaaagcttagattgaataggtttctgctcct

SEQ ID NO: 725 - DNA, 755 bp, Homo sapiens
atggcaycggccagagcaggattctgcccccttctgctgcttctgctgctggggctgtgggtggcagagatcccagtcagtgccaagcccaagggcatgacctcatcacagtggtttaaaattcagcacatgcagcccagccctcaagcatgcaactcagccatgaaaaacattaacaagcacacaaaacggtgcaaagacctcaacaccttcctgcacgagcctttctccagtgtggccgccacctgccagacccccaaaatagcctgcaagaatggcgataaaaactgccaccagagccacgggsccgtgtccctgaccatgtgtaagctcacctcagggaagyatccgaactgcaggtacaaagagaagcgacagaacaagtcttacgtagtggcctgtaagcctccccagaaaamggactctcagcaattccacctggttcctgtacacttggacagagtcctttaggtttccagactggcttgctctttggctgaccttcaattccctctccaggactccgcaccactcccctacacccagagcattctcttcccctcatctcttggggctgttcctggttcagcctctgctgggaggctgaagctgacactctgttgcgcaagaaagaagtcactgttacagaggcaagcggtgaactaggtaagagttcactcatgaagaaacgagtgctctgaagagccagttaccctgtgttggctgcaataaaggtcattacctctctagccaag

SEQ ID NO: 726 - DNA, 1201 bp, Homo sapiens
atggcaycggccagagcaggattctgcccccttctgctgcttctgctgctggggctgtgggtggcagagatcccagtcagtgccaagcccaagggcatgacctcatcacagtggtttaaaattcagcacatgcagcccagccctcaagcatgcaactcagccatgaaaaacattaacaagcacacaaaacggtgcaaagacctcaacaccttcctgcacgagcctttctccagtgtggccgccacctgccagacccccaaaatagcctgcaagaatggcgataaaaactgccaccagagccacgggsccgtgtccctgaccatgtgtaagctcacctcagggaagyatccgaactgcaggtacaaagagaagcgacagaacaagtcttacgtagtggcctgtaagcctccccagaaaamggactctcagcaattccacctggttcctgtacacttggacagagtcctttaggtttccagactggcttgctctttggctgaccttcaattccctctccaggactccgcaccactcccctacacccagagcattctcttcccctcatctcttggggctgttcctggttcagcctctgctgggaggctgaagctgacactctggtgagctgagctctagarggatggcttttcatctttttgttgctgttttcccagatgcttatccccaagaaacagcaagctcaggtctgtgggttccctggtctatgccattgcacatgtctcccctgccccctggcattagggcagcatgacaaggagaggaaataaatggaaagggggcatatgggatttgtggacacagctgtttctgttcctgaactagaagtcttccccagctctgacgtggcagtgaggtgacctgaaggaaagaaaaatataaataaataccacttcatatttgtatagaatcctctaatcccttgtgacatagacttgacagggattgtatgccttctttatggatgaggaaattaaggttttagaaagcttaatgaattaaagagcttgtctaattagttagtagcagaacctggacttgaacctaggtctccttgctctaaatacagtgtaccttctactctaccagttgcgcaagaaagaagtcactgttacagaggcaagcggtgaactaggtaagagttcactcatgaagaaacgagtgctctgaagagccagttacc

SEQ ID NO: 727 - DNA, 1135 bp, Homo sapiens
ctctttatagccagtggcgtctgtgtctttaaatgcttactcaacagagacactgagtgttgctgtgtgtggaaggagtccatcttgatgactctggggtacagcagtgctttactgaaggttgagtctcatgctgaattcagtgcatttgcaaatactttgaaaatatgccaaaataaaaaaaaggaatactcagcgttcagccagtggaccgaagcagcgtctgttgcacagtacttccagttttatgrctgcatttctcaacagcagaacatgatgcaagattttgtgaggacagccacttaccacagagccgtcctccrgaatcacattgactttagagacaaggtggttctagatgttggttgtggatcaggaatcctgtcattttttgctgtacaggctggagctaggacagtttatgcagttgaagccagttcagtacattctggcaccccattttatctttttcagatgctagtgaaaaacaatcacctttcagacaagatcattgttttgccaggaaaaactgaagacgtctcacttcctgaggctgtagatrtgatcatttccgaaccaatgggatacatgctgttcaatgaacggatgctagagagttatcttcattccaaaaaatggctaaaatcaaatggaatgatgttcccgacattcagcgacatccacttggcccctttttctgatgaacagctctacgtggaacacttctccagagccaatttttggtaccagcaatgtttctatggggtcaatctgtccagtctccagggtgctacagtggatgaatacttcaggcagccaatagtagacacatttgatgttaggattttgatggctggaacagtcaaatacacagyaaactttatggatgcagaagaggaagatctacacagagtagaaattccctttgtgtttcagatggcagtctgggctcatccatggcctggcgttctggtttgatgtggcatttgttggatctctggtaactgtttggctgtcaacagccccagctgagcctctgactcattggtaccaggtgcagtgcctcctgcagactmctctctttgccaagraagggaagacactgtcagggaaagtgctgtttgtagccaataaa

SEQ ID NO: 728 - DNA, 843 bp, Homo sapiens
gttcgasccgccctgcagcggtgtggagactccgaccagttggggcaggcggctcaggtcgcggccagccaggggttgggaaactagtttccatggccaaacctagcccaccgtctgttttggtgtccatggattggcggggacagctctgcttaaggatgtagtagctctgcaggttggctagtttcctgttcttcccaacctgcgctatggacttcaycagatttcagcatcagagagaatatggaaggacatcgaccctaacttcatccagtgaggatttccacacaccatacactctctgagagttctyttggctttgtgtgcacacctccagtgacagggagctcgctatgtcatgaggcagcctgctcccttgtggctatcactgaaccaactattaagccttcttatacaaacagtccctgacttactgttagacttacaactttttgattttacagtggtgcaaaagcaatatgcattccatagaaactgtatttcaaattttgaattttgatcttttccaggctagcaacatatgaagaccaaccttctatttttaaaataggctttgtgttagatgcttttgcccaactataggttaatgtaaatgttctgagaatatttgaggaaggctaggctaaactgtgatctttgggagcttagatatgttaagtgcattttcaacttacaatattttcaacttacgatgagtttattgggatgaagcccgttgtaagtaaaggagcatctgcattaagctaaaatccatgtctataacttcctcagtaatatcaagtttgttccttggagccagagaataaactgaatccttttcca

SEQ ID NO: 729 - DNA, 1296 bp, Homo sapiens
atgcgacaaagtgactcggaaacacgtggattgctgcattggccatctctagacacagtcacgaacagaagctctgagggacagggccctgtagaaaccaaccrgctgtcctccatgccaccaactctaaaaaggggcctgctctgtgacttccgccacgctcccacgggtggcggcgaggagcctgagccggcgatggtgctacaggaggcgctggagcyggccatgtgcctggatcrctacccgcatgtgcagcttgaggcctcggagctgctgctggaagatggcggctcagccctggccactgagctcaacaccgccaagcttgccctggcctatgcaggcatggagatgaatgacttggtggtgagctgcggcctgggcctcrcgccagggtccgtgcccacctggctgctggaccccatgcggctcgaggaggagcacaccgcccccrgtgtcaccttggcactcctgcccatgctgaatcaggatcttcgaggcagaagaatagccttgcaggaggagcagaaagcggaagatccttcagccctgtgtggaaacaaacagaccctcacgacccacctaggtcttatccttggtgctgtcttgagattcccttcccagcagaattacctagaagcctcagaggacccagtacgctgtgggggaagaaaaggaataaaagctcccacccactcccagattcagccccacagacttgcatttcccaagtccccaccttctgtatcccataaagatcgtttgcctttagccatggtactcaggagtgtgagtgtgaagcagtctgcaccaccctactctggccccgtggacttaatcgtggcatctgaggctgccagctgcagtcctgctccaaaaggacaggacgctcaggatctaggaaatgagcgttttccaaacaccaggttgaatcccttggaactgaaactagactcagtcaagctcaagttcatcacatccctttgggcagccagctacccccaaccctactacactcacacccaccagatgaacttctgtgactctcactgcggaaaactccagaggacttttgtctgtcctctgcccagatctgacacgggtaggagcacgatgcagctctcccyaggtgatcagctgtccccagaagacaatatggcaccagacggtctttctcgaatgcttggagaggcaaagcgatggccaagggtttccactgaagctgccatcaggacaggagtgaatgcagggtccttctttgtgattttgaccttcaccgaccttgattattcaatg

SEQ ID NO: 730 - DNA, 511 bp, Homo sapiens
cggccaggcctgctctgtgacttccgccacgctcccacgggtggcggcgaggagcctgagccggcgatggtgctacaggaggcgctggagcyggccatgtgcctggatcrctacccgcatgtgcagcttgaggcctcggagctgctgctggaagatggcggctcagccctggccactgagctcaacaccgccaagcttgccctggcctatgcaggcatggagatgaatgacttggtggtgagctgcggcctgggcctcrcgccagggtccgtgcccacctggctgctggaccccatgcggctcgaggaggagcacaccgcccccrgtgtcaccttggcactcctgcccatgctgaatcaggtggcccggctgctggctgcagggagggcggcctgaccatgagctgggtggaggctgtaggcctgggcctcgagggctgcgagccctcgaccccatgctgcagcagtgcctggtgtgggctgcctgccacaggggcaccactgccccaccc

SEQ ID NO: 731 - DNA, 2321 bp, Homo sapiens
cyggcgtgggtggggcgcttgcaggtccctccccgcgcaagtgctcgccccgcccccggggccgcacccacagccccggctaccccggagaagcctgacttgagaaccctttctgcagagtcccggcagtgcgggactccggtagccgcccctccggtagccgcccctcctgcccccgcgccgccgccctatatgttgcccgccgcggcctctggggcatggagcacgctgcccagccctggcgatggcaacggcgacgggggtggcggaggagcgcctgctggccgcgctcgcctacctgcagtgcgccgtgggctgcgcggtcttcgcgcgsaatcgtcagacgaactcagtgtacggccgccacgcgctgcccagccacaggctccgagtgccggcgcgggccgcctgggtggtgcaggagctgccctcgctggccctgccgctctaccagtacgccagcgagtccgccccgcgtctccgcagcgcgcccaactgcatcctcctggccatgttcctcgtccactacgggcatcggtgcttaatttacccrtttctgatgcgaggaggaaagcctatgccactgttggcrtgtacaatggcgattatgttctgtacctgtaacggctatttgcaaagcagatacttgagccattgtgcagtgtatgctgatgactgggtaacagatccccgttttctaataggttttggcttgtggttaacrggcatgttgataaacatccattcagatcatatcctaaggaatctcagaaaaccaggagatactggatacaaaataccaaggggaggcttatttgaataygtaactgcagccaactattttggagaaatcatggagtggtgtggctatgccctggccagctggtctgtccaaggcgcggcttttgctttcttcacgttttgttttttatctggtagagcaaaagagcatcatgagtggtacctccggaaatttgaagagtatccaaagttcagaaaaattataattccatttttgttttaagtgcgtttttcatgaaattatcttcaacttgaagctttccaatggcgcttctctatggactttgtaaataagttatatctttgtaattttcctgctactttatcattttcaagatgtcctctaggaattttttttctagtaattttgcaatctacctaataagtacctaaatacgctgaaatggaggttgaatatcctactgtgtaacaggtcagaatttcaagctctgggtaataactgctgatattttttctaatttcaaatttacctcttttggctatgtcttgccaagtgtgtatgagactagactttacaactgtctttgatggcattttcagaacaataaatgtcacaatcccttctatagccccctacagtgatctcttcaaggtcaactgcagtgttgcttccctccccctatagggctggaatctgtctaggagccctctctcggaggccayagaggcygggggtagccattgtgcagtcatggcccgggggaaacttgccaaccttcgtgtcaggtgctgtgtrtaagtggagaacttggggatagaggaggaagctcctcgtggcccttccaaggtgaggcaaaggcatctggacttgttccagcccrgcccaccgggtgacatcaccgggcagggaggggtgctggtggtggttcatacggagtaagctgctctgcctgtgtgagtggctcctgggccctaaacaggcacctttaggccatgggtcactcaccgtgagccatcaatgtgctctggtctgacatggtttctctctgtcttctagtctagacctagtttttttgttctgttccccacgtatggatatagtagagattgttgtctgtgaaatttctcttttgtagattttgagttttcccttgtagtgtaaagaatgatcactttctgtaacaataacaagaccactttttaagatttatcctgtttgttctttgttgatygaaacataataattgttaaaattctctacagccttctttttcttccatagctaatcttccttctaatagtttttgctttctgttttgctgttgttgctttgcaaagctttcccctcatagcctgtacctgttatcaatataaaataatcttcctgttgaatgcttcatgacttgaattctactttgataaaaacattgycatactgctttttatcttgatgaattcatctggcattgctttgccttatcatctcatctggagtttttaaatgccatttgtttcagttgtctttaacaacataataaatagactttgccatttaacaa

SEQ ID NO: 732 - DNA, 2091 bp, Homo sapiens
ggagaagcctgacttgagaaccctttctgcagagtcccggcagtgcgggactccggtagccgcccctccggtagccgcccctcctgcccccgcgccgccgccctatatgttgcccgccgcggcctctggggcatggagcacgctgcccagccctggcgatggcaacggcgacgggggtggcggaggagcgcctgctggccgcgctcgcctacctgcagtgcgccgtgggctgcgcgtccgccccgcgtctccgcagcgcgcccaactgcatcctcctggccatgttcctcgtccactacgggcatcggtgcttaatttacccrtttctgatgcgaggaggaaagcctatgccactgttggcrtgtacaatggcgattatgttctgtacctgtaacggctatttgcaaagcagatacttgagccattgtgcagtgtatgctgatgactgggtaacagatccccgttttctaataggttttggcttgtggttaacrggcatgttgataaacatccattcagatcatatcctaaggaatctcagaaaaccaggagatactggatacaaaataccaaggggaggcttatttgaataygtaactgcagccaactattttggagaaatcatggagtggtgtggctatgccctggccagctggtctgtccaaggcgcggcttttgctttcttcacgttttgttttttatctggtagagcaaaagagcatcatgagtggtacctccggaaatttgaagagtatccaaagttcagaaaaattataattccatttttgttttaagtgcgtttttcatgaaattatcttcaacttgaagctttccaatggcgcttctctatggactttgtaaataagttatatctttgtaattttcctgctactttatcattttcaagatgtcctctaggaattttttttctagtaattttgcaatctacctaataagtacctaaatacgctgaaatggaggttgaatatcctactgtgtaacaggtcagaatttcaagctctgggtaataactgctgatattttttctaatttcaaatttacctcttttggctatgtcttgccaagtgtgtatgagactagactttacaactgtctttgatggcattttcagaacaataaatgtcacaatcccttctatagccccctacagtgatctcttcaaggtcaactgcagtgttgcttccctccccctatagggctggaatctgtctaggagccctctctcggaggccayagaggcygggggtagccattgtgcagtcatggcccgggggaaacttgccaaccttcgtgtcaggtgctgtgtrtaagtggagaacttggggatagaggaggaagctcctcgtggcccttccaaggtgaggcaaaggcatctggacttgttccagcccrgcccaccgggtgacatcaccgggcagggaggggtgctggtggtggttcatacggagtaagctgctctgcctgtgtgagtggctcctgggccctaaacaggcacctttaggccatgggtcactcaccgtgagccatcaatgtgctctggtctgacatggtttctctctgtcttctagtctagacctagtttttttgttctgttccccacgtatggatatagtagagattgttgtctgtgaaatttctcttttgtagattttgagttttcccttgtagtgtaaagaatgatcactttctgtaacaataacaagaccactttttaagatttatcctgtttgttctttgttgatygaaacataataattgttaaaattctctacagccttctttttcttccatagctaatcttccttctaatagtttttgctttctgttttgctgttgttgctttgcaaagctttcccctcatagcctgtacctgttatcaatataaaataatcttcctgttgaatgcttcatgacttgaattctactttgataaaaacattgycatactgctttttatcttgatgaattcatctggcattgctttgccttatcatctcatctggagtttttaaatgccatttgtttcagttgtctttaacaacataataaatagactttgccatttaacaa

SEQ ID NO: 733 - DNA, 672 bp, Homo sapiens
atggcttcaaaaaaggagccaaagaaagagctgggtcttcacagaggaaktcttcacttttatcctggttcagaccagccagatggtcggcattgccatagacatgaatatatattagcaccaggtgctcctgccacgtcttcctctgtggctcaggagacaccgagcagcctgtttcgaattcatacagtctacatgattgacacaggcaatgtcgaagaacatgtttcccacaaaactgtcacaaacccagacaagcttccaaagacagcagaaaactttcatgctctgagcactggagagaaaggatttggttataagggttcctgttttcacagaattattccagggtttatgtgtcagggtggtggtttcacatgccataatggcactggtggcaagtccatctacggggagaaacttgatgatgagaacttcatcctaaagcatacatgtcctggcaccttgtccatggcaaatgctggacccaacacaaacggttcccggtttttcatctgcactgccaagacagtggttggacaaaagcatgtggtctccagcaaggtgaaagaaggcatgaatattgtgggggccatggagcactttgggtccaggaatggcaagaccagcaagatgatcaccactgctgactgtggacaactcgaatacatt

SEQ ID NO: 734 - DNA, 4647 bp, Homo sapiens
actggcgaggagatgaaggggtcgtcttcatcttcgccggatgatttccgcccacatagagggcgccagtgacgcccacacacgtgctggtgtcccgggaagagttcctggcaaagagctcaggaacgttggatcttaatcaaggctttctccgtcggggtggatgggttggactttaggctccagcaagccccgccccactcggcgggtcggtgccgccgggtcccaggtgcccgctacttcccagaacctccgcctcccgctccgggccctcgaaccagcgcggacaccacaatggaccgggcgtccgagctgctcttctacgtgaacggccgcaaggtgatagaaaaaaatgtcgatcctgaaacaatgctgttgccttatttgaggaagaagcttcgactcacaggaactaagtatggctgtggaggaggaggctgtggtgcttgtacagtgatgatatcacgatacaaccccatcaccaagaggataaggcatcacccagccaatgcctgtctgattcccatctgttctctgtatggtgctgccgtcaccacagtagaaggcataggaagcacccacaccagaattcatcctgttcaggagaggattgccaagtgtcatggcacccagtgtggcttctgcacacctgggatggtgatgtccatctacacgctgctcaggaaccacccagagcccactctggatcagttaactgatgcccttggtggtaacctgtgccgttgcactggatacaggcccataattgatgcatgcaagactttctgtaaaacttcgggctgctgtcaaagtaaagaaaatggggtttgctgtttggatcaaggaatcaatggattgccagaatttgaggaaggaagtaagacaagtccaaaactcttcgcagaagaggagtttctgccattggatccaacccaggaactgatatttcctcctgagctaatgataatggctgagaaacagtcrcaaaggaccagggtgtttggcagtgagagaatgatgtggttttcccccgtgaccctgaaggaactgctggaatttaaattcaagtatccccaggctcctgttatcatgggaaacacctctgtggggcctgaagtgaaatttaaaggcgtctttcacccagttataatttctcctgatagaattgaagaactgagtgttgtaaaccatgcatataatggactcacccttggtgctggtctcagcctagcccaggtgaaggacattttggctgatgtagtccagaagcttccagaggagaagacacagatgtaccatgctctcctgaagcatttgggaactctggctgggtcccagatcaggaacatggctgtatggggacacatcattagcaggcatccagattcagatctgaatcccatcctggctgtgggtaactgtaccctcaacttgctatcaaaagaaggaaaacgacagattcctttaaatgagcaattcctcagcaagtgccctaatgcagatcttaagcctcaagaaatcttggtctcagtgaacatcccctactcaaggaagtgggaatttgtgtcagccttccgacaagcccagcgacaggagaatgcgctagcgatagtcaattcaggaatgagagtcttttttggagaaggggatggcattattagagagttatgcatctcatatggaggcgttggtccagccaccatctgtgccaagaattcctgccagaaactcattggaaggcactggaacgaacagatgctggatatagcctgcaggcttattctgaatgaagtctcccttttgggctcggcgccaggtgggaaagtggagttcaagaggactctcatcatcagcttcctcttcaagttctacctggaagtgtcacagattttgaaaaagatggatccagttcactatcctagccttgcagacaagtatgaaagtgctttagaagatcttcattccaaacatcactgcagtacattaaagtaccagaatataggcccaaagcagcatcctgaagacccaattggccaccccatcatgcatctgtctggtgtgaagcatgccacgggggaggccatctactgtgatgacatgcctctggtggaccaggaacttttcttgacttttgtgactagttcaagagctcatgctaagattgtgtctattgatctgtcagaagctctcagcatgcccggtgtggtggacatcatgacagcagaacatcttagtgacgtcaactccttctgcttttttactgaagctgagaaatttctggcgacagataaggtgttctgtgtgggtcagcttgtctgtgctgtgcttgccgattctgaggttcaggcaaagcgagctgctaagcgagtgaagattgtctatcaagacttggagccgctgatactaacaattgaggaaagtatacaacacaactcctccttcaagccagaaaggaaactggaatatggaaatgttgacgaagcatttaaagtggttgatcarattcttgaaggtgaaatacatatgggaggtcaagaacatttttatatggaaacccaaagcatgcttgtcgttcccaagggagaggatcaagaaatggatgtctacgtgtccacacagtttcccaaatatatacaggacattgttgcctcaaccttgaagctcccagctaacaaggtcatgtgccatgtaaggcgtgttggtggagcgtttggagggaaggtgttaaaaaccggaatcattgcagccgtcactgcatttgccgcaaacaaacatggccgtgcagttcgctgtgttctggaacgaggagaagacatgttaataactggaggccgccatccttaccttggaaagtacaaagctggattcatgaacgatggcagaatcttggccctggacatggagcattacagcaatgcaggcgcctccttggatgaatcattattcgtgatagaaatgggacttctgaaaatggacaatgcttacaagtttcccaatctccgctgccggggttgggcatgcagaaccaaccttccatccaacacagcttttcgtgggtttggctttcctcaggcagcgctgatcaccgaatcttgtatcacggaagttgcagccaaatgtggactatcccctgagaaggtgcgaatcataaacatgtacaaggaaattgatcaaacaccctacaaacaagagatcaatgccaagaacctaatccagtgttggagagaatgtatggccatgtcttcctactccttgaggaaagttgctgtggaaaagttcaatgcagagaattattggaagaagaaaggactggccatggtccccctgaagtttcctgttggccttggctcacgtgctgctggtcaggctgctgccttggttcacatttatcttgatggctctgtgctggtcactcacggtggaattgaaatggggcagggggtccacactaaaatgattcaggtggtcagccgtgaattaagaatgccaatgtcgaatgtccacctgcgtggaacaagcacagaaactgtccctaatgcaaatatctctggaggttctgtggtggcagatctcaacggtttggcagtaaaggatgcctgtcaaactcttctaaaacgcctcgaacccatcatcagcaagaatcctaaaggaacttggaaagactgggcacagactgcttttgatgaaagcattarcctttcagctgttggatacttcagaggttatgagtcagacatgaactgggagaaaggcgaaggccagcccttcgaatactttgtttatggagctgcctgttccgaggttgaaatagactgcctgacgggggatcataagaacatcagaacagacattgtcatggatgttggctgcagtataaatccagccattgacataggccagattgaaggtgcatttattcaaggcatgggactttatacaatagaggaactgaattattctccccagggcattctgcacactcgtggtccagaccaatataaaatccctgccatctgtgacatgcccacggagttgcacattgctttgttgcctccttctcaaaactcaaatactctttattcatctaagggtctgggagagtcgggggtgttcctggggtgttccgtgtttttcgctatccatgacgcagtgagtgcagcacgacaggagagaggcctgcrtggacccttgacccttaatagtccactgaccccggagaagattaggatggcctgtgaagacaagttcacaaaaatgattccgagagatgaacctggatcctacgttccttggaatgtacccatctgaatcaaatgcaaacttctggaatgctagatctgaaagacagagtttccacagttcagaaatcatcccacagtgttgcttttctmtggagctgatttaaagtattccatttagatttgatagatatgcttaagcaatctataaatcattttcaatgttataaacactaattggtttcctctagggtgatatycgtcattactctgtctcttcaatccatccagctaaatggaataggtgatgacttgsatgtgactcctacttggcttctatccaccaacagaaattataccatatagtgaaaggcaattttctaaataatttcatkactaatatgaactg

SEQ ID NO: 735 - DNA, 5128 bp, Homo sapiens
actggcgaggagatgaaggggtcgtcttcatcttcgccggatgatttccgcccacatagagggcgccagtgacgcccacacacgtgctggtgtcccgggaagagttcctggcaaagagctcaggaacgttggatcttaatcaaggctttctccgtcggggtggatgggttggactttaggctccagcaagccccgccccactcggcgggtcggtgccgccgggtcccaggtgcccgctacttcccagaacctccgcctcccgctccgggccctcgaaccagcgcggacaccacaatggaccgggcgtccgagctgctcttctacgtgaacggccgcaaggtgatagaaaaaaatgtcgatcctgaaacaatgctgttgccttatttgaggaagaagcttcgactcacaggaactaagtatggctgtggaggaggaggctgtggtgcttgtacagtgatgatatcacgatacaaccccatcaccaagaggataaggcatcacccagccaatgcctgtctgattcccatctgttctctgtatggtgctgccgtcaccacagtagaaggcataggaagcacccacaccagaattcatcctgttcaggagaggattgccaagtgtcatggcacccagtgtggcttctgcacacctgggatggtgatgtccatctacacgctgctcaggaaccacccagagcccactctggatcagttaactgatgcccttggtggtaacctgtgccgttgcactggatacaggcccataattgatgcatgcaagactttctgtaaaacttcgggctgctgtcaaagtaaagaaaatggggtttgctgtttggatcaaggaatcaatggattgccagaatttgaggaaggaagtaagacaagtccaaaactcttcgcagaagaggagtttctgccattggatccaacccaggaactgatatttcctcctgagctaatgataatggctgagaaacagtcrcaaaggaccagggtgtttggcagtgagagaatgatgtggttttcccccgtgaccctgaaggaactgctggaatttaaattcaagtatccccaggctcctgttatcatgggaaacacctctgtggggcctgaagtgaaatttaaaggcgtctttcacccagttataatttctcctgatagaattgaagaactgagtgttgtaaaccatgcatataatggactcacccttggtgctggtctcagcctagcccaggtgaaggacattttggctgatgtagtccagaagcttccagaggagaagacacagatgtaccatgctctcctgaagcatttgggaactctggctgggtcccagatcaggaacatggcttctttagggggacacatcattagcaggcatccagattcagatctgaatcccatcctggctgtgggtaactgtaccctcaacttgctatcaaaagaaggaaaacgacagattcctttaaatgagcaattcctcagcaagtgccctaatgcagatcttaagcctcaagaaatcttggtctcagtgaacatcccctactcaaggaagtgggaatttgtgtcagccttccgacaagcccagcgacaggagaatgcgctagcgatagtcaattcaggaatgagagtcttttttggagaaggggatggcattattagagagttatgcatctcatatggaggcgttggtccagccaccatctgtgccaagaattcctgccagaaactcattggaaggcactggaacgaacagatgctggatatagcctgcaggcttattctgaatgaagtctcccttttgggctcggcgccaggtgggaaagtggagttcaagaggactctcatcatcagcttcctcttcaagttctacctggaagtgtcacagattttgaaaaagatggatccagttcactatcctagccttgcagacaagtatgaaagtgctttagaagatcttcattccaaacatcactgcagtacattaaagtaccagaatataggcccaaagcagcatcctgaagacccaattggccaccccatcatgcatctgtctggtgtgaagcatgccacgggggaggccatctactgtgatgacatgcctctggtggaccaggaacttttcttgacttttgtgactagttcaagagctcatgctaagattgtgtctattgatctgtcagaagctctcagcatgcccggtgtggtggacatcatgacagcagaacatcttagtgacgtcaactccttctgcttttttactgaagctgagaaatttctggcgacagataaggtgttctgtgtgggtcagcttgtctgtgctgtgcttgccgattctgaggttcaggcaaagcgagctgctaagcgagtgaagattgtctatcaagacttggagccgctgatactaacaattgaggaaagtatacaacacaactcctccttcaagccagaaaggaaactggaatatggaaatgttgacgaagcatttaaagtggttgatcarattcttgaaggtgaaatacatatgggaggtcaagaacatttttatatggaaacccaaagcatgcttgtcgttcccaagggagaggatcaagaaatggatgtctacgtgtccacacagtttcccaaatatatacaggacattgttgcctcaaccttgaagctcccagctaacaaggtcatgtgccatgtaaggcgtgttggtggagcgtttggagggaaggtgttaaaaaccggaatcattgcagccgtcactgcatttgccgcaaacaaacatggccgtgcagttcgctgtgttctggaacgaggagaagacatgttaataactggaggccgccatccttaccttggaaagtacaaagctggattcatgaacgatggcagaatcttggccctggacatggagcattacagcaatgcaggcgcctccttggatgaatcattattcgtgatagaaatgggacttctgaaaatggacaatgcttacaagtttcccaatctccgctgccggggttgggcatgcagaaccaaccttccatccaacacagcttttcgtgggtttggctttcctcaggcagcgctgatcaccgaatcttgtatcacggaagttgcagccaaatgtggactatcccctgagaaggtgcgaatcataaacatgtacaaggaaattgatcaaacaccctacaaacaagagatcaatgccaagaacctaatccagtgttggagagaatgtatggccatgtcttcctactccttgaggaaagttgctgtggaaaagttcaatgcagagaattattggaagaagaaaggactggccatggtccccctgaagtttcctgttggccttggctcacgtgctgctggtcaggctgctgccttggttcacatttatcttgatggctctgtgctggtcactcacggtggaattgaaatggggcagggggtccacactaaaatgattcaggtggtcagccgtgaattaagaatgccaatgtcgaatgtccacctgcgtggaacaagcacagaaactgtccctaatgcaaatatctctggaggttctgtggtggcagatctcaacggtttggcagtaaaggatgcctgtcaaactcttctaaaacgcctcgaacccatcatcagcaagaatcctaaaggaacttggaaagactgggcacagactgcttttgatgaaagcattarcctttcagctgttggatacttcagaggttatgagtcagacatgaactgggagaaaggcgaaggccagcccttcgaatactttgtttatggagctgcctgttccgaggttgaaatagactgcctgacgggggatcataagaacatcagaacagacattgtcatggatgttggctgcagtataaatccagccattgacataggccagattgaaggtgcatttattcaaggcatgggactttatacaatagaggaactgaattattctccccagggcattctgcacactcgtggtccagaccaatataaaatccctgccatctgtgacatgcccacggagttgcacattgctttgttgcctccttctcaaaactcaaatactctttattcatctaagggtctgggagagtcgggggtgttcctggggtgttccgtgtttttcgctatccatgacgcagtgagtgcagcacgacaggagagaggcctgcrtggacccttgacccttaatagtccactgaccccggagaagattaggatggcctgtgaagacaagttcacaaaaatgattccgagagatgaacctggatcctacgttccttggaatgtacccatctgaatcaaatgcaaacttctggagaaaacagagtgcctcttcccagatggcaatctgtcctatctctgtgctggaagatgctagatctgaaagacagagtttccacagttcagaaatcatcccacagtgttgcttttctmtggagctgatttaaagtattccatttagatttgatagatatgcttaagcaatctataaatcattttcaatgttataaacactaattggtttcctctagggtgatatycgtcattactctgtctcttcaatccatccagctaaatggaataggtgatgacttgsatgtgactcctacttggcttctatccaccaacagaaattataccatatagtgaaaggcaattttctaaataatttcatkactaatatgaactgtgaagttgtcattttttcatttgtccttttctgctatcaccttcctcttgtcagaatgaatatagacactgtatctaagtgggaccaaagaaaaaatagcgaactttcaccaaagttttcatgaaaacccaaaarctttaaaagttactatcaagaaattgaaaggaaacccacagaataggataaaatatttgtaaatcatatttgataaaagtcttgtaaccagatacataaagagctcttacaactcaataaaaggcaagtaatttaaaaataggcaaaagaattgctggatggtatggtagttctatttttagtttttaccctaactactctgacttgatcatttaacattctgtgtatgtaacaaaatatcacatgcataaatattatgtatcaataaaattttttaatgggcaaagga

SEQ ID NO: 736 - DNA, 1361 bp, Homo sapiens
agccgagtgtaaagcattgcttgaggttgcccaggtagtttcgccttacacttcttgtcccagtgcaattattagtagagctccctttcactgtcaaatttccggttggggataaattgcattgtcgttttggtttgagataggaagatgaggggaggaaggaggtgaggcggtaaggggcgttctctctcttgggtcccgcgcccaacttccgctggcccaaagaaactataattttgaaccaacagacctctgctggcatctgcgattgcatttttcctgttttaacaacggctgtgctagacgaagtggtgaagcccaaagacttatttttgagctcgctgtaagactgagaaatcacgtagtccttcctgaaaccactaagaggaaaaatgtctgtgacactgcatacagatgtaggtgatattaaaattgaagtcttctgtgagaggacacccaaaacatgtgagaatttcttggctctttgtgccagtaattactacaatggctgtatatttcataggaatatcaagggtttcatggttcaaacaggagatccaacaggaactggaagaggaggcaacagtatttggggcaagaagtttgaggatgaatacagtgaatatcttaagcacaatgttagaggtgttgtatctatggctaataatggcccgaacaccaatggatctcagttcttcatcacctatggcaaacagccacatttggacatgaaatacaccrtrtttggaaaggtaatagatggtctggaaactctagatgagttggagaagttgccagtaaatgagaagacataccgacctcttaatgakgtacacattaaggacataactattcatgccaacccatttgctcagtagctatgrtagacctggacaaataacttgacaaattgctggaacacacttattgtggtttacccggttttaattatgtcagagattgcatcatccttctgcttgtttacaactatgatcttctatgaaatggtggtaccaaggggcgcccaacagcttttatccccattcttagagcatattctttattataatgattatccaacatatttctttaattttaatacaaaaaatacatcatttaatttttgttacatatgaacattcatttttaaatgctcagcctcaagtgcaggcatttttgagtggcctgattacatattcctcccacagcaagtccgtatcctggaagtgttattttataataaaatttaaaaagttttaaagaattaaatcgtaggacaaattaattaaaatattgtgtaaaattaccttcaggctatgtgtataaggtatatatgaaacgtaaatgaacttcatgtttaa

SEQ ID NO: 737 - DNA, 1653 bp, Homo sapiens
gccgagtgtaaagcattgcttgaggttgcccaggtagtttcgccttacacttcttgtcccagtgcaattattagtagagctccctttcactgtcaaatttccggttggggataaattgcattgtcgttttggtttgagataggaagatgaggggaggaaggaggtgaggcggtaaggggcgttctctctcttgggtcccgcgcccaacttccgctggcccaaagaaactataattttgaaccaacagacctctgctggcatctgcgattgcatttttcctgttttaacaacggctgtgctagacgaagtggtgaagcccaagtatggagtaacgtcattaattctttcattcacttattcgaatgcttgctgagttctgtgttgctactggtttagttcttgggatactgcgagtgaacagtgggcggcgaggctgttgttgcaacgtcagagtaaaagaaggaccctgcacgcctcggcctcccaaagtgttaggattataggcgtgagccaccacgcccggcgaggtttttatttaaaatgttcagtaaagatgagcgtgtgtgagttaagacaggaaaatgagcctaattctttttttcttttgggactagagacttatttttgagctcgctgtaagactgagaaatcacgtagtccttcctgaaaccactaagaggaaaaatgtctgtgacactgcatacagatgtaggtgatattaaaattgaagtcttctgtgagaggacacccaaaacatgtgagaatttcttggctctttgtgccagtaattactacaatggctgtatatttcataggaatatcaagggtttcatggttcaaacaggagatccaacaggaactggaagaggaggcaacagtatttggggcaagaagtttgaggatgaatacagtgaatatcttaagcacaatgttagaggtgttgtatctatggctaataatggcccgaacaccaatggatctcagttcttcatcacctatggcaaacagccacatttggacatgaaatacaccrtrtttggaaaggtaatagatggtctggaaactctagatgagttggagaagttgccagtaaatgagaagacataccgacctcttaatgakgtacacattaaggacataactattcatgccaacccatttgctcagtagctatgrtagacctggacaaataacttgacaaattgctggaacacacttattgtggtttacccggttttaattatgtcagagattgcatcatccttctgcttgtttacaactatgatcttctatgaaatggtggtaccaaggggcgcccaacagcttttatccccattcttagagcatattctttattataatgattatccaacatatttctttaattttaatacaaaaaatacatcatttaatttttgttacatatgaacattcatttttaaatgctcagcctcaagtgcaggcatttttgagtggcctgattacatattcctcccacagcaagtccgtatcctggaagtgttattttataataaaatttaaaaagttttaaagaattaaatcgtaggacaaattaattaaaatattgtgtaaaattaccttcaggctatgtgtataaggtatatatgaaacgtaaatgaacttcatgtttaa

SEQ ID NO: 738 - DNA, 1373 bp, Homo sapiens
agccgagtgtaaagcattgcttgaggttgcccaggtagtttcgccttacacttcttgtcccagtgcaattattagtagagctccctttcactgtcaaatttccggttggggataaattgcattgtcgttttggtttgagataggaagatgaggggaggaaggaggtgaggcggtaaggggcgttctctctcttgggtcccgcgcccaacttccgctggcccaaagaaactataattttgaaccaacagacctctgctggcatctgcgattgcatttttcctgttttaacaacggctgtgctagacgaagtggtgaagcccaaagacttatttttgagctcgctgtaagactgagaaatcacgtagtccttcctgaaaccactaagaggaaaaatgtctgtgacactgcatacagatgtaggtgatattaaaattgaagtcttctgtgagaggacacccaaaacatgtgagatggagtctcgctgtgtcccccaggctggagtacaatggcgcgatctcggctcactgcaacctccgcctcctgggttcaagcaagtcttctgcctcagcctcccgagaactggaagaggaggcaacagtatttggggcaagaagtttgaggatgaatacagtgaatatcttaagcacaatgttagaggtgttgtatctatggctaataatggcccgaacaccaatggatctcagttcttcatcacctatggcaaacagccacatttggacatgaaatacaccrtrtttggaaaggtaatagatggtctggaaactctagatgagttggagaagttgccagtaaatgagaagacataccgacctcttaatgakgtacacattaaggacataactattcatgccaacccatttgctcagtagctatgrtagacctggacaaataacttgacaaattgctggaacacacttattgtggtttacccggttttaattatgtcagagattgcatcatccttctgcttgtttacaactatgatcttctatgaaatggtggtaccaaggggcgcccaacagcttttatccccattcttagagcatattctttattataatgattatccaacatatttctttaattttaatacaaaaaatacatcatttaatttttgttacatatgaacattcatttttaaatgctcagcctcaagtgcaggcatttttgagtggcctgattacatattcctcccacagcaagtccgtatcctggaagtgttattttataataaaatttaaaaagttttaaagaattaaatcgtaggacaaattaattaaaatattgtgtaaaattaccttcaggctatgtgtataaggtatatatgaaacgtaaatgaacttcatgtttaa

SEQ ID NO: 739 - DNA, 327 bp, Homo sapiens
atgagtgttgggttagcaattgcaggttttcattcgacatacatytgtacgttgctaccctgtgccaaacaacaagggacacaaaggcaagtacaactgacagaggaggaagacaacatgtggacaaacatgagcaggaagctaaaaacattcatgcctccattttgtctacaaggtaaaaacaagttcacggatatgtcctatgaggagaaatggggaaagctcaccttygtggattttcccatctatgacgtcctggatcaaaagtgcatgtttgagcccaagtgcctggatgagttcccacatcttaaggctttcatgtgccgt

SEQ ID NO: 740 - DNA, 751 bp, Homo sapiens
atatcgtgcaactcatctatggttctgggttagtggaatatttgcgggctggcacacaccatttgcctgctcctgtagttcacggatatgtcctatgaggagaaatggtacacatgccaggaaactcctatgattgaagccaatggctggatgtgatattcaagctagacctggactttcctaatctgcccaacttcatggacgggaagaacaaggtcacccagagcaatgccatcttgtgctacactgctggcaagcacatgtgtggtaagactgaaaagattcaagtggacattttagagaaccaagcaaccagtttctgcacacaactgatacagtgctgttacaactctgaccatgaaaaactgaaacctcagtacttggaacagctacctgaacaactgaaacaattctccatgttcctgggagaaattctcatggtttgcaggggaaagctcaccttygtggattttcccatctatgacgtcctggatcaaaagtgcatgtttgagcccaagtgcctggatgagttcccacatcttaaggctttcatgtgccgttgaggctttggagaaaattgctgcctacatgcagtctgactgcttcttgaagatgcctatcaacaacaagatggcccagtggggcaacaagcttttatgctgagctagaggcagacttgcactgctagttttgtttcatccgtcmctagggggcctccacwcttttttgttcttttaaataaacagcactt

SEQ ID NO: 741 - DNA, 2992 bp, Homo sapiens
tcatcagtagggaagtagctatggcagtgcctgatacaaaataaactccaaatgtgtatttattagatggttggatggaagttatttgcgtgtgaaagcgcgttttacccgaaggcgctctgtgagggccagcgggtccccttcgsccctggagccggggtcacacgctccccaccgcgtgcggtcacgagacgcccccaagggagtrtcctggtacccggaagccgcgactcctggccctgagcccgggcttagccttcgggtccacgtggccggagsccggcagctgattggacgcgggccgccccaccccctggccgtcgcgggacccgcaggactgagaccatggaggcggtggcggtggccgcggcggtgggggtccttctcctggccggggccgggggcgcggcaggcgacgaggcccgggaggcggcggccgtgcgggcgytcgtggcccggctgctggggccaggccccgcggccgactkmtccgtgtcggtggagcgcgctctggctgccaagccgggcttggacacctacagcctgggcrgcggcggcgcggcgcgcgtgcgggtgcgckgctccacggrcgtggcggccgccgcggggctgcaccgcyacctgcgcgacttctgtggctgccrcgtggcctggtccggctctcagctgcgcctgccgcggccactgycagccgtgccgggggagctgaccgaggccacgcccaacaggtaccgctattaccagaatgtgtgcacgcaaagctrcwcyttcgtgtggtgggactgggcccgctgggagcgaragakagactgkatggcgctgaatggcatcaacctggcactggcctggagcggccaggaggccatctggcagcgggtgtacctggccttgggcctgacccaggcagagatcaatgagttctttactggtcctgccttcctggcctgggggygaatgggcaacctgcacacctgggatggccccctgcccccctcctggcacatcaagcagctttacctgcagcmccgggtcctggaccagatgcgctccttcggcatgaccccagtgctgcytgcattcgcggggcrtgttcccgaggctgtcaccagggtgttccctcaggtcaatgtcacgaagatgggcagttggggccactttaactgttcctactcctkctccttccytctggctccggaagaccccatattccccatcatcrggagcctcttcctgygagagctgatcaaagagtttggcacagaccacatctrtggggccgacactytcaatgagatgcagccaccttcctcagagccctcctaccttgccgcagccaccactgccktctatkaggccatgactgcagtggatactgaggctgtgtggctgctccaaggctggctcttccagcaccagcygcagttctgggggcccgcccagatcagggctgtgctgggagctgtgccccgtggccgcctcctggttctggacctgtttgctgagagccagcctgtgtatacccgcactgcctccttccagggccagcccttcatctrgtgcatgctgcacaactytggggraaaccrtggtctttttggagccctagaggctgtgaacggaggcccagaagctgcccgcctcttccccaactccaycatggtaggcacgggcatggcccccgagggcatcagccagaacraagtggtctrttccctcatggctgagctgggctggcgaaaggacccagtgccagatttggcagcckgggtgaccagctttgccgcccggyggtatggggtctcccacccggacgcaggggcagcgtgraggctactgctccggagtgkgtacaactgctccggggaggcctgcaggggccacaatcgtagcccgctggtcaggyggcyrtccctacagatgaataccagcatctggtacaaccgatmtgatgtgtttgaggcctggcggctgctgctcacatctgctccctccctggccaccagccccgccttccgctacgaccygckggacctcactyvgcaggcagtgcaggagctggtcagcttgtactatgaggaggcaagaagcgcctacctgagcaaggagctggcctcccygttgagggctggaggcgtcctggcctatgagctgctgccggcactggacgaggtgctggctrgtgacagccgcttcttsctgggcagctggctagagcaggccygagcagcggcagtcagtgaggccgaggccgatttctacgagcagaacagcyrctaccagctgaccttgtgsgrgccagaaggcaacatcctggactwtgccaacaagcagctggyggggttggtggccaactactacacccctyrctrgcsgcttttcctggaggcgckggttgacagtgtggcccagggcatccctttccaacagcaccagtttgacaaaaatgtcttccaactgragyaggccttcgttctcagcaagcagaggtaccccagccagccgcgaggagacactgtggacctggccaagaagatcttcctcaaatattaccccsgctgggtggccggctcttggtgatagattcgccaccactgggccttgttttccgctaattccagggcagattccagggcccagagctggacagacatcacaggataacccaggcctgggaggaggccccmcggcctgctggtggggtctgacctggggggattggagggaaatgacctgccctccmccmccmcccaaagtgtgggattaaagtactgttttctttccmcttaaactgatgagtcccctgggtctgtcaaaatgagaaggtcactgctgccacgcttgggaggactcagggctatagcatggccctggggtgggacctgttctcccatcccttgcctcacgtccctgtttttgtttgtttgtttgtttgtgacggagccttggtctgttgcccaggcttgagtacaatggcacagtctcggctcactgc

SEQ ID NO: 742 - DNA, 2335 bp, Homo sapiens
atgggggatttgttccagggccgtggaccctccagggtgggatgcgcccctgctcatgacactgcccgcaggtaccgctattaccagaatgtgtgcacgcaaagctrcwcyttcgtgtggtgggactgggcccgctgggagcgaragakagactgkatggcgctgaatggcatcaacctggcactggcctggagcggccaggaggccatctggcagcgggtgtacctggccttgggcctgacccaggcagagatcaatgagttctttactggtcctgccttcctggcctgggggygaatgggcaacctgcacacctgggatggccccctgcccccctcctggcacatcaagcagctttacctgcagcmccgggtcctggaccagatgcgctccttcggcatgaccccagtgctgcytgcattcgcggggcrtgttcccgaggctgtcaccagggtgttccctcaggtcaatgtcacgaagatgggcagttggggccactttaactgttcctactcctkctccttccytctggctccggaagaccccatattccccatcatcrggagcctcttcctgygagagctgatcaaagagtttggcacagaccacatctrtggggccgacactytcaatgagatgcagccaccttcctcagagccctcctaccttgccgcagccaccactgccktctatkaggccatgactgcagtggatactgaggctgtgtggctgctccaaggctggctcttccagcaccagcygcagttctgggggcccgcccagatcagggctgtgctgggagctgtgccccgtggccgcctcctggttctggacctgtttgctgagagccagcctgtgtatacccgcactgcctccttccagggccagcccttcatctrgtgcatgctgcacaactytggggraaaccrtggtctttttggagccctagaggctgtgaacggaggcccagaagctgcccgcctcttccccaactccaycatggtaggcacgggcatggcccccgagggcatcagccagaacraagtggtctrttccctcatggctgagctgggctggcgaaaggacccagtgccagatttggcagcckgggtgaccagctttgccgcccggyggtatggggtctcccacccggacgcaggggcagcgtgraggctactgctccggagtgkgtacaactgctccggggaggcctgcaggggccacaatcgtagcccgctggtcaggyggcyrtccctacagatgaataccagcatctggtacaaccgatmtgatgtgtttgaggcctggcggctgctgctcacatctgctccctccctggccaccagccccgccttccgctacgaccygckggacctcactyvgcaggcagtgcaggagctggtcagcttgtactatgaggaggcaagaagcgcctacctgagcaaggagctggcctcccygttgagggctggaggcgtcctggcctatgagctgctgccggcactggacgaggtgctggctrgtgacagccgcttcttsctgggcagctggctagagcaggccygagcagcggcagtcagtgaggccgaggccgatttctacgagcagaacagcyrctaccagctgaccttgtgsgrgccagaaggcaacatcctggactwtgccaacaagcagctggyggggttggtggccaactactacacccctyrctrgcsgcttttcctggaggcgckggttgacagtgtggcccagggcatccctttccaacagcaccagtttgacaaaaatgtcttccaactgragyaggccttcgttctcagcaagcagaggtaccccagccagccgcgaggagacactgtggacctggccaagaagatcttcctcaaatattaccccsgctgggtggccggctcttggtgatagattcgccaccactgggccttgttttccgctaattccagggcagattccagggcccagagctggacagacatcacaggataacccaggcctgggaggaggccccmcggcctgctggtggggtctgacctggggggattggagggaaatgacctgccctccmccmccmcccaaagtgtgggattaaagtactgttttctttccmcttaaactgatgagtcccctgggtctgtcaaaatgagaaggtcactgctgccacgcttgggaggactcagggctatagcatggccctggggtgggacctgttctcccatcccttgcctcacgtccctgtttttgtttgtttgtttgtttgtgacggagccttggtctgttgcccaggcttgagtacaatggcacagtctcggctcactgc

SEQ ID NO: 743 - DNA, 4126 bp, Homo sapiens
cggcggcgcaggggcggggctttacggacgcaagcacgtcgaagcgctgctcctggagccgcggagggtgcgggtttggctgcggtggtttctgtggcggttgctgtggcggagtttggaggttggagagaaatccaggtactcactagactggtaccttctgccaccatgggggagcttttccggagtgaagaaatgacactggcccagctttttctacagtcagaggctgcttattgttgtgtcagtgaattaggagaacttggaaaggttcagtttcgtgacttaaatccagatgtgaatgttttccaacggaaatttgtgaatgaagttagaagatgtgaagaaatggatcgaaagcttcgatttgttgagaaagagataagaaaagctaacattccgattatggacaccggtgaaaacccagaggttcccttcccccgggacatgattgacttagaggccaattttgagaagattgaaaatgaactgaaggaaatcaacacaaaccaggaagctctgaagagaaacttcctggaactgaccgaattaaaatttatacttcgcaaaactcagcaattttttgatgagatggcggatccagacttgttggaagagtcctcatccctcttggagccaagtgagatgggaagaggcactcctttaagacttggcttcgtggctggtgtcattaaccgggagcgcatccctacttttgagcgcatgctttggcgggtatgccggggaaatgtgttcctgcgacaggctgaaatcgagaaccccctggaggatcctgtgactggcgactacgtgcacaagtctgtgtttatcattttcttccaaggcgatcagctgaaaaacagagtcaagaaaatctgtgaagggttccgagcctcactctatccctgtcctgagacaccacaggagaggaaggaaatggcttctggrgtgaataccaggattgatgatctccaaatggttctgaatcaaacggaggatcaccgccagagggttctgcaggcagctgctaagaacatccgtgtctggttcatcaaagtgcggaagatgaaggccatctatcacaccctgaacctgtgcaacatagatgtgactcagaaatgcttgattgcagaggtctggtgccctgtcaccgaccttgactccatccagtttgcactcagaaggggcacggaacacagtggttccactgtaccttccattttgaacaggatgcagacaaaccagactcccccaacctataacaaaaccaacaagtttacctatggctttcagaacatagtagatgcttatggaattggaacttaccgagagataaatccagctccgtatactattatcacgttcccttttctatttgctgtgatgtttggagacttcggtcatggcattttaatgaccctttttgctgtgtggatggtactgagggagagccggatcctttcccagaagaatgagaatgagatgtttagcactgtgttcagtggtcgatacattattttattgatgggtgtgttctccatgtacactggcctcatctacaatgattgcttttccaagtctcttaatatctttgggtcatcctggagtgtacggccgatgtttacttataattggactgaagagacgcttcgggggaaccctgttctacagctgaacccagccctccctggagtgtttggtggaccatacccttttggcattgatccaatttggaacattgctaccaataaactgacgttcttgaactcctttaagatgaagatgtctgttatccttggtatcatccatatgctgtttggagtcagcctgagtctgttcaaccatatctatttcaagaagcccctgaatatctactttggatttattcctgaaataatcttcatgacctctttgtttggctatttggttatccttattttttacaagtggacggcctatgatgctcatacctctgagaatgcaccaagccttctgatccatttcataaacatgttcctcttttcctacccagagtctggttattcaatgttgtattctggacagaaaggaattcagtgtttcctggtagtggttgcactactgtgtgtaccttggatgctgctgtttaaaccattggtccttcgccgtcagtatttgaggagaaagcatttgggaactctcaactttggtgggatcagggtgggcaacggaccgacagaggaggatgctgagattattcagcatgaccagctctccacccactcagaggacgcagacgagtttgactttggggacaccatggtccaccaggccatccacaccatcgagtactgcctgggctgcatctccaacactgcctcctacttgcggctctgggccctcagcctcgctcatgcgcagctgtctgaggtgctttggaccatggtgatccacatcggcctgagcgtgaagagcttggcgggaggtttggtgctgttcttcttcttcactgcctttgccaccctgaccgtggccatcctcctgatcatggagggcctctcggcctttctccacgcactgcgcttacactgggttgagttccagaataaattctacagcgggaccggtttcaagttcttacccttctccttcgagcatattcgggaagggaagtttgaagagtgagtccctgtgagggccrtgtgccccatgctaccctccccgcctccctccacagtgatcagctgtgcctctctgcctgttggttgtgatctgtgggcaccagctcattcgtgtcaccctgtctgtgagtcatttagatagaatagtcctccttgggtctcccaccacccctagctttgtgtgtagtgtagtgattttctggctgtcactcatactcactgggcaccagccttgccctcttagcctccatccatccagacagcccttcccacctcctggtggtgagccagtctgcattcccacgccatcccaaagccctttcatcttccccgtgcattgtagatggaaggagcacccatgccattcacatctagactttgagttccctgcatctgccaccgtagtttctagcaggagtagtggggggagtaatacagattcttccctagaaggggacactggtaacatgtcccactcttggattagcaggggtgggtccaggaagatgatatttgcgtcttttgcccacccccctggcattcagctggacccaactaggccatcatgagtggcttctccctgtcayccccaggggtcataggatatctacaccgcctttctgaccccaccctgcactcccatcctttcctctctccccgttcatgccctgcactacatagcacagccgggatgcttggaacagaggccttggctgctccgcagtgcacagggcttccctctctcggggttggcttcttcccaggccttgcatgggccctgcccacaagcacaccctcaggccgagggtgcagactgatgctcttccctgatggagaccctgagatcttccccacccccaatcatgatgtcttcagtgtgggactggggtcctcttggttctgcctgcagcctgcctggctccgcccctagtgccccctcctcaccacactggccccaggtctcaggaggggtgtcctgggcagggaaggtcagtgtcactgatggtttgctgtttggaagccattggcagggctgccgtgcatgtggctgtgagggctgcacagtcctgccaaggggcttcctccttgtcaccccgaaccttgtaatcgtgtgctggcgtggcagccctggctaagttaatccccaccgctttcagtggtagaaagaattccctgagtgggccaggctggtgccctcctcctaccctggcttttytgagtgagctgcctggagccctcatcccctctcccaggctgggctggccctgggcggggccactgtgtgctggcccactgtgacctgacccgaccttgtgcagcccccctgccctggtgtcctgggttttcgtgatgatctttgctctgtttccagtggggtttgaagcagagttcagggaaccmtgcccaaggtcctcctgttcagacattcctatgttgaataaagtatgtttgacttccccggagaa

SEQ ID NO: 744 - DNA, 2038 bp, Homo sapiens
ctcccctcccgcccccgccctatatgttgcctgcctcggcctctggggcatggagcacgcggcccagccctggcgatggcgacggcgacggcgacggcggtggtggaggagcgcctgctggctgcgttcgcctaccttcagtgcgccgtgggctgcgcggtcttcgctcggaatcgtcagacgaactcagtgtacagccgccacgcgccacccagccgcaggctccgagtgccggcgcgggccacccgggtggtgcagaagctgccctcactggccctgccgctctaccagtacaccagtgagtccaccccgcgcctccgcagcgcgcccagctgcatcctcctggccatgttcctcgtccactactggcatcggtgcttaatttacccatttctgatgcgaggaggaaagcctgtgccactgttggcrtgcacaatggcgattatgttctgtacctgtaatggctatttgcaaagcagatacttgagccattgtgcagtgtatgctgatgactgagtaaaagatccccgttttctaataaattttggcttgtggttaacgggcatgttgataaacatccattcagatcatatcctaaggaatctcagaaaagcaggagatactggatacaaaataccaaggggaggcttatttgaatacataactgcaggcaactattttggagaaatcatggagtggcgtggctatgccctggccagctggtctgtccaaggcgcgacttttgctttcttcacattttgttttttatctggtagagcaaaagagcatcatgagcggtacctccggaaatttgaagagtatccaaagttcagaaaaattataattccatttttgttttaagtgcattttcaacgaattaccttcaacttgaagctttccaatggtatttttcaatggactttgtaaataagttatatctttgtaattttcctgctacttcatcattttcaagatgtcctctaggaattttttttctagtaattttgcaagctacctaataagtacctaaataaactgaaacggaggttgaggtatcctactgtgtaacaggtcagaatttcaaactccgggtaataactgctgacattttttctaatttcaaatttacctcttttggctatgtcttgccaagggtgtacaagactagaatttgcaatatctttgatggcattttcagaacaataaatgtcacaatcccttctatagccccctacggtgatcccttcaaggtcaacggcagtgttgcttccctttccctgtagggctgggatctgtcttggagtcctctctcggaggccacagaggccgggggtagccattgtgaagtcatggcctgggggaaagttgccaaacttcgtgtcaggtgctgtgtgtaagtggagaacttggggatagaggaggaagctccttgtggcccttctaaggcggggcaaaggcatctggacttgttccagcccagcccaccgggtgacatcaccgggcagggaggggtgctggtggtggttcatagggagtaagctgctctgcctgtgtgagtggctcctgggccctaaacaagcacctttaggccatgggtcactcaccatgagccatcaatatgctctggtctgacatggtttctctctgtcttctagtctagacctagtcttttgttctgttccccaggtatggatatactagagattgttgtctgtgaaatttctcctttgtagagtttgagttttcccttgtagtgtaaagaatgatcaccttctgtaacgatagcaagaccactttttaagatttatcctctttgttctttgttgattgaaacataataattacattgttaaaattctctacagccttctttttcttccatagctaatcttccaatagtttttgctttctgtttcgctgttgttgctttgcaaagctttcccctcatagcctgtatctgttatcaatataaaataatcttcctgttgaatgcttcatgacttgaattctactttgataaaaacattgccatactgct

SEQ ID NO: 745 - DNA, 2041 bp, Homo sapiens
ctcccctcccgcccccgccctatatgttgcctgcctcggcctctggggcatggagcacgcggcccagccctggcgatggcgacggcgacggcgacggcggtggtggaggagcgcctgctggctgcgttcgcctaccttcagtgcgccgtgggctgcgcggtcttcgctcggaatcgtcagacgaactcagtgtacagccgccacgcgccacccagccgcaggctccgagtgccggcgcgggccacccgggtggtgcagaagctgccctcactggccctgccgctctaccagtacaccagtgagtccaccccgcgcctccgcagcgcgcccagctgcatcctcctggccatgttcctcgtccactactggcatcggtgcttaatttacccatttctgatgcgaggaggaaagcctgtgccactgttggcrtgcacaatggcgattatgttctgtacctgtaatggctatttgcaaagcagatacttgagccattgtgcagtgtatgctgatgactgagtaaaagatccccgttttctaataaattttggcttgtggttaacgggcatgttgataaacatccattcagatcatatcctaaggaatctcagaaaagcaggagatactggatacaaaataccaaggggaggcttatttgaatacataactgcaggcaactattttggagaaatcatggagtggcgtggctatgccctggccagctggtctgtccaaggcgcgacttttgctttcttcacattttgttttttatctggtagagcaaaagagcatcatgagcggtacctccggaaatttgaagagtatccaaagttcagaaaaattataattccatttttgttttaagtgcattttcaacgaattaccttcaacttgaagctttccaatggtatttttcaatggactttgtaaataagttatatctttgtaattttcctgctacttcatcattttcaagatgtcctctaggaattttttttctagtaattttgcaagctacctaataagtacctaaataaactgaaacggaggttgaggtatcctactgtgtaacaggtcagaatttcaaactccgggtaataactgctgacattttttctaatttcgaatttacctcttttggctatgtcttgccaagtgtgtataagactagactttacgactatctttgatggcattttcagaacaataaatgtcacaatcccttctatagccccctacggtgatcccttcaaggtcaacggcagtgttgcttccctttccctgtagggctgggatctgtcttggagtcctctctcggaggccacagaggccgggggtagccattgtgaagtcatggcctgggggaaagttgccaaacttcgtgtcaggtgctgtgtgtaagtggagaacttggggatagaggaggaagctccttgtggcccttctaaggcggggcaaaggcatctggacttgttccagcccagcccaccgggtgacatcaccgggcagggaggggtgctggtggtggttcatagggagtaagctgctctgcctgtgtgagtggctcctgggccctaaacaagcacctttaggccatgggtcactcaccatgagccatcaatatgctctggtctgacatggtttctctctgtcttctagtctagacctagtcttttgttctgttccccaggtatggatatactagagattgttgtctgtgaaatttctcctttgtagagtttgagttttcccttgtagtgtaaagaatgatcaccttctgtaacgatagcaagaccactttttaagatttatcctctttgttctttgttgattgaaacataataattacattgttaaaattctctacagccttctttttcttccatagctaatcttccaatagtttttgctttctgtttcgctgttgttgctttgcaaagctttcccctcatagcctgtatctgttatcaatataaaataatcttcctgttgaatgcttcatgacttgaattctactttgataaaaacattgccatactgcttt

SEQ ID NO: 746 - DNA, 498 bp, Homo sapiens
ctccacactgcctctcatggggggctgggatagagaggaagacaggtgtgcaggcctggtcctgttctgaggactctgctgaaccggatcctatgaggttattttgtaaactctaatatatgacttgtaaactggacatgaacaagaatttgtgatatagcctctttaccaggattgaagaagatagaaagaaaaaaatcttggacaaattaattgcaggaagaaatgatcaaattttggcttacatattttgcaacagtggtataayacaaagaagtaagcaaatatggcagaagtgtggtggctttggcgtctacttttgaccatagtggtggccctgttattcgtggctcccggggttcctacacatccttcccgatggaagaaggggttggccaaaaaggtcagccagctgatgggttggaccaagaaagacagagtgataagaatgagtgacaccatgttctatcattttgtattagatgcaccaaaaaacta

SEQ ID NO: 747 - DNA, 2025 bp, Homo sapiens
ctgacactccacctttctgctgcaggaaaagaagtttgctatgaaaggttagggtgtttcaaagatggtttaccatggaccaggactttctcaacagagttggtaggtttaccctggtctccagagaagataaacactcgtttcctgctctacactatacacaatcccaatgcctatcaggagatcagtgcggttaattcttcaactatccaagcctcatattttggaacagacaagatcacccgtatcaacatagctggatggaaaacagatggcaaatggcagagagacatgtgcaatgtgttgctacagctggaagatataaattgcattaatttagattggatcaacggttcacgggaatacatccatgctgtaaacaatctccgtgttgttggtgctgaggtggcttattttattgatgttctcatgaaaaaatttgaatattycccttctaaagtgcacttrattggccacagcttgggagcacacctggctggggaagctgggtcaaggataccaggccttggaagaataactgggttggacccagctgggccatttttccacaacactccaaaggaagtcaggctagacccctcggatgccaactttgttgacgttattcatacaaatgcagctcgcatcctctttgagcttggtgttggaaccattgatgcttgtggtcatcttgacttttacccaaatggagggaagcacatgccaggatgtgaagacttaattacacctttactgaaatttaacttcaatgcttacaaaaaagaaatggcttccttctttgactgtaaccatgcccgaagttatcaattttatgctgaaagcattcttaatcctgatgcatttattgcttatccttgtagatcctacacatcttttaaagcaggaaattgcttcttttgttccaaagaaggttgcccaacaatgggtcattttgctgatagatttcacttcaaaaatatgaagactaatggatcacattattttttaaacacagggtccctttccccatttgcccgttggaggcacaaattgtctgttaarctcagtggaagcgaagtcactcraggaactgtctttcttcgtgtaggcrggrcarttrggaaaactggggagtttgccattgtcagtggaaaacttgagccaggcatgacttacacaaaattaatcgatgcagatgttaaygttggaaacattacaagtgttcagttcatctggaaaaaacatttgtttgaagattctcagaataagttgggagcagaaatggtgataaatacatctgggaaatatggatataaatctacctwctgtagccaagacattatgggacctaatattctccagaacctgaaaccatgctaatctcagatacagtcttgatggatttctttagtaggagcaatgaagaaaagtgtctccttccacctggcatccagaccaaatttgacccttgtaaatgacttagtcatttacaagggtcttactcagagtcaagtacgggtttgctttttttctgtgtagaatgttcatctaactgcaccttaaaaacacactgaaccctgggacaaaagataattactatgatctgtaggaatctggatatcattgacaaaatagagctgttttggaattttcctgaataagaggaggtgatgcaaatgtatgttgagtgtataaactcactggacaaaagtaagcctctggcttgctgagtttttgaagtatattttcaggtataataatcattgttctaaaattatataaaactatttgttatgttgttaaatcttgctgagacaaattatgactatagtgcatgatatatagtagattataaccttgtgggttgatgtgtctatctagtaataataaaaactaatgagatggcactagtatttccaaggtgttccttggtgttcagggtgtgcacaagagagattttggagcttatctgttatgtgttcatcagttagcaatgggacctgaagttcaacaacccagggtata

SEQ ID NO: 748 - DNA, 2211 bp, Homo sapiens
ccggcctcccacccagctctctggtcccggcggtaagatggcggctgccgcggagtgcgatgtggtaatggcggcgaccgagccggagctgctcgacgaccaagaggcgaagagggaagcagagactttcaaggaacaaggatatgcatactatgcatatgtgtcctaaaaatgctagctattatggtaatcgagcagccaccttgatgatgcttggaaggttccgggaagctcttggagatgcacaacagtcagtgaggttggatgacagttttgtccggggacatctacgagagggcaagtgccacctctctctggggaatgccatggcagcatgtcgcagcttccagagagccctagaactggatcataaaaatgctcaggcacaacaagagttcaagaatgctaatgcagtcatggaatatgagaaaatagcagaaacagattttgagaagcgagattttcggaaggttgttttctgcatggaccgtgccctagaatttgcccctgcctgccatcgcttcaaaatcctcaaggcagaatgtttagcaatgctgggtcgttatccrgaagcacagtctgtggctagtgacattctacgaatggattccaccaatgcagatgctctgtatgtacgaggtctttgcctttattacgaagattgtattgagaaggcagttcagtttttcgtacaggctctcaggatggctcctgaccacgagaaggcctgcattgcctgcagaaatgccaaagcactcaaagcaaagaaagaagatgggaataaagcatttaaggaaggaaattacaaactagcatatgaactgtacacagaagccctggggatagaccccaacaatataaaaacaaatgctaaactctactgtaatcggggtacggttaattccaagcttaggaaactagatgatgcaatagaagactgcacaaatgcagtgaagcttgatgacacttacataaaagcctacttgagaagagctcagtgttacatggacacagaacagtatgaagaagcagtacgagactatgaaaaagtataccagacagagaaaacaaaagaacacaaacagctcctaaaaaatgcgcagctggaactgaagaagagtaagaggaaagattactacaagattctaggagtggacaagaatgcctctgaggacgagatcaagaaagcttatcggaaacgggccttgatgcaccatccagatcggcatagtggagccagtgctgaggttcagaaggaggaggagaagaagttcaaggaagttggagaggcctttactatcctctctgatcccaagaaaaagactcgctatgacagtggacaggacctagatgaggagggcatgaatatgggtgattttgatccaaacaatatcttcaaggcattctttggcggtcctggcggcttcagctttgaagcatctggtccagggaatttcttttttcaatttggctaatgaagggcaaccacccagaacccagaaaatgcagattcactcagtttaatcttgaatgtggaaacagttcacctcctcccttcatcacgtctccgtgtgcttagagcagtttcgttttctcagttggatgccctgtgtctctgtgagtggggtggagcaaagggaaccaatgccgaagaccgagggcaggggagggaggcgggggtggacagggaggcagcttgtgaatttttgttttactgtttaactttattaaaaaagaaaaaaaaaaagagaataaaatgttttgacccttcctggccctttgctctggcatctgcattgtctccagtctgtgagccagagctgagcccgacctggacttggggtgcagcaagctgctgcatgcgggctgtgggcacccagcctagtkgcaggtggggcactctgcctctcccagacctgtccagcatgtgagtgctaggcaggccccggctgtgcctctgggcccagcctaacatcagtcacagagaagcgagttcagaaagcatgctcactttacggtggggccccagaaatcactagaagctgtgtgtgtccaaagctcaggtgggtactaaaagctgtgtgcgtccaaagctcaggtgggtactgacctagacagggcagtttacttacaaagactctcacagttcctgttgcagtgtgggttcgagggagatggtagacagagataaaaccctgcctcctgaccccc

SEQ ID NO: 749 - DNA, 1367 bp, Homo sapiens
tacagaaacctttccattgccatactgagaaastgcagcaggcagtgtgcctacaggtctacaaagaaacttcagatcatcttcttgagggaaagaagctgaagtgctacataagatgcttgtgcttcataactctcagaagctgcagattctgtataaatccttagaaaagagcatccctgaatccataaaggtatatggcgccattttcaacataaaagataaaaaccctttcaacatggaggtgctggtagatgcctggccagattaccagatcgtcattacccggcctcagaaacaggagatgaaagatgaccaggatcattataccaacacttaccacatcttcaccaaagctcctgacaaattagaggaagtyctgtcatactccaatgtaatcagctgggagcaaactttgcagatccaaggttgccaagagggcttrgatgaagcaataagaaaggttgcaacttcaaaatcagtgcaggtagattacatgaaaaccatcctctttataccggaattaccaaagaaacacaagacctcaagtaatgacaagatggagttatttgaagtggatgatgataacaagraaggaaacttttcaaacatgttcttagatgcttcacatgcaggtcttgtgaatgaacactgggcctttgggaaaaatgagaggagcttkaaatatattgaacgctgcctccaggattttctaggatttggtgtgctgggtccagagggccagcttgtctcttggattgtgatggaacagtcctgtgagttgagaatgggttatactgtccccaaatacagacaccaaggcaacatgttgcaaattggttatcatcttgaaaagtatctttctcagaaagaaatcccattttatttccatgtggcagataataatgagaaaagcctacaggcactgaacaatttggggtttaagatttgtccttgtggctggcatcagtggaaatgcacccccaagaaatattgttgattgattccactgtccatttcaaatctttcttatcagtaaaaaaacattaattcaaacacaagcattgtgatctacattagcacaaaatgcaactgattatctaggatctgtgtattayttaagctcacccttaacarttttaccttccttctcctctgtattcttacagaaaattagaagctcaattttatggtctcataatttcctttatgacagacatctcagaattaaaatcacccaaagccaatcattagtgccaagataaccctttaacggcaacactttcttaaatgaagactatttctttcatgaaaaaattcacttttatgactttcttgttaaaataaaaagtctgcttttaaaagtg

SEQ ID NO: 750 - DNA, 2968 bp, Homo sapiens
ccatccttcccttcccccaccaccccgccctccgggagccacgcccaaaaagtcaaggcgcttcagttaccagccggctacgtcgcgcctgcgctttgacccccagtttgcgccccaactccggtcgtgcggccgcccggggagggctctgcagttgcgcagcttgctccccggcccttttcccctccgctccccgccgcctcctgacgccgggcgtgacgtcaccacgcccggcggscgccattacagagagccgagctctggagcctcagcgagcggaggaggaggcgcagcggccgacggccgagtactgcggtgagagccagcgggccagcgccagcctcaacagccgccagaagtacacgaggaaccggcggcggcgtgtgcgtgtaggcccgtgygcgggcggcggcgcgggagsagcgcggagcggcagccggctggggcgggtggcatcatggacgagaaggtgttcaccaaggagctggaccagtggatcgagcagctgaacgagtgcaagcagctgtccgagtcccaggtcaagagcctctgcgagaaggctaaagaaatcctgacaaaagaatccaacgtgcaagaggttcgatgtccagttactgtctgtggagatgtgcatgggcaatttcatgatctcatggaactgtttagaattggtggcaaatcaccagatacaaattacttgtttatgggagattatgttgacagaggatattattcagttgaaacagttacactgcttgtagctcttaaggttcgttaccgtgaacgcatcaccattcttcgagggaatcatgagagcagacagatcacacaagtttatggtttctatgatgaatgtttaagaaaatatggaaatgcaaatgtttggaaatattttacagatctttttgactatcttcctctcactgccttggtggatgggcagatcttctgtctacatggtggtctctcgccatctatagatacactggatcatatcagagcacttgatcgcctacaagaagttccccatgagggtccaatgtgtgacttgctgtggtcagatccagatgaccgtggtggttggggtatatctcctcgaggagctggttacacctttgggcaagatatttctgagacatttaatcatgccaatggcctcacgttggtgtctagagctcaccagctagtgatggagggatataactggtgccatgaccggaatgtagtaacgattttcagtgcyccaaactattgttatcgttgtggtaaccaagctgcaatcatggaacttgacgatactctaaaatactctttcttgcagtttgacccagcacctcgtagaggcgagccacatgttactcgtcgtaccccagactacttcctgtaatgaaattttaaacttgtacagtattgccatgaaccatatatcgacctaatggaaatgggaagagcaacagtaactccaaagtgtcagaaaatagttaacattcaaaaaacttgttttcacatggaccaaaagatgtgccatataaaaatacaaagcctcttgtcatcaacagccgtgaccactttagaatgaaccagttcattgcatgctgaagcgacattgttggtcaagaaaccagtttctggcatagcgctatttgtagttacttttgctttctctgagagactgcagataataagatgtaaacattaacacctcgtgaatacaatttaacttccatttagctatagctttactcagcatgactgtagataaggatagcagcaaacaatcattggagcttaatgaacatttttaaaaataattaccaaggcctcccttctacttgtgagttttgaaattgttctttttattttcagggataccgtttaatttaattatatgatttgtctgcactcagtttattccctactcaaatctcagccccatgttgttctttgttattgtcagaacctggtgagttgttttgaacagaactkttttttycccttcctgtaagacgatgtgactgcacaagagcactgcagtgtttttcataataaacttgtgaactaaraactgagaaggtcaaattttaattgtatcaatgggcaagactggtgctgtttattaaaaaagttaaatcaattgagtaaattttagaatttgtagacttgtaggtaaaattaacttcaggatttatttgtatttcacatattacaatttgtcacattgttggtgtgcactttgtgggttcttcctgcatattaacttgtttgtaagaaaggaaatctgtgctgcttcagtaagacttaattgtaaaaccatataacttgagatttaagtctttgggttktgttttaataaaacagcatgttttcaggtagagcttaaactaaatgatgtgtttacttagtgcagtttctggttatgaatattatattgctatgtgtatattatatggactctttaaaatgattgacagattggcaaattcttaaatctttgtacattgttgagtcatatgttcttagagttaaatttgtctcagataagaaagtgttaaagcattagcctgtgtcaagttctttgagtgatactagtgaaaccaaatagaaaactattgttggatcatgatttagtcttatgtacattcacccgaagacaaaaatggtacttaaagtggcagtgttcaacatttaatgagtttttccccttttatccttcgaataggattagatgtttaaaaaaaagttcttctgtgggaactaatatttgatattttaacctaccagagtaaacaggaacacttaatcatacttgtgagtgtagtaaataaaagttttcttgctttgtgctgtgttgaatctggaaccaacagggaagttatagcatatcccctttctaaaatgcttgaggaacacatacataccgaatgtcttttctgatctaattgatagtatttttagtggcttgtggagt

SEQ ID NO: 751 - DNA, 3022 bp, Homo sapiens
ccatccttcccttcccccaccaccccgccctccgggagccacgcccaaaaagtcaaggcgcttcagttaccagccggctacgtcgcgcctgcgctttgacccccagtttgcgccccaactccggtcgtgcggccgcccggggagggctctgcagttgcgcagcttgctccccggcccttttcccctccgctccccgccgcctcctgacgccgggcgtgacgtcaccacgcccggcggscgccattacagagagccgagctctggagcctcagcgagcggaggaggaggcgcagcggccgacggccgagtactgcggtgagagccagcgggccagcgccagcctcaacagccgccagaagtacacgaggaaccggcggcggcgtgtgcgtgtaggcccgtgygcgggcggcggcgcgggagsagcgcggagcggcagccggctggggcgggtggcatcatggacgagaaggtgttcaccaaggagctggaccagtggatcgagcagctgaacgagtgcaagcagctgtccgagtcccaggtcaagagcctctgcgagaaggctaaagaaatcctgacaaaagaatccaacgtgcaagaggttcgatgtccagttactgtctgtggagatgtgcatgggcaatttcatgatctcatggaactgtttagaattggtggcaaatcaccagatacaaattacttgtttatgggagattatgttgacagaggatattattcagttgaaacagttacactgcttgtagctcttaaggttcgttaccgtgaacgcatcaccattcttcgagggaatcatgagagcagacagatcacacaagtttatggtttctatgatgaatgtttaagaaaatatggaaatgcaaatgtttggaaatattttacagatctttttgactatcttcctctcactgccttggtggatgggcagatcttctgtctacatggtggtctctcgccatctatagatacactggatcatatcagagcacttgatcgcctacaagaagttccccatgagggtccaatgtgtgacttgctgtggtcagatccagatgaccgtggtggttggggtatatctcctcgaggagctggttacacctttgggcaagatatttctgagacatttaatcatgccaatggcctcacgttggtgtctagagctcaccagctagtgatggagggatataactggtgccatgaccggaatgtagtaacgattttcagtgcyccaaactattgttatcgttgtggtaaccaagctgcaatcatggaacttgacgatactctaaaatactctttcttgcagtttgacccagcacctcgtagaggcgagccacatgttactcgtcgtaccccagactacttcctgtaatgaaattttaaacttgtacagtattgccatgaaccatatatcgacctaatggaaatgggaagagcaacagtaactccaaagtgtcagaaaatagttaacattcaaaaaacttgttttcacatggaccaaaagatgtgccatataaaaatacaaagcctcttgtcatcaacagccgtgaccactttagaatgaaccagttcattgcatgctgaagcgacattgttggtcaagaaaccagtttctggcatagcgctatttgtagttacttttgctttctctgagagactgcagataataagatgtaaacattaacacctcgtgaatacaatttaacttccatttagctatagctttactcagcatgactgtagataaggatagcagcaaacaatcattggagcttaatgaacatttttaaaaataattaccaaggcctcccttctacttgtgagttttgaaattgttctttttattttcagggataccgtttaatttaattatatgatttgtctgcactcagtttattccctactcaaatctcagccccatgttgttctttgttattgtcagaacctggtgagttgttttgaacagaactkttttttycccttcctgtaagacgatgtgactgcacaagagcactgcagtgtttttcataataaacttgtgaactaaraactgagaaggtcaaattttaattgtatcaatgggcaagactggtgctgtttattaaaaaagttaaatcaattgagtaaattttagaatttgtagacttgtaggtaaaataaaaatcaagggcactacataacctctctggtaactccttgacattcttcagattaacttcaggatttatttgtatttcacatattacaatttgtcacattgttggtgtgcactttgtgggttcttcctgcatattaacttgtttgtaagaaaggaaatctgtgctgcttcagtaagacttaattgtaaaaccatataacttgagatttaagtctttgggttktgttttaataaaacagcatgttttcaggtagagcttaaactaaatgatgtgtttacttagtgcagtttctggttatgaatattatattgctatgtgtatattatatggactctttaaaatgattgacagattggcaaattcttaaatctttgtacattgttgagtcatatgttcttagagttaaatttgtctcagataagaaagtgttaaagcattagcctgtgtcaagttctttgagtgatactagtgaaaccaaatagaaaactattgttggatcatgatttagtcttatgtacattcacccgaagacaaaaatggtacttaaagtggcagtgttcaacatttaatgagtttttccccttttatccttcgaataggattagatgtttaaaaaaaagttcttctgtgggaactaatatttgatattttaacctaccagagtaaacaggaacacttaatcatacttgtgagtgtagtaaataaaagttttcttgctttgtgctgtgttgaatctggaaccaacagggaagttatagcatatcccctttctaaaatgcttgaggaacacatacataccgaatgtcttttctgatctaattgatagtatttttagtggcttgtggagt

SEQ ID NO: 752 - DNA, 1718 bp, Homo sapiens
gggaagcgccggcggaactgggcgcggagggcggtggcgcgtccccgcgcatcctgcggctcgagctcctccgaaggcgggggcgcggggcccctyccgcagtcctggggacgacaaaagtctcctggcactgggggcaagagaccagaaaaaggagtgatgggaattcgaggctctccccggccttggaaaaccctggaagcgctgcacctccctcctgccgcacggatttgagcgcggccccgacgtcctggcgtccgatcggcctgcggagtcccccgcgggcgcgcacttccagccgcgaccccgccccgcagccccgggtcagatccgccgagtatgaagcgctcggcttttcttttgtgtgaggagcacccacgacgccccgaccatgggcgcaggggcagaggcgaaggtcgtcgctccgtccgctaccccgtcccccagccgcargcgccgaggagccggaagagaggcggaaagggcagcagkctccttacccagaccagcgaggggaggtcagctcgtcgcggggtgtggctcccgtccggggactcccgagctcattacgggtggccgtgtgtagccaagttcaagctctccctccgggaatgcctgccgcggcggcggaatacggcttcttcaggacattcagcaaagcggrgaggcggggacctgcgggcggaggagcgacgccccagctgggaacgcggcggacgggcgagcggggggtgygccctgggcgcgccaggccgcagaggctccggggaaagttctcttggccgcgcgagtggtggcgccccgggcgggagcagcccaggtgcatgtgggcccggtccaggcgtctgcaaaaagccctggaacgaagcggaccccccagtccagcgctggccgcggcaggggagccccttctgggcggggtatcagctgggggcggagggcggggcagagaccgtggtcccagcggcgaggtgccggcgagtccacgctgccaagccgcacactgcgcccaagccgcggggcagtccagcgctcgctgcgtccttcccccgagagacctggaggctgggtggggagaagaggacgcggtgctgctcggaccccacsgttcggcggtcccaatcccacgccctccgcgcggtcggccgcgtccaggactgaggggcacaatagctctgaagctgcagtgacccctggtgggtcccgatgtccgtgcacaggcagccgaggttgagctgcggacgacactgagccccgctgggcttcggagcaggtgcaatctgtgctctccagctgggaaccagcagcgagttaatgcgagtcgcagttaggggagacacgaggggaggtgtcacagaaaaaaaactctatattgagttttagagttagagctttggcatcagacgtagttttgagttgactattctactgcttgttagctgggtagccaaagctcaaaaaaaattgcttaaaacctaggacgttagyccttaaaacaaaaccaggcttccgtagcacagtagaaatgaaatgaacaattggcgacttttgatggagtttcctctcatagtgatttgccacaaaggaccttctgtaggaagcctcggccttccctgctattgtgaccccatccaaacacaggatcagcataaccgccaaagtgcaatataaatttctgaactttacctaggctatgaataaaactattttatcttctg

SEQ ID NO: 753 - DNA, 1045 bp, Homo sapiens
gtaaatctactaaacttatttatacaagagaatgtctctggaaatacacaagtggtgagagaaggggaggggaggagaaggcctctgaggtaaactgtgaagggaagttgactgtgggtaaggggcagagaggcattcattgaactgctatttcttgaggtcactctgggcgaagggcagtgcctggggtcctacttgccggcccaggcacaggcacggagtcagaacatcctgccccgccccttccccccaacctttcaccttcctttccagccccaccccgctcccatggccccggaccttggcaacgctgcgcagcgcgtcagtcaacgtcacagggcgtgggggtggctagaggccccagtggcctctgatctcacagagcagatcagcgcgggtgtccagcgccccgatgtgggcagtcggggctagccgctggggcaggctgcccccagcaagaggagcggccgctccaaaccacaaaatctccaacgccggacagcgcggcctcggtcaccatacgctacaggcatcctgcaggccatcgcgtgtggtggagcgtccggcgcttatcgtggtcagtccccctctacgccaccgtccgattcccccgacgcccccgccgaccccggagcttgccctcagccccttcatctgccgaggcatacccttgctgcccatcccacccagggatcgccacctctgccctctaycaggctccgggcccggtgccgaggactggccgccaagggttgcggactatggccctaaagctcatccacaaggagttcctcgaactggcccgcgacccccagccccactgctcagcagggccagtgtgggacgatatgctccactggcaggccaccataacgaggcccaacgacagctcctacctgggaggggtcttcttcctaaagtttccctccgactacctattcaaaccacccaagatcaaatttaccaacggaatttaccatcaacgttaacggaaatacgcgacaggagggagtatggcagaatagctaaagactggactcagtag

SEQ ID NO: 754 - DNA, 4293 bp, Homo sapiens
ggccgcgctgggatggccgccacagctgtaggkgctgctagtgtttagcgctggtctttgccgggcgttgagggcagctcagcctccttgtttgtccggttcgcctgtgcgtggtactcaagggcaccagtattcccgcsgtcggcagcatgggtcgggagtcacgccactatcgaaaacgatcggcatcccggggtcgctctggaagtcggtctagaagtcgctcaccctcagacaaaagaagtaaacgtggagatgacagacggtctagaagtagagatagagataggaggagagagaggtctcgtagcagggataaaagaagatctcggtcaagggacaggaagcgtctgagacgttccagaagtagagagagagacagaagccgagagcgaagaagatctcgaagtagagacaggagacgctcaaggagtagaagccggggccggcgatcccgatcctccagtcctggaaataaaagcaagaaaactgagaatagatctaggtccaaagagaaaactgatggtggggaaagttctaaagagaagaaaaaagacaaagatgacaaggaggatgaaaaagaaaaagatgctggcaactttgaccagaataagctggaagaagaaatgagaaagcgaaaagaaagagtagaaaaatggcgagaagagcaacgtaaaaaggctatggaaaacataggagaactgaaaaaggaaatcgaagagatgaaacaagggaaaaagtggagtttagaggacgatgatgatgacgaagatgatcctgcagaagctgaaaaggagggaaatgaaatggagggtgaggagttagatccattagatgcttacatggaagaagtgaaagaggaagtaaaaaaatttaacatgagaagtgtaaaaggtggtgggggaaatgaaaagaagtctgggccaacggtcacaaaagttgtcactgttgtgacaaccaaaaaagcagttgtggattctgataagaagaaaggtgagctgatggagaatgaccaggatgccatggagtattcttcagaggaggaagaagttgatcttcagacagcccttacagggtatcaaacaaaacagcgaaagcttctagaaccagttgatcatggaaaaattgagtatgagccatttaggaaaaacttctatgttgaagttccagaactagcaaaaatgtctcaagaagaggtaaatgtgtttcgattggaaatggagggcattacagttaaaggaaaaggttgccccaaaccaattaaatcctgggtccagtgtggaatttccatgaagatcttaaattccctcaagaagcatggctatgaaaagcccacgcccatccaaacccaagctattcctgctataatgtctggacgagatttgattggcattgccaaaacaggaagtggaaagaccattgcttttctgttgcccatgtttagacacatcatggatcagaggtcattagaggaaggagaggggccaatagctgtcatcatgactccaactcgagaactggctttacagattactaaagagtgtaagaagttttccaagactttgggacttagagtggtctgtgtttacggaggaacaggaatcagtgagcagattgctgagctgaaaagaggtgctgaaattattgtttgcacacctggtcgaatgattgacatgttagccgctaacagtggtcgggtcacaaatcttcgaagagtgacatatgttgttytagatgaagcagacagaatgtttgacatgggttttgaaccccaggtcatgcgcatcgtggataatgttcgtcctgatcgacagacggttatgttttcagctactttccccagagctatggaggctttggctcgcaggatcctcagtaaacctattgaagtacaagttggaggcaggagtgtggtttgctcagatgtggagcaacaagtgattgtgattgaagaagaaaagaaattcttgaagttacttgagcttctaggccattatcaagagtcaggatctgtcattatatttgtggataagcaggaacatgctgatggtcttcttaaggatttaatgagagcatcttatccttgcatgtctcttcatggaggcattgatcaatatgacagagatagcatcataaatgactttaagaatgggacctgcaaacttcttgtggctacctctgttgctgcccgaggtctagatgtgaaacatctgattcttgtagtaaattatagctgccccaaccattatgaggattatgtacacagagcagggcggactggaagagcaggaaacaagggttatgcttatacttttatcacagaggatcaagctcgctatgctggtgacataattaaagctcttgaattgtcagggactgcagtacctcctgatttagagaaactgtggagtgatttcaaagatcagcagaaagctgaggggaaaataattaaaaagagtagtgggttctctggtaagggattcaagtttgatgaaacagaacaagctttggctaatgagaggaagaagttacaaaaagcagctcttggtctacaagattcagatgatgaggatgctgcagttgatattgatgagcaaattgaaagcatgtttaattcaaagaagagagtaaaggatatggctgctcctggaacatcaagtgttcctgctccaactgcaggaaatgctgagaaattagaaattgctaagagattggctcttagaatcaatgcccagaagaatttgggcatcgagtctcaggtattaagatgtgatgcagcaggccaccaatgcaattcttaggggtggcaccattctggctcccactgtttctgcaaaaaccattgcagaacaacttgctgaaaagatcaatgccaagctcaattatgtgccgttagagaaacaagaagaagagagacaggatggtggacagaatgaatcttttaagagatatgaagaagaattagagatcaatgacttcccacaggcaaactgctaggtggaaagttacctctaaggaagctctgcagagaatcagtgaatactctgaagccgcaattacaatcagaggaacctacttccctcctggcaaagaacccaaggaaggcgagcggaagatttacttggcaattgaaagtgccaatgaactggctgtgcagaaagcaaaggcagaaatcaccaggctcataaaagaagagctgatccggctgcaaaattcataccaaccaacaaataaaggaagatacaaagtcttatagacatccggaaaaaagatttttacctgtgctggtctatgatgtatgtggcagttgctgtctgcagtttacaatgtattgtaaatgaagattttttaaattctatcttgctgattttttttaaatataagaaactggtacttggtaaagaaatctgtccgtaagtacccccacaatcagtcaaactatatttaaagccagcctgttttcagagtatgatgtcctttaatgtaaactcaaatatcaatattttaaatgtccggataatattctagaggtttaaaaaatggaaatatttgaactttctattgaagacaataaagtacacaagtcgttaaggggctattcactttatcctgtactttcaatgaaattgtgatcatttcctaagaaaaggtaaaattcactatcatattttgtgtccccaccttgatgttacatgactctggaacaatatgaactggatttaagaatgttataatagaagtcttacaaaatgggttgagagtttttgtttcaatttttatcatcataaatgggcaaaaagtagttggactaatttcggtttttatacaagtaaagatttaatagtataaggatttttttgcatttctttacactgagtgtaaaactctacaaagagttatagtatttactactttgaggtttccctcacaacttctggctccatacctagcccctcttttataatcttccttaaaagaaagagtgtagcctataaatactaaatatgataccttttccttctagaaagtgtttatttatatatctatacatgttgtatgtacaaatatcctactacttttaatctgatttttcttcaggattattgagtaggttgtgaattttctttcttaaaaattgtaaaacataatggtacccaagttttaaacttagatgtgcttcatcttagtgaaatttaattcacaaggaatcataaattgtgtttttgaggctgggcgcagtgactcacacctgtatcccagcaatttgggaggccgaggtgggcagatcacttg

SEQ ID NO: 755 - DNA, 4285 bp, Homo sapiens
ggccgcgctgggatggccgccacagctgtaggkgctgctagtgtttagcgctggtctttgccgggcgttgagggcagctcagcctccttgtttgtccggttcgcctgtgcgtggtactcaagggcaccagtattcccgcsgtcggcagcatgggtcgggagtcacgccactatcgaaaacgatcggcatcccggggtcgctctggaagtcggtctagaagtcgctcaccctcagacaaaagaagtaaacgtggagatgacagacggtctagaagtagagatagagataggaggagagagaggtctcgtagcagggataaaagaagatctcggtcaagggacaggaagcgtctgagacgttccagaagtagagagagagacagaagccgagagcgaagaagatctcgaagtagagacaggagacgctcaaggagtagaagccggggccggcgatcccgatcctccagtcctggaaataaaagcaagaaaactgagaatagatctaggtccaaagagaaaactgatggtggggaaagttctaaagagaagaaaaaagacaaagatgacaaggaggatgaaaaagaaaaagatgctggcaactttgaccagaataagctggaagaagaaatgagaaagcgaaaagaaagagtagaaaaatggcgagaagagcaacgtaaaaaggctatggaaaacataggagaactgaaaaaggaaatcgaagagatgaaacaagggaaaaagtggagtttagaggacgatgatgatgacgaagatgatcctgcagaagctgaaaaggagggaaatgaaatggagggtgaggagttagatccattagatgcttacatggaagaagtgaaagaggaagtaaaaaaatttaacatgagaagtgtaaaaggtggtgggggaaatgaaaagaagtctgggccaacggtcacaaaagttgtcactgttgtgacaaccaaaaaagcagttgtggattctgataagaagaaaggtgagctgatggagaatgaccaggatgccatggagtattcttcagaggaggaagaagttgatcttcagacagcccttacagggtatcaaacaaaacagcgaaagcttctagaaccagttgatcatggaaaaattgagtatgagccatttaggaaaaacttctatgttgaagttccagaactagcaaaaatgtctcaagaagaggtaaatgtgtttcgattggaaatggagggcattacagttaaaggaaaaggttgccccaaaccaattaaatcctgggtccagtgtggaatttccatgaagatcttaaattccctcaagaagcatggctatgaaaagcccacgcccatccaaacccaagctattcctgctataatgtctggacgagatttgattggcattgccaaaacaggaagtggaaagaccattgcttttctgttgcccatgtttagacacatcatggatcagaggtcattagaggaaggagaggggccaatagctgtcatcatgactccaactcgagaactggctttacagattactaaagagtgtaagaagttttccaagactttgggacttagagtggtctgtgtttacggaggaacaggaatcagtgagcagattgctgagctgaaaagaggtgctgaaattattgtttgcacacctggtcgaatgattgacatgttagccgctaacagtggtcgggtcacaaatcttcgaagagtgacatatgttgttytagatgaagcagacagaatgtttgacatgggttttgaaccccaggtcatgcgcatcgtggataatgttcgtcctgatcgacagacggttatgttttcagctactttccccagagctatggaggctttggctcgcaggatcctcagtaaacctattgaagtacaagttggaggcaggagtgtggtttgctcagatgtggagcaacaagtgattgtgattgaagaagaaaagaaattcttgaagttacttgagcttctaggccattatcaagagtcaggatctgtcattatatttgtggataagcaggaacatgctgatggtcttcttaaggatttaatgagagcatcttatccttgcatgtctcttcatggaggcattgatcaatatgacagagatagcatcataaatgactttaagaatgggacctgcaaacttcttgtggctacctctgttgctgcccgaggtctagatgtgaaacatctgattcttgtagtaaattatagctgccccaaccattatgaggattatgtacacagagcagggcggactggaagagcaggaaacaagggttatgcttatacttttatcacagaggatcaagctcgctatgctggtgacataattaaagctcttgaattgtcagggactgcagtacctcctgatttagagaaactgtggagtgatttcaaagatcagcagaaagctgaggggaaaataattaaaaagagtagtgggttctctggtaagggattcaagtttgatgaaacagaacaagctttggctaatgagaggaagaagttacaaaaagcagctcttggtctacaagattcagatgatgaggatgctgcagttgatattgatgagcaaattgaaagcatgtttaattcaaagaagagagtaaaggatatggctgctcctggaacatcaagtgttcctgctccaactgcaggaaatgctgagaaattagaaattgctaagagattggctcttagaatcaatgcccagaagaatttgggcatcgagtctcaggatgtgatgcagcaggccaccaatgcaattcttaggggtggcaccattctggctcccactgtttctgcaaaaaccattgcagaacaacttgctgaaaagatcaatgccaagctcaattatgtgccgttagagaaacaagaagaagagagacaggatggtggacagaatgaatcttttaagagatatgaagaagaattagagatcaatgacttcccacaggcaagtaacaggtggaaagttacctctaaggaagctctgcagagaatcagtgaatactctgaagccgcaattacaatcagaggaacctacttccctcctggcaaagaacccaaggaaggcgagcggaagatttacttggcaattgaaagtgccaatgaactggctgtgcagaaagcaaaggcagaaatcaccaggctcataaaagaagagctgatccggctgcaaaattcataccaaccaacaaataaaggaagatacaaagtcttatagacatccggaaaaaagatttttacctgtgctggtctatgatgtatgtggcagttgctgtctgcagtttacaatgtattgtaaatgaagattttttaaattctatcttgctgattttttttaaatataagaaactggtacttggtaaagaaatctgtccgtaagtacccccacaatcagtcaaactatatttaaagccagcctgttttcagagtatgatgtcctttaatgtaaactcaaatatcaatattttaaatgtccggataatattctagaggtttaaaaaatggaaatatttgaactttctattgaagacaataaagtacacaagtcgttaaggggctattcactttatcctgtactttcaatgaaattgtgatcatttcctaagaaaaggtaaaattcactatcatattttgtgtccccaccttgatgttacatgactctggaacaatatgaactggatttaagaatgttataatagaagtcttacaaaatgggttgagagtttttgtttcaatttttatcatcataaatgggcaaaaagtagttggactaatttcggtttttatacaagtaaagatttaatagtataaggatttttttgcatttctttacactgagtgtaaaactctacaaagagttatagtatttactactttgaggtttccctcacaacttctggctccatacctagcccctcttttataatcttccttaaaagaaagagtgtagcctataaatactaaatatgataccttttccttctagaaagtgtttatttatatatctatacatgttgtatgtacaaatatcctactacttttaatctgatttttcttcaggattattgagtaggttgtgaattttctttcttaaaaattgtaaaacataatggtacccaagttttaaacttagatgtgcttcatcttagtgaaatttaattcacaaggaatcataaattgtgtttttgaggctgggcgcagtgactcacacctgtatcccagcaatttgggaggccgaggtgggcagatcacttg

SEQ ID NO: 756 - DNA, 4289 bp, Homo sapiens
ggccgcgctgggatggccgccacagctgtaggkgctgctagtgtttagcgctggtctttgccgggcgttgagggcagctcagcctccttgtttgtccggttcgcctgtgcgtggtactcaagggcaccagtattcccgcsgtcggcagcatgggtcgggagtcacgccactatcgaaaacgatcggcatcccggggtcgctctggaagtcggtctagaagtcgctcaccctcagacaaaagaagtaaacgtggagatgacagacggtctagaagtagagatagagataggaggagagagaggtctcgtagcagggataaaagaagatctcggtcaagggacaggaagcgtctgagacgttccagaagtagagagagagacagaagccgagagcgaagaagatctcgaagtagagacaggagacgctcaaggagtagaagccggggccggcgatcccgatcctccagtcctggaaataaaagcaagaaaactgagaatagatctaggtccaaagagaaaactgatggtggggaaagttctaaagagaagaaaaaagacaaagatgacaaggaggatgaaaaagaaaaagatgctggcaactttgaccagaataagctggaagaagaaatgagaaagcgaaaagaaagagtagaaaaatggcgagaagagcaacgtaaaaaggctatggaaaacataggagaactgaaaaaggaaatcgaagagatgaaacaagggaaaaagtggagtttagaggacgatgatgatgacgaagatgatcctgcagaagctgaaaaggagggaaatgaaatggagggtgaggagttagatccattagatgcttacatggaagaagtgaaagaggaagtaaaaaaatttaacatgagaagtgtaaaaggtggtgggggaaatgaaaagaagtctgggccaacggtcacaaaagttgtcactgttgtgacaaccaaaaaagcagttgtggattctgataagaagaaaggtgagctgatggagaatgaccaggatgccatggagtattcttcagaggaggaagaagttgatcttcagacagcccttacagggtatcaaacaaaacagcgaaagcttctagaaccagttgatcatggaaaaattgagtatgagccatttaggaaaaacttctatgttgaagttccagaactagcaaaaatgtctcaagaagaggtaaatgtgtttcgattggaaatggagggcattacagttaaaggaaaaggttgccccaaaccaattaaatcctgggtccagtgtggaatttccatgaagatcttaaattccctcaagaagcatggctatgaaaagcccacgcccatccaaacccaagctattcctgctataatgtctggacgagatttgattggcattgccaaaacaggaagtggaaagaccattgcttttctgttgcccatgtttagacacatcatggatcagaggtcattagaggaaggagaggggccaatagctgtcatcatgactccaactcgagaactggctttacagattactaaagagtgtaagaagttttccaagactttgggacttagagtggtctgtgtttacggaggaacaggaatcagtgagcagattgctgagctgaaaagaggtgctgaaattattgtttgcacacctggtcgaatgattgacatgttagccgctaacagtggtcgggtcacaaatcttcgaagagtgacatatgttgttytagatgaagcagacagaatgtttgacatgggttttgaaccccaggtcatgcgcatcgtggataatgttcgtcctgatcgacagacggttatgttttcagctactttccccagagctatggaggctttggctcgcaggatcctcagtaaacctattgaagtacaagttggaggcaggagtgtggtttgctcagatgtggagcaacaagtgattgtgattgaagaagaaaagaaattcttgaagttacttgagcttctaggccattatcaagagtcaggatctgtcattatatttgtggataagcaggaacatgctgatggtcttcttaaggatttaatgagagcatcttatccttgcatgtctcttcatggaggcattgatcaatatgacagagatagcatcataaatgactttaagaatgggacctgcaaacttcttgtggctacctctgttgctgcccgaggtctagatgtgaaacatctgattcttgtagtaaattatagctgccccaaccattatgaggattatgtacacagagcagggcggactggaagagcaggaaacaagggttatgcttatacttttatcacagaggatcaagctcgctatgctggtgacataattaaagctcttgaattgtcagggactgcagtacctcctgatttagagaaactgtggagtgatttcaaagatcagcagaaagctgaggggaaaataattaaaaagagtagtgggttctctggtaagggattcaagtttgatgaaacagaacaagctttggctaatgagaggaagaagttacaaaaagcagctcttggtctacaagattcagatgatgaggatgctgcagttgatattgatgagcaaattgaaagcatgtttaattcaaagaagagagtaaaggatatggctgctcctggaacatcaagtgttcctgctccaactgcaggaaatgctgagaaattagaaattgctaagagattggctcttagaatcaatgcccagaagaatttgggcatcgagtctcaggtattaagatgtgatgcagcaggccaccaatgcaattcttaggggtggcaccattctggctcccactgtttctgcaaaaaccattgcagaacaacttgctgaaaagatcaatgccaagctcaattatgtgccgttagagaaacaagaagaagagagacaggatggtggacagaatgaatcttttaagagatatgaagaagaattagagatcaatgacttcccacagactgctaggtggaaagttacctctaaggaagctctgcagagaatcagtgaatactctgaagccgcaattacaatcagaggaacctacttccctcctggcaaagaacccaaggaaggcgagcggaagatttacttggcaattgaaagtgccaatgaactggctgtgcagaaagcaaaggcagaaatcaccaggctcataaaagaagagctgatccggctgcaaaattcataccaaccaacaaataaaggaagatacaaagtcttatagacatccggaaaaaagatttttacctgtgctggtctatgatgtatgtggcagttgctgtctgcagtttacaatgtattgtaaatgaagattttttaaattctatcttgctgattttttttaaatataagaaactggtacttggtaaagaaatctgtccgtaagtacccccacaatcagtcaaactatatttaaagccagcctgttttcagagtatgatgtcctttaatgtaaactcaaatatcaatattttaaatgtccggataatattctagaggtttaaaaaatggaaatatttgaactttctattgaagacaataaagtacacaagtcgttaaggggctattcactttatcctgtactttcaatgaaattgtgatcatttcctaagaaaaggtaaaattcactatcatattttgtgtccccaccttgatgttacatgactctggaacaatatgaactggatttaagaatgttataatagaagtcttacaaaatgggttgagagtttttgtttcaatttttatcatcataaatgggcaaaaagtagttggactaatttcggtttttatacaagtaaagatttaatagtataaggatttttttgcatttctttacactgagtgtaaaactctacaaagagttatagtatttactactttgaggtttccctcacaacttctggctccatacctagcccctcttttataatcttccttaaaagaaagagtgtagcctataaatactaaatatgataccttttccttctagaaagtgtttatttatatatctatacatgttgtatgtacaaatatcctactacttttaatctgatttttcttcaggattattgagtaggttgtgaattttctttcttaaaaattgtaaaacataatggtacccaagttttaaacttagatgtgcttcatcttagtgaaatttaattcacaaggaatcataaattgtgtttttgaggctgggcgcagtgactcacacctgtatcccagcaatttgggaggccgaggtgggcagatcacttg

SEQ ID NO: 757 - DNA, 849 bp, Homo sapiens
atgcttcatactcacactccagcaaagcaagatgaaaaagtgatcatggctgtcggacagaaaagaaaaggagtggaacatggtccagctgccagaagaaaaattggattgatgaaaagggtctccaatttgggctgctgcctgaaagactttgaaaagtttagttttactccagtccccacagatgagctcttcaacaaccctacagtgaatctgtgctcagtggcccagccaaccagcaactggctgagttggttagcagagcagtgttgtctggctacagctgcgtcacgcatacatgatggctgcaaaggctttaagatccgagatacaactaagatgaagagtttaaggaaggtggtcacagccagtgttatactgggccgagcagttgccactgagtctctacttgtgaaaggtttgctaaarcccacgtgcagatacctaaaagttcartataatgagtttctagctgctatgtatgtaatcaacttactaacttgttatatctttaacaaaattgcagttgaggcttcgtcagattccaaagatacgtcatttatcacagaacttcaccctgaggacctcctcgaggtccagcagggttttaaatattctgatagtttatttcagaaacttcattttaagcagcaggccacagaagaaagaaatcttaatacttttgcagcagtgccacgaaagatggccaactatgggaaacactgttgggagttaagagaaagtgagcgatgtaagaaagggatggcttttcactcctccaaaaggaatctgtgggaaggattgctgtactttggcccagactggggcgaccaggtgaagacaaccttg

SEQ ID NO: 758 - DNA, 7829 bp, Homo sapiens
tgaggaatcaacagccgccatcttgtcgcggacccgaccggggcttcgagcgcgatctactcggccccgccggtcccgggccccacaaccgcccgccgctcgctcctctccctcgcagccggcagggcccccgacccccgtccgggccctcgccggcccggccgcccgtgcccggggctgttttcgcgagcaggtgaaaatggctgagaacttgctggacggaccgcccaaccccaaaagagccaaactcagctcgcccggtttctcggcgaatgacagcacagrttttggatcattgtttgacttggaaaatgatcttcctgatgagctgatacccaatggaggagaattaggccttttaaacagtgggaaccttgttccagatgctgcttccaaacataaacaactgtcggagcttctacgaggaggcagcggctctagtatcaacccaggaataggaaatgtgagcgccagcagccccgtgcagcagggcctgggtggccaggctcaagggcagccgaacagtgctaacatggccagcctcagtgccatgggcaagagccctctgagccagggagattcttcagcccccagcctgcctaaayaggcagccagcacctctgggcccacccccgctgcctcccaagcactgaatccrcaagcacaaaagcaagtggggctggcgactagcagccctgccacgtcacagactggacctggtatctgcatgaatgctaactttaaccagacccacccaggcctcctcaatagtaactctggccatagcttaattaatcaggcttcacaagggcaggcgcaagtcatgaatggatctcttggggctgctggcagaggaaggggagctggaatgccgtaccctactccagccatgcagggcgcctcgagcagcgtgctggctgagaccctaacgcaggtttccccgcaaatgactggtcacgcgggactgaacaccgcacaggcaggaggcatggccaagatgggaataactgggaacacaagtccatttggacagccctttagtcaagctggagggcagccaatgggagccactggagtgaacccccagttagccagcaaacagagcatggtcaacagtttgcccaccttccctacagayatcaagaatacttcagtcaccaacgtgccaaatatgtctcagatgcaaacatcagtgggaattgtacccacacaagcaattgcaacaggccccactgcagatcctgaaaaacgcaaactgatacagcagyagctggttctactgcttcatgctcataagtgtcagagaygagagcaagcaaacggagaggttcgggcctgctcgctcccgcattgtcgaaccatgaaaaacgttttgaatcacatgacgcattgtcaggctgggaaagcctgccaagttgcccattgtgcatcttcaygacaaatcatctctcattggaagaactgcacacgacatgactgtcctgtttgcctccctttgaaaaatgccagtgacaagcgaaaccaacaaaccatcctggggtctccagctagtggaattcaaaacacaattggttctgttggcacagggcaacagaatgccacttctttaagtaacccaaatcccatagaccccagctccatgcagcgagcctatgctgctctcggactcccctacatgaaccagccccagacgcagctgcagcctcaggttcctggccagcaaccagcacagcctcaaacccaccagcagatgaggactctcaaccccctgggaaataatccaatgaacattccagcaggaggaataacaacagatcagcagcccccaaacttgatttcagaatcagctcttccgacttccctgggggccacaaacccactgatgaacgatggctccaactctggtaacattggaaccctcagcactataccaacagcagctcctccttctagcaccggtgtaaggaaaggctggcacgaacatgtcactcaggacctgcggagccatctagtgcataaactcgtccaagccatcttcccaacacctgatcccgcagctctaaaggatcgccgcatggaaaacctggtagcctatgctaagaaagtggaaggggacatgtacgagtctgccaacagcagggatgaatattaycacttattagcagagaaaatctacaagatacaaaaagaactagaagaaaaacggaggtcgcgtttacataaacaaggcatcttggggaaccagccagccttaccagccccgggggctcagccccctgtgattccacaggcacaacctgtgagacctccaaatggacccctgtccctgccagtgaatcgcatgcaagtttctcaagggatgaattcatttaaccccatgtccttggggaacgtccagttgccacaagcacccatgggacctcgtgcagcctccccaatgaaccactctgtccagatgaacagcatgggctcagtgccagggatggccatttctccttcccgaatgcctcagcctccgaacatgatgggtgcacacaccaacaacatgatggcccaggcgcccgctcagagccagtttctgccacagaaccagttcccgtcatccagcggggcgatgagtgtgggcatggggcagccgccagcccaaacaggcgtgtcacagggacaggtgcctggtgctgctcttcctaaccctctcaacatgctggggcctcaggccagccagctaccttgccctccagtgacacagtcaccactgcacccaacaccgcctcctgcttccacggctgctggcatgccatctctccagcacacgacaccacctgggatgactcctccccagccagcagctcccactcagccatcaactcctgtgtcgtcttccgggcagactcccaccccgactcctggctcagtgcccagtgctacccaaacccagagcacccctacagtccaggcagcagcccaggcccaggtgaccccrcagcctcaaaccccagttcagcccccgtctgtggctacccctcagtcatcgcagcaacagccgacgcctgtgcacgcccagcctcctggcacaccgctttcccaggcagcagccagcattgataacagagtccctaccccctcctcggtggccagcrcagaaaccaattcccagcagccaggacctgacrtacctgtgctggaaatgaagacggagacscaagcagaggacactgagcccgatcctggtgaatccaaaggggagcccaggtctgagatgatggaggaggatttgcaaggagcttcccaagttaaagaagaaacagacatagcagagcagaaatyagaaccaatggaagtggatgaaaagaaacctgaagtgaaagtagaagttaaagaggaagaagagagtagcagtaacggcacagcctctcagtcaacatctccttcgcagccgcgcaaaaaaatctttaaaccagaggagttacgccaggccctcatgccaaccctagaagcactgtatcgacaggacccagagtcattacctttccggcagcctgtagatccccagctcctcggaattccagactattttgacatcgtaaagaatcccatggacctctccaccatcaagcggaagctggacacagggcaataccaagagccctggcagtacgtggacgacgtctggctcatgttcaacaatgcctggctctataatcgcaagacatcccgagtctrtaagttttgcagtaagcttgcagaggtctttgagcaggaaattgaccctgtcatgcagtcccttggatattgctgtggacgcaagtatgagttttccccacagactttgtgctgctatgggaagcagctgtgtaccattcctcgcgatgctgcctactacagctatcagaataggtatcatttctgtgagaagtgtttcacagagatccagggcgagaatgtgaccctgggtgacgacccttcacagccccagacgacaatttcaaaggatcagtttgaaaagaagaaaaatgataccttagaccccgaacctttcgttgattgcaaggagtgtggccggaagatgcatcagatttgcgttctgcactatgacathatttggccttcaggttttgtgtgcgacaactgcttgaagaaaactggcagacctcgaaaagaaaacaaattcagtgctaagaggctgcagaccacaagactgggaaaccacttggaagaccgagtgaacaaatttttgcggcgccagaatcaccctgaagccggggaggtttttgtccgagtggtggccagctcagacaagacggtggaggtcaagccygggatgaagtcacsgtttgtggattctggggaaatgtctgaatctttcccatatcgaaccaaagctctgtttgcttttgaggaaattgacggcgtggatgtctgcttttttggaatgcacrtccaagaatayggctctgattgyccccctccaaacacgaggcgtgtgtacatttcttatctggatagtattcatttcttccggccacgttgcctccgcacagccgtttaccatgagatccttattggatatttagagtatgtgaagaaattrgggtawgtgacagggcacatctgggcctgtcctccaagtgaaggagatgattacatcttccattgccacccacctgatcaaaaaatacccaagccaaaaygactgcaggagtggtacaaaaagatgctggacaaggcgtttgcagagcggatcatccatgactacaaggatattttcaaacaagcaactgaagacaggctcaccagtgccaaggaactgccctattttgaaggtgatttctggcccaatgtgttagaagagagcattaaggaactagaayaagaagaagaggagaggaaaaaggaagagagcactgcagccagtgaaaccactgagggcagtcagggcgacagcaagaatgccaagaagaagaacaacaagaaaaccaacaagaacaaaagcagcatcagccgcgccaacaagaagaagcccagcatgcccaacgtgtccaatgacctgtcccagaagctgtatgccaccatggagaagcacaaggaggtcttcttcgtgatccacctgcacgctgggcctgtcatcaacaccctgccccccatcgtcgaccccgaccccctgctcagctgtgacctcatggatgggcrcgacgccttcctcaccctcgccagagacaagcactgggagttctcctccttgcgccgctcyaagtggwccacgctctgcatgctggtggagctgcacacccagggccaggaccgctttgtctacacctgcaacgagtgcaagcaccacgtggagacgcgctggcactgcactgtgtgcgaggactacgacctctgcatcaactgctataacacgaagagccatgcccataagatggtgaagtgggggctgggcctggatgacgagggcagcagccagggcgagccacagtcaaagagcccccaggagtcacgccggctgagcatccagcgctgcatccagtcgctggtgcacgcgtgccagtgccgcaacgccaactgctcgctgccatcctgccagaagatgaagcgggtggtgcagcacaccaagggctgcaaacgcaagacsaacgggggctgcccggtgtgcaagcagctcatcgccctctgctgctaccacgccaagcactgccaagaaaacaaatgccccgtgcccttctgcctcaacatcaaacacaagctccgccagcagcagatccagcaccgcctgcagcaggcccagctcatgcgccggcggatggccaccatgaacacccgcaacgtgcctcagcagagtctgccttctcctacctcagcaccgcccgggacccccacacagcagcccagcacaccccagacgccgcagccccctgcccagccccaaccctcacccgtgagcatgtcaccagctggcttccccagcgtggcccggactcagccccccaccacggtgtccacagggaagcctaccagccaggtgccggcccccccacccccggcccagccccctcctgcagcggtggaagcggctcggcagatcgagcgtgaggcccagcagcagcagcacctgtaccgggtgaacatcarcaacagcatgcccccaggacgcacgggcatggggaccccggggagccagatggcccccgtgagcctgaatgtgccccgacccaaccaggtgagcgggcccgtcatgcccagcatgcctcccgggcagtggcagcaggcgccccttccccagcagcagcccatgccaggcttgcccaggcctgtgatatccatgyaggcccaggcggccgtggctgggccccggatgcccagcgtgcagccacccaggagcatctcacccagcgctctgcaagacctgctgcggaccctgaagtcgcccagctcccctcagcagcaacagcaggtgctgaacattctcaaatcaaacccgcagctaatggcagctttcatcaaacagcgcacagccaagtacgtggccaatcagcccggcatgcagccccagcctggcctccagtcccagcccggcatgcaaccccagcctggcatgcaccagcagcccagcctgcagaacctgaatgccatgcaggctggcgtgccgcggcccggtgtgcctccacagcagcaggcgatgggaggcctgaacccccagggccaggccttgaacatcatgaacccaggacacaaccccaacatggcgagtatgaatccacagtaccgagaaatgttacggaggcagctgctgcagcagcagcagcarcagcagcagcaacaacagcagcaacagcagcagcagcaagggagtgccggcmtggctgggggcatggcggggcacggccagttccagcagcctcaaggaccyggaggctacccaccggycatgcagcagcagcagcgcatgcagcagcatctccccctccagggcagctccatgggccagatggcggctcagatgggacagcttggccagatggggcagccggggctgggggcagacagcacccccaacatccagcaagccctgcagcagcggattctgcagcaacagcagatgaagcagcagattgggtccccaggccagccgaaccccatgagcccccagcaacacatgctctcaggacagccacaggcctcgcatctccctggccagcagatcgccacgtcccttagtaaccaggtgcggtctccagcccctgtccagtctccacggccccagtcccagcctccacattccagcccgtcaccacggatacagccccagccttcgccacaccacgtctcaccccagactggttccccccaccccggactcgcagtcaccatggccagctccatagatcagggacacttggggaaccccgarcagagtgcaatgctcccccagctgaacacccccagcaggagtgcgctgtccagcgaactgtccctggtcggggacaccacgggggacacgctagagaagtttgtggagggcttgtagcattgtgagagcatcacctttycccyttcatgttcttggaccttttgtactgaaaatccaggcatctaggttctttttattcctagatggaactgcgacttccgagccatggaagggtggattgatgtttaaagaaacaatacaaagaatatatttttttgttaaaaaccagttgatttaaatatctggtctctctctttggtttttttttggcgggggggtggggggggttctttttttaataatattcagaactgattcctgaaataatgcaagcttataatgtatcccgataactttg

SEQ ID NO: 759 - DNA, 7424 bp, Homo sapiens
tgaggaatcaacagccgccatcttgtcgcggacccgaccggggcttcgagcgcgatctactcggccccgccggtcccgggccccacaaccgcccgccgctcgctcctctccctcgcagccggcagggcccccgacccccgtccgggccctcgccggcccggccgcccgtgcccggggctgttttcgcgagcaggtgaaaatggctgagaacttgctggacggaccgcccaaccccaaaagagccaaactcagctcgcccggtttctcggcgaatgacagcacagrttttggatcattgtttgacttggaaaatgatcttcctgatgagctgatacccaatggaggagaattaggccttttaaacagtgggaaccttgttccagatgctgcttccaaacataaacaactgtcggagcttctacgaggaggcagcggctctagtatcaacccaggaataggaaatgtgagcgccagcagccccgtgcagcagggcctgggtggccaggctcaagggcagccgaacagtgctaacatggccagcctcagtgccatgggcaagagccctctgagccagggagattcttcagcccccagcctgcctaaayaggcagccagcacctctgggcccacccccgctgcctcccaagcactgaatccrcaagcacaaaagcaagtggggctggcgactagcagccctgccacgtcacagactggacctggtatctgcatgaatgctaactttaaccagacccacccaggcctcctcaatagtaactctggccatagcttaattaatcaggcttcacaagggcaggcgcaagtcatgaatggatctcttggggctgctggcagaggaaggggagctggaatgccgtaccctactccagccatgcagggcgcctcgagcagcgtgctggctgagaccctaacgcaggtttccccgcaaatgactggtcacgcgggactgaacaccgcacaggcaggaggcatggccaagatgggaataactgggaacacaagtccatttggacagccctttagtcaagctggagggcagccaatgggagccactggagtgaacccccagttagccagcaaacagagcatggtcaacagtttgcccaccttccctacagayatcaagaatacttcagtcaccaacgtgccaaatatgtctcagatgcaaacatcagtgggaattgtacccacacaagcaattgcaacaggccccactgcagatcctgaaaaacgcaaactgatacagcagyagctggttctactgcttcatgctcataagtgtcagagaygagagcaagcaaacggagaggttcgggcctgctcgctcccgcattgtcgaaccatgaaaaacgttttgaatcacatgacgcattgtcaggctgggaaagcctgccaagttgcccattgtgcatcttcaygacaaatcatctctcattggaagaactgcacacgacatgactgtcctgtttgcctccctttgaaaaatgccagtgacaagcgaaaccaacaaaccatcctggggtctccagctagtggaattcaaaacacaattggttctgttggcacagggcaacagaatgccacttctttaagtaacccaaatcccatagaccccagctccatgcagcgagcctatgctgctctcggactcccctacatgaaccagccccagacgcagctgcagcctcaggttcctggccagcaaccagcacagcctcaaacccaccagcagatgaggactctcaaccccctgggaaataatccaatgaacattccagcaggaggaataacaacagatcagcagcccccaaacttgatttcagaatcagctcttccgacttccctgggggccacaaacccactgatgaacgatggctccaactctggtaacattggaaccctcagcactataccaacagcagctcctccttctagcaccggtgtaaggaaaggctggcacgaacatgtcactcaggacctgcggagccatctagtgcataaactcgtccaagccatcttcccaacacctgatcccgcagctctaaaggatcgccgcatggaaaacctggtagcctatgctaagaaagtggaaggggacatgtacgagtctgccaacagcagggatgaatattaycacttattagcagagaaaatctacaagatacaaaaagaactagaagaaaaacggaggtcgcgtttacataaacaaggcatcttggggaaccagccagccttaccagccccgggggctcagccccctgtgattccacaggcacaacctgtgagacctccaaatggacccctgtccctgccagtgaatcgcatgcaagtttctcaagggatgaattcatttaaccccatgtccttggggaacgtccagttgccacaagcacccatgggacctcgtgcagcctccccaatgaaccactctgtccagatgaacagcatgggctcagtgccagggatggccatttctccttcccgaatgcctcagcctccgaacatgatgggtgcacacaccaacaacatgatggcccaggcgcccgctcagagccagtttctgccacagaaccagttcccgtcatccagcggggcgatgagtgtgggcatggggcagccgccagcccaaacaggcgtgtcacagggacaggtgcctggtgctgctcttcctaaccctctcaacatgctggggcctcaggccagccagctaccttgccctccagtgacacagtcaccactgcacccaacaccgcctcctgcttccacggctgctggcatgccatctctccagcacacgacaccacctgggatgactcctccccagccagcagctcccactcagccatcaactcctgtgtcgtcttccgggcagactcccaccccgactcctggctcagtgcccagtgctacccaaacccagagcacccctacagtccaggcagcagcccaggcccaggtgaccccrcagcctcaaaccccagttcagcccccgtctgtggctacccctcagtcatcgcagcaacagccgacgcctgtgcacgcccagcctcctggcacaccgctttcccaggcagcagccagcattgataacagagtccctaccccctcctcggtggccagcrcagaaaccaattcccagcagccaggacctgacrtacctgtgctggaaatgaagacggagacscaagcagaggacactgagcccgatcctggtgaatccaaaggggagcccaggtctgagatgatggaggaggatttgcaaggagcttcccaagttaaagaagaaacagacatagcagagcagaaatyagaaccaatggaagtggatgaaaagaaacctgaagtgaaagtagaagttaaagaggaagaagagagtagcagtaacggcacagcctctcagtcaacatctccttcgcagccgcgcaaaaaaatctttaaaccagaggagttacgccaggccctcatgccaaccctagaagcactgtatcgacaggacccagagtcattacctttccggcagcctgtagatccccagctcctcggaattccagactattttgacatcgtaaagaatcccatggacctctccaccatcaagcggaagctggacacagggcaataccaagagccctggcagtacgtggacgacgtctggctcatgttcaacaatgcctggctctataatcgcaagacatcccgagtctrtaagttttgcagtaagcttgcagaggatcagtttgaaaagaagaaaaatgataccttagaccccgaacctttcgttgattgcaaggagtgtggccggaagatgcatcagatttgcgttctgcactatgacathatttggccttcaggttttgtgtgcgacaactgcttgaagaaaactggcagacctcgaaaagaaaacaaattcagtgctaagaggctgcagaccacaagactgggaaaccacttggaagaccgagtgaacaaatttttgcggcgccagaatcaccctgaagccggggaggtttttgtccgagtggtggccagctcagacaagacggtggaggtcaagccygggatgaagtcacsgtttgtggattctggggaaatgtctgaatctttcccatatcgaaccaaagctctgtttgcttttgaggaaattgacggcgtggatgtctgcttttttggaatgcacrtccaagaatayggctctgattgyccccctccaaacacgaggcgtgtgtacatttcttatctggatagtattcatttcttccggccacgttgcctccgcacagccgtttaccatgagatccttattggatatttagagtatgtgaagaaattrgggtawgtgacagggcacatctgggcctgtcctccaagtgaaggagatgattacatcttccattgccacccacctgatcaaaaaatacccaagccaaaaygactgcaggagtggtacaaaaagatgctggacaaggcgtttgcagagcggatcatccatgactacaaggatattttcaaacaagcaactgaagacaggctcaccagtgccaaggaactgccctattttgaaggtgatttctggcccaatgtgttagaagagagcattaaggaactagaayaagaagaagaggagaggaaaaaggaagagagcactgcagccagtgaaaccactgaggtcttcttcgtgatccacctgcacgctgggcctgtcatcaacaccctgccccccatcgtcgaccccgaccccctgctcagctgtgacctcatggatgggcrcgacgccttcctcaccctcgccagagacaagcactgggagttctcctccttgcgccgctcyaagtggwccacgctctgcatgctggtggagctgcacacccagggccaggaccgctttgtctacacctgcaacgagtgcaagcaccacgtggagacgcgctggcactgcactgtgtgcgaggactacgacctctgcatcaactgctataacacgaagagccatgcccataagatggtgaagtgggggctgggcctggatgacgagggcagcagccagggcgagccacagtcaaagagcccccaggagtcacgccggctgagcatccagcgctgcatccagtcgctggtgcacgcgtgccagtgccgcaacgccaactgctcgctgccatcctgccagaagatgaagcgggtggtgcagcacaccaagggctgcaaacgcaagacsaacgggggctgcccggtgtgcaagcagctcatcgccctctgctgctaccacgccaagcactgccaagaaaacaaatgccccgtgcccttctgcctcaacatcaaacacaagctccgccagcagcagatccagcaccgcctgcagcaggcccagctcatgcgccggcggatggccaccatgaacacccgcaacgtgcctcagcagagtctgccttctcctacctcagcaccgcccgggacccccacacagcagcccagcacaccccagacgccgcagccccctgcccagccccaaccctcacccgtgagcatgtcaccagctggcttccccagcgtggcccggactcagccccccaccacggtgtccacagggaagcctaccagccaggtgccggcccccccacccccggcccagccccctcctgcagcggtggaagcggctcggcagatcgagcgtgaggcccagcagcagcagcacctgtaccgggtgaacatcarcaacagcatgcccccaggacgcacgggcatggggaccccggggagccagatggcccccgtgagcctgaatgtgccccgacccaaccaggtgagcgggcccgtcatgcccagcatgcctcccgggcagtggcagcaggcgccccttccccagcagcagcccatgccaggcttgcccaggcctgtgatatccatgyaggcccaggcggccgtggctgggccccggatgcccagcgtgcagccacccaggagcatctcacccagcgctctgcaagacctgctgcggaccctgaagtcgcccagctcccctcagcagcaacagcaggtgctgaacattctcaaatcaaacccgcagctaatggcagctttcatcaaacagcgcacagccaagtacgtggccaatcagcccggcatgcagccccagcctggcctccagtcccagcccggcatgcaaccccagcctggcatgcaccagcagcccagcctgcagaacctgaatgccatgcaggctggcgtgccgcggcccggtgtgcctccacagcagcaggcgatgggaggcctgaacccccagggccaggccttgaacatcatgaacccaggacacaaccccaacatggcgagtatgaatccacagtaccgagaaatgttacggaggcagctgctgcagcagcagcagcarcagcagcagcaacaacagcagcaacagcagcagcagcaagggagtgccggcmtggctgggggcatggcggggcacggccagttccagcagcctcaaggaccyggaggctacccaccggycatgcagcagcagcagcgcatgcagcagcatctccccctccagggcagctccatgggccagatggcggctcagatgggacagcttggccagatggggcagccggggctgggggcagacagcacccccaacatccagcaagccctgcagcagcggattctgcagcaacagcagatgaagcagcagattgggtccccaggccagccgaaccccatgagcccccagcaacacatgctctcaggacagccacaggcctcgcatctccctggccagcagatcgccacgtcccttagtaaccaggtgcggtctccagcccctgtccagtctccacggccccagtcccagcctccacattccagcccgtcaccacggatacagccccagccttcgccacaccacgtctcaccccagactggttccccccaccccggactcgcagtcaccatggccagctccatagatcagggacacttggggaaccccgarcagagtgcaatgctcccccagctgaacacccccagcaggagtgcgctgtccagcgaactgtccctggtcggggacaccacgggggacacgctagagaagtttgtggagggcttgtagcattgtgagagcatcacctttycccyttcatgttcttggaccttttgtactgaaaatccaggcatctaggttctttttattcctagatggaactgcgacttccgagccatggaagggtggattgatgtttaaagaaacaatacaaagaatatatttttttgttaaaaaccagttgatttaaatatctggtctctctctttggtttttttttggcgggggggtggggggggttctttttttaataatattcagaactgattcctgaaataatgcaagcttataatgtatcccgataactttg

SEQ ID NO: 760 - DNA, 9427 bp, Homo sapiens
tgaggaatcaacagccgccatcttgtcgcggacccgaccggggcttcgagcgcgatctactcggccccgccggtcccgggccccacaaccgcccgccgctcgctcctctccctcgcagccggcagggcccccgacccccgtccgggccctcgccggcccggccgcccgtgcccggggctgttttcgcgagcaggtgaaaatggctgagaacttgctggacggaccgcccaaccccaaaagagccaaactcagctcgcccggtttctcggcgaatgacagcacagrttttggatcattgtttgacttggaaaatgatcttcctgatgagctgatacccaatggaggagaattaggccttttaaacagtgggaaccttgttccagatgctgcttccaaacataaacaactgtcggagcttctacgaggaggcagcggctctagtatcaacccaggaataggaaatgtgagcgccagcagccccgtgcagcagggcctgggtggccaggctcaagggcagccgaacagtgctaacatggccagcctcagtgccatgggcaagagccctctgagccagggagattcttcagcccccagcctgcctaaayaggcagccagcacctctgggcccacccccgctgcctcccaagcactgaatccrcaagcacaaaagcaagtggggctggcgactagcagccctgccacgtcacagactggacctggtatctgcatgaatgctaactttaaccagacccacccaggcctcctcaatagtaactctggccatagcttaattaatcaggcttcacaagggcaggcgcaagtcatgaatggatctcttggggctgctggcagaggaaggggagctggaatgccgtaccctactccagccatgcagggcgcctcgagcagcgtgctggctgagaccctaacgcaggtttccccgcaaatgactggtcacgcgggactgaacaccgcacaggcaggaggcatggccaagatgggaataactgggaacacaagtccatttggacagccctttagtcaagctggagggcagccaatgggagccactggagtgaacccccagttagccagcaaacagagcatggtcaacagtttgcccaccttccctacagayatcaagaatacttcagtcaccaacgtgccaaatatgtctcagatgcaaacatcagtgggaattgtacccacacaagcaattgcaacaggccccactgcagatcctgaaaaacgcaaactgatacagcagyagctggttctactgcttcatgctcataagtgtcagagaygagagcaagcaaacggagaggttcgggcctgctcgctcccgcattgtcgaaccatgaaaaacgttttgaatcacatgacgcattgtcaggctgggaaagcctgccaagttgcccattgtgcatcttcaygacaaatcatctctcattggaagaactgcacacgacatgactgtcctgtttgcctccctttgaaaaatgccagtgacaagcgaaaccaacaaaccatcctggggtctccagctagtggaattcaaaacacaattggttctgttggcacagggcaacagaatgccacttctttaagtaacccaaatcccatagaccccagctccatgcagcgagcctatgctgctctcggactcccctacatgaaccagccccagacgcagctgcagcctcaggttcctggccagcaaccagcacagcctcaaacccaccagcagatgaggactctcaaccccctgggaaataatccaatgaacattccagcaggaggaataacaacagatcagcagcccccaaacttgatttcagaatcagctcttccgacttccctgggggccacaaacccactgatgaacgatggctccaactctggtaacattggaaccctcagcactataccaacagcagctcctccttctagcaccggtgtaaggaaaggctggcacgaacatgtcactcaggacctgcggagccatctagtgcataaactcgtccaagccatcttcccaacacctgatcccgcagctctaaaggatcgccgcatggaaaacctggtagcctatgctaagaaagtggaaggggacatgtacgagtctgccaacagcagggatgaatattaycacttattagcagagaaaatctacaagatacaaaaagaactagaagaaaaacggaggtcgcgtttacataaacaaggcatcttggggaaccagccagccttaccagccccgggggctcagccccctgtgattccacaggcacaacctgtgagacctccaaatggacccctgtccctgccagtgaatcgcatgcaagtttctcaagggatgaattcatttaaccccatgtccttggggaacgtccagttgccacaagcacccatgggacctcgtgcagcctccccaatgaaccactctgtccagatgaacagcatgggctcagtgccagggatggccatttctccttcccgaatgcctcagcctccgaacatgatgggtgcacacaccaacaacatgatggcccaggcgcccgctcagagccagtttctgccacagaaccagttcccgtcatccagcggggcgatgagtgtgggcatggggcagccgccagcccaaacaggcgtgtcacagggacaggtgcctggtgctgctcttcctaaccctctcaacatgctggggcctcaggccagccagctaccttgccctccagtgacacagtcaccactgcacccaacaccgcctcctgcttccacggctgctggcatgccatctctccagcacacgacaccacctgggatgactcctccccagccagcagctcccactcagccatcaactcctgtgtcgtcttccgggcagactcccaccccgactcctggctcagtgcccagtgctacccaaacccagagcacccctacagtccaggcagcagcccaggcccaggtgaccccrcagcctcaaaccccagttcagcccccgtctgtggctacccctcagtcatcgcagcaacagccgacgcctgtgcacgcccagcctcctggcacaccgctttcccaggcagcagccagcattgataacagagtccctaccccctcctcggtggccagcrcagaaaccaattcccagcagccaggacctgacrtacctgtgctggaaatgaagacggagacscaagcagaggacactgagcccgatcctggtgaatccaaaggggagcccaggtctgagatgatggaggaggatttgcaaggagcttcccaagttaaagaagaaacagacatagcagagcagaaatyagaaccaatggaagtggatgaaaagaaacctgaagtgaaagtagaagttaaagaggaagaagagagtagcagtaacggcacagcctctcagtcaacatctccttcgcagccgcgcaaaaaaatctttaaaccagaggagttacgccaggccctcatgccaaccctagaagcactgtatcgacaggacccagagtcattacctttccggcagcctgtagatccccagctcctcggaattccagactattttgacatcgtaaagaatcccatggacctctccaccatcaagcggaagctggacacagggcaataccaagagccctggcagtacgtggacgacgtctggctcatgttcaacaatgcctggctctataatcgcaagacatcccgagtctrtaagttttgcagtaagcttgcagaggtctttgagcaggaaattgaccctgtcatgcagtcccttggatattgctgtggacgcaagtatgagttttccccacagactttgtgctgctatgggaagcagctgtgtaccattcctcgcgatgctgcctactacagctatcagaataggtatcatttctgtgagaagtgtttcacagagatccagggcgagaatgtgaccctgggtgacgacccttcacagccccagacgacaatttcaaaggatcagtttgaaaagaagaaaaatgataccttagaccccgaacctttcgttgattgcaaggagtgtggccggaagatgcatcagatttgcgttctgcactatgacathatttggccttcaggttttgtgtgcgacaactgcttgaagaaaactggcagacctcgaaaagaaaacaaattcagtgctaagaggctgcagaccacaagactgggaaaccacttggaagaccgagtgaacaaatttttgcggcgccagaatcaccctgaagccggggaggtttttgtccgagtggtggccagctcagacaagacggtggaggtcaagccygggatgaagtcacsgtttgtggattctggggaaatgtctgaatctttcccatatcgaaccaaagctctgtttgcttttgaggaaattgacggcgtggatgtctgcttttttggaatgcacrtccaagaatayggctctgattgyccccctccaaacacgaggcgtgtgtacatttcttatctggatagtattcatttcttccggccacgttgcctccgcacagccgtttaccatgagatccttattggatatttagagtatgtgaagaaattrgggtawgtgacagggcacatctgggcctgtcctccaagtgaaggagatgattacatcttccattgccacccacctgatcaaaaaatacccaagccaaaaygactgcaggagtggtacaaaaagatgctggacaaggcgtttgcagagcggatcatccatgactacaaggatattttcaaacaagcaactgaagacaggctcaccagtgccaaggaactgccctattttgaaggtgatttctggcccaatgtgttagaagagagcattaaggaactagaayaagaagaagaggagaggaaaaaggaagagagcactgcagccagtgaaaccactgagggcagtcagggcgacagcaagaatgccaagaagaagaacaacaagaaaaccaacaagaacaaaagcagcatcagccgcgccaacaagaagaagcccagcatgcccaacgtgtccaatgacctgtcccagaagctgtatgccaccatggagaagcacaaggaggtcttcttcgtgatccacctgcacgctgggcctgtcatcaacaccctgccccccatcgtcgaccccgaccccctgctcagctgtgacctcatggatgggcrcgacgccttcctcaccctcgccagagacaagcactgggagttctcctccttgcgccgctcyaagtggwccacgctctgcatgctggtggagctgcacacccagggccaggaccgctttgtctacacctgcaacgagtgcaagcaccacgtggagacgcgctggcactgcactgtgtgcgaggactacgacctctgcatcaactgctataacacgaagagccatgcccataagatggtgaagtgggggctgggcctggatgacgagggcagcagccagggcgagccacagtcaaagagcccccaggagtcacgccggctgagcatccagcgctgcatccagtcgctggtgcacgcgtgccagtgccgcaacgccaactgctcgctgccatcctgccagaagatgaagcgggtggtgcagcacaccaagggctgcaaacgcaagacsaacgggggctgcccggtgtgcaagcagctcatcgccctctgctgctaccacgccaagcactgccaagaaaacaaatgccccgtgcccttctgcctcaacatcaaacacaagctccgccagcagcagatccagcaccgcctgcagcaggcccagctcatgcgccggcggatggccaccatgaacacccgcaacgtgcctcagcagagtctgccttctcctacctcagcaccgcccgggacccccacacagcagcccagcacaccccagacgccgcagccccctgcccagccccaaccctcacccgtgagcatgtcaccagctggcttccccagcgtggcccggactcagccccccaccacggtgtccacagggaagcctaccagccaggtgccggcccccccacccccggcccagccccctcctgcagcggtggaagcggctcggcagatcgagcgtgaggcccagcagcagcagcacctgtaccgggtgaacatcarcaacagcatgcccccaggacgcacgggcatggggaccccggggagccagatggcccccgtgagcctgaatgtgccccgacccaaccaggtgagcgggcccgtcatgcccagcatgcctcccgggcagtggcagcaggcgccccttccccagcagcagcccatgccaggcttgcccaggcctgtgatatccatgyaggcccaggcggccgtggctgggccccggatgcccagcgtgcagccacccaggagcatctcacccagcgctctgcaagacctgctgcggaccctgaagtcgcccagctcccctcagcagcaacagcaggtgctgaacattctcaaatcaaacccgcagctaatggcagctttcatcaaacagcgcacagccaagtacgtggccaatcagcccggcatgcagccccagcctggcctccagtcccagcccggcatgcaaccccagcctggcatgcaccagcagcccagcctgcagaacctgaatgccatgcaggctggcgtgccgcggcccggtgtgcctccacagcagcaggcgatgggaggcctgaacccccagggccaggccttgaacatcatgaacccaggacacaaccccaacatggcgagtatgaatccacagtaccgagaaatgttacggaggcagctgctgcagcagcagcagcarcagcagcagcaacaacagcagcaacagcagcagcagcaagggagtgccggcmtggctgggggcatggcggggcacggccagttccagcagcctcaaggaccyggaggctacccaccggycatgcagcagcagcagcgcatgcagcagcatctccccctccagggcagctccatgggccagatggcggctcagatgggacagcttggccagatggggcagccggggctgggggcagacagcacccccaacatccagcaagccctgcagcagcggattctgcagcaacagcagatgaagcagcagattgggtccccaggccagccgaaccccatgagcccccagcaacacatgctctcaggacagccacaggcctcgcatctccctggccagcagatcgccacgtcccttagtaaccaggtgcggtctccagcccctgtccagtctccacggccccagtcccagcctccacattccagcccgtcaccacggatacagccccagccttcgccacaccacgtctcaccccagactggttccccccaccccggactcgcagtcaccatggccagctccatagatcagggacacttggggaaccccgarcagagtgcaatgctcccccagctgaacacccccagcaggagtgcgctgtccagcgaactgtccctggtcggggacaccacgggggacacgctagagaagtttgtggagggcttgtagcattgtgagagcatcacctttycccyttcatgttcttggaccttttgtactgaaaatccaggcatctaggttctttttattcctagatggaactgcgacttccgagccatggaagggtggattgatgtttaaagaaacaatacaaagaatatatttttttgttaaaaaccagttgatttaaatatctggtctctctctttggtttttttttggcgggggggtggggggggttcttttttttccgttttgtttttgtttggggggaggggggttttgtttggattctttttgtcgtcattgctggtgactcatgcctttttttaacgggaaaaacaagttcattatattcatattttttatttgtattttcaagactttaaacatttatgtttaaaagtaagaagaaaaataatattcagaactgattcctgaaataatgcaagcttataatgtatcccgataactttgtgatgtttcgggaagatttttttctatagtgaactctgtgggcgtctcccagtattaccctggatgataggaattgactccggcgtgcacacacgtacacacccacacacatctatctatacataatggctgaagccaaacttgtcttgcagatgtagaaattgttgctttgtttctctgataaaactggttttagacaaaaaatagggatgatcactcttagaccatgctaatgttactagagaagaagccttcttttctttcttctatgtgaaacttgaaatgaggaaaagcaattctagtgtaaatcatgcaagcgctctaattcctataaatacgaaactcgagaagattcaatcactgtatagaatggtaaaataccaactcatttcttatatcatattgttaaataaactgtgtgcaacagacaaaaagggtggtccttcttgaattcatgtacatggtattaacacttagtgttcggggttttttgttatgaaaatgctgttttcaacattgtatttggactatgcatgtgttttttccccattgtatataaagtaccgcttaaaattgatataaattactgaggtttttaacatgtattctgttctttaagatccctgtaagaatgtttaaggtttttatttatttatatatattttttgagtctgttctttgtaagacatggttctggttgttcgctcatagcggagaggctggggctgcggttgtggttgtggcggcgtgggtggtggctgggaactgtggcccaggcttagcggccgcccggaggcttttcttcccggagactgaggtgggcgrctcagcgttggccccacacattcgaggctcacaggtgattgtcgctcacacagttagggtcgtcagttggtctgaaactgcatttggcccactcctccatcctccytgtccgtcgtagctgccacccccagaggcggcgcttcttcccgtgttcaggcggctcccmccccccgtacacgactcccagaatctgaggcagagagtgctccaggctcgcgaggtgctttctgacttccccccamatcctgccgctgccgcgcagcatgtcccgtgtggcgtttgaggaaatgctgagggacagacaccttggagcaccagctccggtccctgttacagtgagaaaggtcccccacttcgggggatacttgcacttagccacatggtcctgcctcccttggagtccagttccaggctcccttactgagtgggtgagacaagttcacaaaaaccgtaaaactgagaggaggaccatgggcaggggagctgaagttcatcccctaagtctaccacccccagcacccagagaacccactttatccctagtcccccaacaaaggctggtctaggtgggggtgatggtaattttagaaatcacgccccaaatag

SEQ ID NO: 761 - DNA, 2587 bp, Homo sapiens
gtcccgccccttcccatcgtgtacggtcccgcgtggctgcgcgcggcgctctgggagtacgacatggcgcgcgagctgcgggcgctgctgctgtggggcygccgcctgcggcctttgctgcgggcgccggcgctggcggccgtgccgggaggctcccgtagggccattgaaatgtgaagaatccttcgtctatgaagtgtccccacatcaaaactgcattgaaaaccaattctgtgtcctcggaggaccacagcccagttgggccccaggcgaaacccagcctggagcttgcaggcaggacgactgttcagcacgcagaccgccgaggacaaggaggaacccctgcactcgattatcagcagcacagagagcgtgcagggttccacttccaaacatgagttccaggccgagacaaagaagcttttggacattgttgcccggtccctgtactcagaaaaagaggtgtttatacgggagctgatctccaatgccagcgatgccttggaaaaactgcrtcacaaactggtgtctgacggccaagcactgccagaaatggagattcacttgcagaccaatgccgagaaaggcaccatcaccatccaggatactggtatcgggatgacacaggaagagctggtgtccaacctggggacgattgccagatcggggtcaaaggccttcctggatgctctgcagaaccaggctgaggccagcagcaagatcatcggccagtttggagtgggtttctactcagctttcatggtggctgacagagtggaggtctattcccgctcggcagccccggggagcctgggttaccagtggctttcagatggttctggagtgtttgaaatcgccgaagcttcgggagttagaaccgggacaaaaatcatcatccacctgaaatccgactgcaaggagttttccagcgaggcccgggtgcgagatgtggtaacgaagtacagcaacttcgtcagcttccccttgtacttgaatggaaggcggatgaacaccttgcaggccatctggatgatggaccccaaggatgtcsgtgagtggcaacatgaggagttctaccgctacgtcgcgcaggctcacgacaagccccgctacaccctgcactataagacggacgcaccgctcaacatccgcagcatcttctaygtgcccgacatgaaaccgtccatgtttgatgtgagccgggagctgggctccagcgttgcactgtacagccgcaaagtcctcatccagaccaaggccacggacatcctgcccaagtggctgcgcttcatccgaggtgtggtggacagtgaggasattcccctgaacctcagccgggagctgctgcaggagagcgcactcatcaggaaactccgggacgttttacagcagaggctgatcaaattcttcattgaccagagtaaaaaagatgctgagaagtatgcaaagttttttgaagattacggcctgttcatgcgggagggcattgtgaccgccaccgagcaggaggtcaaggaggacatagcaaagctgctgcgctacgagtcctcggcgctgccctccgggcagctaaccagcctctcagaatacgccagccgcatgcgggccggcacccgcaacatctactacctgtgcgcccccaaccgtcacctggcagagcactcaccctactatgaggccatgaagaagaaagacacagaggttctcttctgctttgagcagtttgatgagctcaccctgctgcaccttcgtgagtttgacaagaagaagctgatctctgtggagacggacatagtcgtggatcactacaaggaggagaagtttgaggacaggtccccagccgccgagtgcctatcagagaaggagacggaggagctcatggcctggatgagaaatgtgctggggtcgcgtgtcaccaacgtgaaggtgaccctccgactggacacccaccctgccatggtcaccgtgctggagatgggggctgcccgccacttcctgcgcatgcagcagctggccaagacccaggaggagcgcgcacagctcctgcagcccacgctggagatcaaccccaggcacgcgctcatcaagaagctgaatcagctgcgcgcaagcgagcctggcctggctcagctgctggtggatcagatatacgagaacgccatgattgctgctggacttgttgaygaccctagggccatggtgggccrcttgaatgagctgcttgtcaaggccctggagcgacactgacagccagggggccagaaggactgacaccacagatgacagccccacctccttgagctttatttacctaaatttaaaggtatttcttaacccgagtgtgtgttgggctttttttctgggtcctgtggcaggatgggtcctctcttcctgcagttcaactgstgtggggaggggctgctcacttcagcatcacctccactggatagtggtcactgatggcttgggcctgcaggcaagtgggcacagggtctgggctgagcctacctgagctcctgtgtcccatcctcatgtggctgtgcaagggaggacacataccagttggtcactcaggccataggcagcc

SEQ ID NO: 762 - DNA, 2518 bp, Homo sapiens
gtcccgccccttcccatcgtgtacggtcccgcgtggctgcgcgcggcgctctgggagtacgacatggcgcgcgagctgcgggcgctgctgctgtggggcygccgcctgcggcctttgctgcgggcgccggcgctggcggccgtgccgggaggaaaaccaattctgtgtcctcggaggaccacagcccagttgggccccaggcgaaacccagcctggagcttgcaggcaggacgactgttcagcacgcagaccgccgaggacaaggaggaacccctgcactcgattatcagcagcacagagagcgtgcagggttccacttccaaacatgagttccaggccgagacaaagaagcttttggacattgttgcccggtccctgtactcagaaaaagaggtgtttatacgggagctgatctccaatgccagcgatgccttggaaaaactgcrtcacaaactggtgtctgacggccaagcactgccagaaatggagattcacttgcagaccaatgccgagaaaggcaccatcaccatccaggatactggtatcgggatgacacaggaagagctggtgtccaacctggggacgattgccagatcggggtcaaaggccttcctggatgctctgcagaaccaggctgaggccagcagcaagatcatcggccagtttggagtgggtttctactcagctttcatggtggctgacagagtggaggtctattcccgctcggcagccccggggagcctgggttaccagtggctttcagatggttctggagtgtttgaaatcgccgaagcttcgggagttagaaccgggacaaaaatcatcatccacctgaaatccgactgcaaggagttttccagcgaggcccgggtgcgagatgtggtaacgaagtacagcaacttcgtcagcttccccttgtacttgaatggaaggcggatgaacaccttgcaggccatctggatgatggaccccaaggatgtcsgtgagtggcaacatgaggagttctaccgctacgtcgcgcaggctcacgacaagccccgctacaccctgcactataagacggacgcaccgctcaacatccgcagcatcttctaygtgcccgacatgaaaccgtccatgtttgatgtgagccgggagctgggctccagcgttgcactgtacagccgcaaagtcctcatccagaccaaggccacggacatcctgcccaagtggctgcgcttcatccgaggtgtggtggacagtgaggasattcccctgaacctcagccgggagctgctgcaggagagcgcactcatcaggaaactccgggacgttttacagcagaggctgatcaaattcttcattgaccagagtaaaaaagatgctgagaagtatgcaaagttttttgaagattacggcctgttcatgcgggagggcattgtgaccgccaccgagcaggaggtcaaggaggacatagcaaagctgctgcgctacgagtcctcggcgctgccctccgggcagctaaccagcctctcagaatacgccagccgcatgcgggccggcacccgcaacatctactacctgtgcgcccccaaccgtcacctggcagagcactcaccctactatgaggccatgaagaagaaagacacagaggttctcttctgctttgagcagtttgatgagctcaccctgctgcaccttcgtgagtttgacaagaagaagctgatctctgtggagacggacatagtcgtggatcactacaaggaggagaagtttgaggacaggtccccagccgccgagtgcctatcagagaaggagacggaggagctcatggcctggatgagaaatgtgctggggtcgcgtgtcaccaacgtgaaggtgaccctccgactggacacccaccctgccatggtcaccgtgctggagatgggggctgcccgccacttcctgcgcatgcagcagctggccaagacccaggaggagcgcgcacagctcctgcagcccacgctggagatcaaccccaggcacgcgctcatcaagaagctgaatcagctgcgcgcaagcgagcctggcctggctcagctgctggtggatcagatatacgagaacgccatgattgctgctggacttgttgaygaccctagggccatggtgggccrcttgaatgagctgcttgtcaaggccctggagcgacactgacagccagggggccagaaggactgacaccacagatgacagccccacctccttgagctttatttacctaaatttaaaggtatttcttaacccgagtgtgtgttgggctttttttctgggtcctgtggcaggatgggtcctctcttcctgcagttcaactgstgtggggaggggctgctcacttcagcatcacctccactggatagtggtcactgatggcttgggcctgcaggcaagtgggcacagggtctgggctgagcctacctgagctcctgtgtcccatcctcatgtggctgtgcaagggaggacacataccagttggtcactcaggccataggcagcc

SEQ ID NO: 763 - DNA, 2558 bp, Homo sapiens
gtgctcctcagctgcacaggccacattgcaggtgctcggcaggctgtcgcattgcacctggcagaacgttcctgttgttggagaaagttccatcggacaacgtgggccagggcagtgggcgtgtgtattttacttgactttggccttaggacctttggcagtattatagtagaaaaatgaagtgctgtgcggtgcttacagacgcatgcgcgtgatttctactctttttcccacaaagtgtagagtccaggagacttgaatatggaagccagtttggagcctctcctcactcctggccttcctatggaaggagcttattcaagggaaagagcttattcaagctgctctttccccacccccaggtgtgacccacaggcctccacctgtctgggacaggcaggactgtgagctttgggaatcwaatggaaaacacacttgtcccactgctgccagctggttgtcctagggctaatgtgtcacctctctgtgacttagctcttcacgtgtagaatggggtggaaaagtactcggtgtggctgttttcaggatgaaggggtcttagcggtgctcgcagaagagccacggtgttgggagtgtctgctctctggaggggaggctgcctyactaactggcctctgccccacaggccttcctggatgctctgcagaaccaggctgaggccagcagcaagatcatcggccagtttggagtgggtttctactcagctttcatggtggctgacagagtggaggtctattcccgctcggcagccccggggagcctgggttaccagtggctttcagatggttctggagtgtttgaaatcgccgaagcttcgggagttagaaccgggacaaaaatcatcatccacctgaaatccgactgcaaggagttttccagcgaggcccgggtgcgagatgtggtaacgaagtacagcaacttcgtcagcttccccttgtacttgaatggaaggcggatgaacaccttgcaggccatctggatgatggaccccaaggatgtcsgtgagtggcaacatgaggagttctaccgctacgtcgcgcaggctcacgacaagccccgctacaccctgcactataagacggacgcaccgctcaacatccgcagcatcttctaygtgcccgacatgaaaccgtccatgtttgatgtgagccgggagctgggctccagcgttgcactgtacagccgcaaagtcctcatccagaccaaggccacggacatcctgcccaagtggctgcgcttcatccgaggtgtggtggacagtgaggasattcccctgaacctcagccgggagctgctgcaggagagcgcactcatcaggaaactccgggacgttttacagcagaggctgatcaaattcttcattgaccagagtaaaaaagatgctgagaagtatgcaaagttttttgaagattacggcctgttcatgcgggagggcattgtgaccgccaccgagcaggaggtcaaggaggacatagcaaagctgctgcgctacgagtcctcggcgctgccctccgggcagctaaccagcctctcagaatacgccagccgcatgcgggccggcacccgcaacatctactacctgtgcgcccccaaccgtcacctggcagagcactcaccctactatgaggccatgaagaagaaagacacagaggttctcttctgctttgagcagtttgatgagctcaccctgctgcaccttcgtgagtttgacaagaagaagctgatctctgtggagacggacatagtcgtggatcactacaaggaggagaagtttgaggacaggtccccagccgccgagtgcctatcagagaaggagacggaggagctcatggcctggatgagaaatgtgctggggtcgcgtgtcaccaacgtgaaggtgaccctccgactggacacccaccctgccatggtcaccgtgctggagatgggggctgcccgccacttcctgcgcatgcagcagctggccaagacccaggaggagcgcgcacagctcctgcagcccacgctggagatcaaccccaggcacgcgctcatcaagaagctgaatcagctgcgcgcaagcgagcctggcctggctcagctgctggtggatcagatatacgagaacgccatgattgctgctggacttgttgaygaccctagggccatggtgggccrcttgaatgagctgcttgtcaaggccctggagcgacactgacagccagggggccagaaggactgacaccacagatgacagccccacctccttgagctttatttacctaaatttaaaggtatttcttaacccgagtgtgtgttgggctttttttctgggtcctgtggcaggatgggtcctctcttcctgcagttcaactgstgtggggaggggctgctcacttcagcatcacctccactggatagtggtcactgatggcttgggcctgcaggcaagtgggcacagggtctgggctgagcctacctgagctcctgtgtcccatcctcatgtggctgtgcaagggaggacacataccagttggtcactcaggccataggcagcc

SEQ ID NO: 764 - DNA, 2362 bp, Homo sapiens
ggtggacgcctgtaatcccagctactcgggaggctgaggcaggagaatggcttgaacccgagaggtggaggttgcagtgagccgagatagtattactgcactccaggctrggcagcagagcaagattccgcctcaaaaaaaaaaaaaaaaaaaaaaaaaaaaaaaaactgagcatggtagcatgcacctgtggtcctggctacgccggaggattgcctgaagccaggagttcaagaccagtctggacaaaagagcaagaccccatctctaccaaaaaaatttaaaaattagccaggcatggtgccgtacccatagtcttagctactcaggaggctgaggagggaggattatctgagccctggcggttgaggctataatgagccatgattgtgccactgcactccagccttggcaacacagtgtgagaccctgtctcaaaaacaataaaaacccaaaacaaaagaaccaagaaattactggacctgaggcctggcctttagctgctgccctgcccttgtgacctggtcactcgggatcccctgggcctaaacacacagcctattgtctacctcaagaaggctccccactgcttggctggcaattggggtgggctttgcaggccccacctgtcctggccccacggcgctggtgctgcaggcccccaccactgcttgttccgagctccccagcctcctgcagagttgcctgcacctgatggcgatgaatcaggaaggcaggcgtgtcctgggccacagagcagtcatggctgtcagccaccagggggctccatttgcaactttggatgtggctttggcctctttgtccaaagtgaccttggggcccccagacaagagacagggagactggagcccagccccaccctcccgcacatacctggcccatccctgccctatcctggaagatgggggccaccacacgtgcaagggacacgggataggaacctttggccttgttatcagacattttaaaactaagtgcaaacgtgattatcaggtgcagtttttacagcagcaagaaacctgtgcttacagaaagaaacacgtgctagcaacccacctatgcggaaagccacacagagccattgttttctgcactctcaggtgacggctcacatttgccccagggaaggtcacagctgcctgaacttttaaaactcccagacacgcactgcctgtgcaggatccggagcccagcagcactgccagggccttgaagtgcttcttcagagacctttcttcatagactacttttttttctttaagcagcaaaaggagaaaattgtcatcaaaggatattccagattcttgacagcattctcrtcatctctgaggacatcaccatcatctcaggatgagggrcatgwagctgctgggggcgctgctggcactggcggccctactgcagggggccgtgtccctgaagatcgcagccttcaacatccagacatttggggasaccaagatgtccaatgccaccctcgtcagctacattgtgcagatcctgagccgctatgacatcgccctggtccaggaggtcagagacagccacctgactgccgtggggaagctgctggacaacctcaatcaggatgcaccagacacctatcactacgtggtcagtgagccactgggacggaacagctataaggagcgctacctgttcgtgtacrggcctgaccaggtgtctgcggtggacagctmctactacgatgatggctgcgagccctgcgggaacgacaccttcaaccgagagccagccattgtcaggttcttctcccggttcacagaggtcagggagtttgccattgttsccctgcatgcggccccgggggacgcagtagccgagatcgacgctctctatgacgtctacctggatgtccaagagaaatggggcttggaggacgtcatgttgatgggcgacttcaatgcrggctgcagctatgtgagaccctcccagtggtcatccatccgcctrtggacaagccccaccttccagtggctgatcyccgacagcgctgacaccacagctacacccacgcactgtgcctatgacaggatcgtggttgcagggatgctgctccraggcgccgttgttcccgactcggctcttccctttaacttccaggctgcctatggcctgagtgaccaactggcccaagccatcagtgaccactatccagtggaggtgatgctgaagtgagcagcccctccccacascagttgaactgcaggaagagaggacccatcctgccacaggacccagaaaaaaagcccaacacacactcgggttaagaaatacctttaaatttaggtaaataaagctcaaggaggtggggctgtca

SEQ ID NO: 765 - DNA, 899 bp, Homo sapiens
atgagggrcatgwagctgctgggggcgctgctggcactggcggccctactgcagggggccgtgtccctgaagatcgcagccttcaacatccagacatttggggasaccaagatgtccaatgccaccctcgtcagctacattgtgggatgcaccagacacctatcactacgtggtcagtgagccactgggacggaacagctataaggagcgctacctgttcgtgtacrggcctgaccaggtgtctgcggtggacagctmctactacgatgatggctgcgagccctgcgggaacgacaccttcaaccgagagccagccattgtcaggttcttctcccggttcacagaggtcagggagtttgccattgttsccctgcatgcggccccgggggacgcagtagccgagatcgacgctctctatgacgtctacctggatgtccaagagaaatggggcttggaggacgtcatgttgatgggcgacttcaatgcrggctgcagctatgtgagaccctcccagtggtcatccatccgcctrtggacaagccccaccttccagtggctgatcyccgacagcgctgacaccacagctacacccacgcactgtgcctatgacaggatcgtggttgcagggatgctgctccraggcgccgttgttcccgactcggctcttccctttaacttccaggctgcctatggcctgagtgaccaactggcccaagccatcagtgaccactatccagtggaggtgatgctgaagtgagcagcccctccccacascagttgaactgcaggaagagaggacccatcctgccacaggacccagaaaaaaagcccaacacacactcgggttaagaaatacctttaaatttaggtaaataaagctcaaggaggtggggctgtca

SEQ ID NO: 766 - DNA, 2276 bp, Homo sapiens
atagtattactgcactccaggctrggcagcagagcaagattccgcctcaaaaaaaaaaaaaaaaaaaaaaaaaaaaaaaaactgagcatggtagcatgcacctgtggtcctggctacgccggaggattgcctgaagccaggagttcaagaccagtctggacaaaagagcaagaccccatctctaccaaaaaaatttaaaaattagccaggcatggtgccgtacccatagtcttagctactcaggaggctgaggagggaggattatctgagccctggcggttgaggctataatgagccatgattgtgccactgcactccagccttggcaacacagtgtgagaccctgtctcaaaaacaataaaaacccaaaacaaaagaaccaagaaattactggacctgaggcctggcctttagctgctgccctgcccttgtgacctggtcactcgggatcccctgggcctaaacacacagcctattgtctacctcaagaaggctccccactgcttggctggcaattggggtgggctttgcaggccccacctgtcctggccccacggcgctggtgctgcaggcccccaccactgcttgttccgagctccccagcctcctgcagagttgcctgcacctgatggcgatgaatcaggaaggcaggcgtgtcctgggccacagagcagtcatggctgtcagccaccagggggctccatttgcaactttggatgtggctttggcctctttgtccaaagtgaccttggggcccccagacaagagacagggagactggagcccagccccaccctcccgcacatacctggcccatccctgccctatcctggaagatgggggccaccacacgtgcaagggacacgggataggaacctttggccttgttatcagacattttaaaactaagtgcaaacgtgattatcaggtgcagtttttacagcagcaagaaacctgtgcttacagaaagaaacacgtgctagcaacccacctatgcggaaagccacacagagccattgttttctgcactctcaggtgacggctcacatttgccccagggaaggtcacagctgcctgaacttttaaaactcccagacacgcactgcctgtgcaggatccggagcccagcagcactgccagggccttgaagtgcttcttcagagacctttcttcatagactacttttttttctttaagcagcaaaaggagaaaattgtcatcaaaggatattccagattcttgacagcattctcrtcatctctgaggacatcaccatcatctcaggatgagggrcatgwagctgctgggggcgctgctggcactggcggccctactgcagggggccgtgtccctgaagatcgcagccttcaacatccagacatttggggasaccaagatgtccaatgccaccctcgtcagctacattgtgcagatcctgagccgctatgacatcgccctggtccaggaggtcagagacagccacctgactgccgtggggaagctgctggacaacctcaatcaggatgcaccagacacctatcactacgtggtcagtgagccactgggacggaacagctataaggagcgctacctgttcgtgtacrggcctgaccaggtgtctgcggtggacagctmctactacgatgatggctgcgagccctgcgggaacgacaccttcaaccgagagccagccattgtcaggttcttctcccggttcacagaggtcagggagtttgccattgttsccctgcatgcggccccgggggacgcagtagccgagatcgacgctctctatgacgtctacctggatgtccaagagaaatggggcttggaggacgtcatgttgatgggcgacttcaatgcrggctgcagctatgtgagaccctcccagtggtcatccatccgcctrtggacaagccccaccttccagtggctgatcyccgacagcgctgacaccacagctacacccacgcactgtgcctatgacaggatcgtggttgcagggatgctgctccraggcgccgttgttcccgactcggctcttccctttaacttccaggctgcctatggcctgagtgaccaactggcccaagccatcagtgaccactatccagtggaggtgatgctgaagtgagcagcccctccccacascagttgaactgcaggaagagaggacccatcctgccacaggacccagaaaaaaagcccaacacacactcgggttaagaaatacctttaaatttaggtaaataaagctcaaggaggtggggctgtca

SEQ ID NO: 767 - DNA, 6100 bp, Homo sapiens
gtactggtgaccccggccggggcaggccccgggactcgacaacatggcttccccrccccaccagcagctgctgcatcaccacagcaccgaggtgagctgcgactccagcggggacagcaacagcgtgcgcgtcaagatcaaccccaagcagctgtcctccaacagccaccccaagcactgcaaatacagcatmtcctctagctgcagcagmtctggggactccgggggcgtcccccggcgagtgggcggcggaggccggmtgcgcaggcagaagaagctgccccagctgttcgagagggcctccagccgctggtgggaccccaagttcgactcggtgaacctggaggaggcctgcctggagcgctgcttcccgcagacccagcgccggttccggtatgcgctcttctacatcggcttcgcctgccttctgtggagcatctattttgcggtccacatgagatccagactgatcgtcatggtcgcccccgcgctgtgcttcytcctggtgtgtgtgggcttctttctgtttacyttcaccaagctgtacgcccggcattacgcgtggacctcgctggctctcaccctgctggtgttcgccctgaccctggctgcgcagttccaggtcttgacgcctgtctcaggacgcggcgacagctccaaccttacggccacagcccggcccacagatacttgcttatctcaagtggggagcttctccatgtgcatcgaagtgctctttttgctctatrccgtcatgcacttacctttgtacctgagtttgtgtctgggggtggcctactctgtccttttcgagacctttggctaccatttccgggatgaagcctgcttcccctcgcccggagccggggccctgcactgggagctgctgagcagggggctgctccacggctgcatccacgccatcggggtccacctgttcgtcatgtcccaggtgaggtccaggagcaccttcctcaaggtggggcaatccattatgcacgggaaggacctggaagtggaaaaagccctcaaagagaggatgattcattccgtgatgccaagaatcatagccgatgacttaatgaagcagggagatgaggagagtgagaattctgtcaagagrcatgccacctcgagccccaagaacagraagaaaaagtcttccatccaaaaagctcctatagccttccgcccttttaagatgcagcagatcgaagaagtcagtattttatttgcagatatcgtgggcttcaccaagatgagtgccaacaagtctgcccacgccctggtgggtctcctgaacgatctgttcggtcgcttcgaccgcctgtgtgaggagaccaagtgtgagaaaatcagcaccctgggagactgttactactgcgtggcgggctgtcccgagccccgggccgaccatgcctactgctgcatcgagatgggcctgggcatgatcaaggccatcgagcagttctgccaggagaagaaggagatggtgaacatgagagtcggggtgcacacgggcaccgtcctttgcggcatcctgggcatgaggaggtttaaatttgacgtgtggtccaacgatgtgaacctggccaatctcatggagcagctgggagtggccggcaaagttcacatttctgaggccaccgcaaaatacttagatgaccggtacgaaatggaagatgggaaagttattgaacggctgggccagagcgtggttgctgaccagttgaaaggtttgaagacatacctgatatcgggtcagagagccaaggagtctcgctgcagctgtgcagaggccttgctttctggctttgaggtcattgacggctcacaggtgtcctcaggccctaggggacaggggacagcgtcatcagggaatgtcagtgacttggcgcagactgtcaaaacctttgataaccttaagacctgcccttcgtgcggaatcacatttgctcccaaatctgaagccggcgccgagggaggagcacctcaaaacggctgccaagacgagcataaaaacagcaccaaggcttctggaggacctaatcccaaaactcagaacgggctcctcagccctccccaagaggagaagctcaccaacagtcagacttctctgtgtgagatcttgcaggagaagggaaggtgggcaggggtgagcctggaccagtcggctctccttccgctgaggttcaagaacatccgggagaaaacggacgcccactttgtggacgttatcaaagaagacagcctgatgaaagattacttttttaagccgcccattaatcagttcagcctgaacttcctggatcaggagctggagcgatcctacaggaccagctatcaggaagaggtcatraagaactcccccgtgaagacgtttgctagtcccaccttcagctccctcctggatgtgtttctgtcgaccacagtgtttctgacgctgtccaccacctgcttcctgaagtacgaggcggccaccgtgcctcccccgcccgccgccctggcggtcttcagtgcagccctgctgctggaggtgctgtccctcgcggtgtccatcaggatggtgttcttcctggaggacgtcatggcctgcaccaagcgcctgctggagtggatcgccggctggctaccacgtcactgcatcggggccatcctggtgtcgcttcccgcactggccgtctactcccatgtcacctccgaatatgagaccaacatacacttcccagtgttcacaggctcggccgcrctgattgcygtcgtgcactactgtaacttctgccagctcagctcctggatgaggtcctccctcgccaccgtcgtgggggccgggccgctgctcctgctctacgtctccctgtgcccagacagttctgtattaacttcgccccttgaygcagtacagaatttcagttccgagaggaacccgtgcaatagytcggtgccgcgtgacctccggcggcccgccagcctcatcggccaggaggtggttctcgtcttctttctcctgctcttgttggtctggttcctgaatcgcgaatttgaagtcagctaccgcctccactaccacggagacgtggaagcggatcttcaccgcaccaagatccagagcatgcgggaccaggcagactggctgctgaggaacatcatcccctaccacgtggctgagcagctgaaggtgtcccagacctactccaagaaccaygacagcggaggggtgatcttcgccagcatcgtcaacttcagcgagttctacgaggagaactacgagggcggcaaggagtgctaccgggtcctcaacgagctcatcggggactttgacgagctcctaagcaagccggactacagcagcatcgagaagatcaagaccatcggagccacgtacatggcggcgtcagggctgaacaccgcgcaggcccaggacggcagccacccgcaggagcacctgcagatcctgttcgagttcgccaaggagatgatgcgcgtggtggacgacttcaacarcaacatgctgtggttcaacttcaagctccgcgtcggcttcaaccatgggcccctcacggccggggtcatcggcaccaccaagctgctgtacgacatctggggagacaccgtcaacatcgccagcaggatggacaccaccggcgtggagtgccgcatccaggtgagcgaagagagctaccgygtcttgagcaagatgggctatgacttcgactacagagggaccgtgaatgtcaaggggaaaggccagatgaagacctacctgtacccaaagtgcacggatcacagggtcatcccacagcaccagctgtccatctccccagacatccgygtccaggtggatggcagcatcggacggtctcccacagacgagattgccaacctggtgccttctgtccagtatgtggacaagacatctctgggttctgacagcagcacgcaggccaaggatgcccacctgtcccccaagagaccgtggaaggagcccgtcaaagccgaagaaaggggtcgatttggcaaagccatagagaaagacgactgtgacgaaacaggaatagaagaagccaacgaactcaccaagctcaacgtttcaaagagtgtgtgaggcggcgcccacccgctgcccgaggtgctctgtttgtcgaaacacartaatatttgtatttggctgttgtgctttccaagcgccacagttgccctccccggacgtggtgttatgtggtcatttcagccctaacttctgtgtggatcacagttattcagggttcattttcatccattcttccctttcgctcccttccctggaaaccccgctgcctctgggtcatccgttcagcacgtggtggagaacaagtgccttcagggctggcctcggcctcgagtctcgggacagaggccgccagtggagatcatggctttgggtattatttgacttttagaacaaaagctgtggttaagatctcatttttattgctttttcccacgtcccacgagacactattttcggttctctggctaataccctgtttttgagtttattttgtttctgtctatgtcacagtgtyccyctacgacccgacctctctatgtaagcacacatgcgcacacacacttgcattcatgaatctgatataaagtgccagtaatccgccaagagggggtgcgaagggggcatgtcacgacagctccgccaccccccattgcccacccgcactttcccgagcaccgcgccccgtgggctgtgggtgagccgcgctccctgcactgagcgggtttaggggctcgcccacatgcatgcaggccaagacagcaaatgccagccgggcacgacgccygtgtgcccaggcctcgggggtctcagagccgcctctcacccccgaccctccacccaggggtctycccrtcgggagtggaggygttggtcctggaagctgactcatcggagagggaaataccaaataaacatccgaggttgcatttatttatttatttatttacccggaagcatgtgcgctcccgggaggggtgctgggtcctcagggtggggggtcatagccacaggggagggcagttcccaggaaggtaaccagatgtctcttttgtgttttggccacctggggccgcccccaacctccccaccccaagaggggtctgagtgggacctcaaagcatggccagtgcaattctgaggctaggggaataggagaagcccaccagctgcccctgccacccacgggggctcctccctgccggggtccagctcagaaccacgggggtctgtgccggcagcaccggtgccatcttggcttccacaaattccagaagtttcttggctgcctcccgctctcagatggcacagggcctatcagtggcaggatttaatctggggagcaaattccagctctgaaatggagttctcacaccgtatctagggacagaggcatctggatgcaaacgcggggtttgttaggggcggaatcccgagggtggtgtgggggagctccgtccgggcagttggctgctggtcctgtctgattatgttttgccatattgagtctgaagtttgtgtggaagtgagctcgcccgagttgtccggtcsgagttgtagccastctttcaggggaccccgggacgcygatgaggcccagggtgcactccttgtcagtcttgcccgwtgtccctgtgcattttgctttccgctgtcaaatctcactgtctcgttttcacaccgcatcagtcyccatcatcactactcctccccaragacatacagattgccctccccggcatgaagaagtcacaattctgacccgccacctctccaggggcggtgcctgggatggccacccatcaggacagccagagccrgggtcccggcgtcctgagagtccagggcacctccccccattagctgtaaggtttcctgtcaggtgtgactgtcagtttgctggtcttccaataccgaagaaagggtggttgtgacaatacctcttgcttctaaagaatgtattataaaacaccgcagatttttttttttcctctttctgcatcagtattaaggtgtatatttgaatgtcctcccctcccctttcccctccag

SEQ ID NO: 768 - DNA, 7136 bp, Homo sapiens
gtactggtgaccccggccggggcaggccccgggactcgacaacatggcttccccrccccaccagcagctgctgcatcaccacagcaccgaggtgagctgcgactccagcggggacagcaacagcgtgcgcgtcaagatcaaccccaagcagctgtcctccaacagccaccccaagcactgcaaatacagcatmtcctctagctgcagcagmtctggggactccgggggcgtcccccggcgagtgggcggcggaggccggmtgcgcaggcagaagaagctgccccagctgttcgagagggcctccagccgctggtgggaccccaagttcgactcggtgaacctggaggaggcctgcctggagcgctgcttcccgcagacccagcgccggttccggtatgcgctcttctacatcggcttcgcctgccttctgtggagcatctattttgcggtccacatgagatccagactgatcgtcatggtcgcccccgcgctgtgcttcytcctggtgtgtgtgggcttctttctgtttacyttcaccaagctgtacgcccggcattacgcgtggacctcgctggctctcaccctgctggtgttcgccctgaccctggctgcgcagttccaggtcttgacgcctgtctcaggacgcggcgacagctccaaccttacggccacagcccggcccacagatacttgcttatctcaagtggggagcttctccatgtgcatcgaagtgctctttttgctctatrccgtcatgcacttacctttgtacctgagtttgtgtctgggggtggcctactctgtccttttcgagacctttggctaccatttccgggatgaagcctgcttcccctcgcccggagccggggccctgcactgggagctgctgagcagggggctgctccacggctgcatccacgccatcggggtccacctgttcgtcatgtcccaggtgaggtccaggagcaccttcctcaaggtggggcaatccattatgcacgggaaggacctggaagtggaaaaagccctcaaagagaggatgattcattccgtgatgccaagaatcatagccgatgacttaatgaagcagggagatgaggagagtgagaattctgtcaagagrcatgccacctcgagccccaagaacagraagaaaaagtcttccatccaaaaagctcctatagccttccgcccttttaagatgcagcagatcgaagaagtcagtattttatttgcagatatcgtgggcttcaccaagatgagtgccaacaagtctgcccacgccctggtgggtctcctgaacgatctgttcggtcgcttcgaccgcctgtgtgaggagaccaagtgtgagaaaatcagcaccctgggagactgttactactgcgtggcgggctgtcccgagccccgggccgaccatgcctactgctgcatcgagatgggcctgggcatgatcaaggccatcgagcagttctgccaggagaagaaggagatggtgaacatgagagtcggggtgcacacgggcaccgtcctttgcggcatcctgggcatgaggaggtttaaatttgacgtgtggtccaacgatgtgaacctggccaatctcatggagcagctgggagtggccggcaaagttcacatttctgaggccaccgcaaaatacttagatgaccggtacgaaatggaagatgggaaagttattgaacggctgggccagagcgtggttgctgaccagttgaaaggtttgaagacatacctgatatcgggtcagagagccaaggagtctcgctgcagctgtgcagaggccttgctttctggctttgaggtcattgacggctcacaggtgtcctcaggccctaggggacaggggacagcgtcatcagggaatgtcagtgacttggcgcagactgtcaaaacctttgataaccttaagacctgcccttcgtgcggaatcacatttgctcccaaatctgaagccggcgccgagggaggagcacctcaaaacggctgccaagacgagcataaaaacagcaccaaggcttctggaggacctaatcccaaaactcagaacgggctcctcagccctccccaagaggagaagctcaccaacagtcagacttctctgtgtgagatcttgcaggagaagggaaggtgggcaggggtgagcctggaccagtcggctctccttccgctgaggttcaagaacatccgggagaaaacggacgcccactttgtggacgttatcaaagaagacagcctgatgaaagattacttttttaagccgcccattaatcagttcagcctgaacttcctggatcaggagctggagcgatcctacaggaccagctatcaggaagaggtcatraagaactcccccgtgaagacgtttgctagtcccaccttcagctccctcctggatgtgtttctgtcgaccacagtgtttctgacgctgtccaccacctgcttcctgaagtacgaggcggccaccgtgcctcccccgcccgccgccctggcggtcttcagtgcagccctgctgctggaggtgctgtccctcgcggtgtccatcaggatggtgttcttcctggaggacgtcatggcctgcaccaagcgcctgctggagtggatcgccggctggctaccacgtcactgcatcggggccatcctggtgtcgcttcccgcactggccgtctactcccatgtcacctccgaatatgagaccaacatacacttcccagtgttcacaggctcggccgcrctgattgcygtcgtgcactactgtaacttctgccagctcagctcctggatgaggtcctccctcgccaccgtcgtgggggccgggccgctgctcctgctctacgtctccctgtgcccagacagttctgtattaacttcgccccttgaygcagtacagaatttcagttccgagaggaacccgtgcaatagytcggtgccgcgtgacctccggcggcccgccagcctcatcggccaggaggtggttctcgtcttctttctcctgctcttgttggtctggttcctgaatcgcgaatttgaagtcagctaccgcctccactaccacggagacgtggaagcggatcttcaccgcaccaagatccagagcatgcgggaccaggcagactggctgctgaggaacatcatcccctaccacgtggctgagcagctgaaggtgtcccagacctactccaagaaccaygacagcggaggggtgatcttcgccagcatcgtcaacttcagcgagttctacgaggagaactacgagggcggcaaggagtgctaccgggtcctcaacgagctcatcggggactttgacgagctcctaagcaagccggactacagcagcatcgagaagatcaagaccatcggagccacgtacatggcggcgtcagggctgaacaccgcgcaggcccaggacggcagccacccgcaggagcacctgcagatcctgttcgagttcgccaaggagatgatgcgcgtggtggacgacttcaacarcaacatgctgtggttcaacttcaagctccgcgtcggcttcaaccatgggcccctcacggccggggtcatcggcaccaccaagctgctgtacgacatctggggagacaccgtcaacatcgccagcaggatggacaccaccggcgtggagtgccgcatccaggtgagcgaagagagctaccgygtcttgagcaagatgggctatgacttcgactacagagggaccgtgaatgtcaaggggaaaggccagatgaagacctacctgtacccaaagtgcacggatcacagggtcatcccacagcaccagctgtccatctccccagacatccgygtccaggtggatggcagcatcggacggtctcccacagacgagattgccaacctggtgccttctgtccagtatgtggacaagacatctctgggttctgacagcagcacgcaggccaaggatgcccacctgtcccccaagagaccgtggaaggagcccgtcaaagccgaagaaaggggtcgatttggcaaagccatagagaaagacgactgtgacgaaacaggaatagaagaagccaacgaactcaccaagctcaacgtttcaaagagtgtgtgaggcggcgcccacccgctgcccgaggtgctctgtttgtcgaaacacartaatatttgtatttggctgttgtgctttccaagcgccacagttgccctccccggacgtggtgttatgtggtcatttcagccctaacttctgtgtggatcacagttattcagggttcattttcatccattcttccctttcgctcccttccctggaaaccccgctgcctctgggtcatccgttcagcacgtggtggagaacaagtgccttcagggctggcctcggcctcgagtctcgggacagaggccgccagtggagatcatggctttgggtattatttgacttttagaacaaaagctgtggttaagatctcatttttattgctttttcccacgtcccacgagacactattttcggttctctggctaataccctgtttttgagtttattttgtttctgtctatgtcacagtgtyccyctacgacccgacctctctatgtaagcacacatgcgcacacacacttgcattcatgaatctgatataaagtgccagtaatccgccaagagggggtgcgaagggggcatgtcacgacagctccgccaccccccattgcccacccgcactttcccgagcaccgcgccccgtgggctgtgggtgagccgcgctccctgcactgagcgggtttaggggctcgcccacatgcatgcaggccaagacagcaaatgccagccgggcacgacgccygtgtgcccaggcctcgggggtctcagagccgcctctcacccccgaccctccacccaggggtctycccrtcgggagtggaggygttggtcctggaagctgactcatcggagagggaaataccaaataaacatccgaggttgcatttatttatttatttatttacccggaagcatgtgcgctcccgggaggggtgctgggtcctcagggtggggggtcatagccacaggggagggcagttcccaggaaggtaaccagatgtctcttttgtgttttggccacctggggccgcccccaacctccccaccccaagaggggtctgagtgggacctcaaagcatggccagtgcaattctgaggctaggggaataggagaagcccaccagctgcccctgccacccacgggggctcctccctgccggggtccagctcagaaccacgggggtctgtgccggcagcaccggtgccatcttggcttccacaaattccagaagtttcttggctgcctcccgctctcagatggcacagggcctatcagtggcaggatttaatctggggagcaaattccagctctgaaatggagttctcacaccgtatctagggacagaggcatctggatgcaaacgcggggtttgttaggggcggaatcccgagggtggtgtgggggagctccgtccgggcagttggctgctggtcctgtctgattatgttttgccatattgagtctgaagtttgtgtggaagtgagctcgcccgagttgtccggtcsgagttgtagccastctttcaggggaccccgggacgcygatgaggcccagggtgcactccttgtcagtcttgcccgwtgtccctgtgcattttgctttccgctgtcaaatctcactgtctcgttttcacaccgcatcagtcyccatcatcactactcctccccaragacatacagattgccctccccggcatgaagaagtcacaattctgacccgccacctctccaggggcggtgcctgggatggccacccatcaggacagccagagccrgggtcccggcgtcctgagagtccagggcacctccccccattagctgtaaggtttcctgtcaggtgtgactgtcagtttgctggtcttccaataccgaagaaagggtggttgtgacaatacctcttgcttctaaagaatgtattataaaacaccgcagatttttttttttccttaaaaaacactacctgatgctttccttgttcgtggggattgtggtcacatgaagctctttctgcatcagtattaaggtgtatatttgaatgtcctcccctcccctttcccctccaggctgtgtagctttgaggggctgggcgtttgctcacgaccttgctgtctcgctcagaacatgctccgcaaagttctccgcacacacttcttccccatcaagcccatttccttccccaaccacaaaggtgtttgtgattcctcaccccgggaaaccaaggagctgcaaagkggagtctggttcagccccgtgcagactcacccagagcttaacgttgtctttcaaacaccctgagccttcctaaacagccagtgcagacrttctctctgggccacgaagcccctcgggtcctccccgtcccctgctccgatgcatacctcagtgcagaaccacagaatctctgcagcggaaacgccgtgcatctcttgtctgttggcagcgagcacatcgtgctggagacacgagtttctaagcagctggcacgagggctgctgacggcatgggtcgtgcttcagggtggcaatacctcttaggaacttagggcaggaagcaatacttcagcattgaatgtgtgtaaatagttgctttgagttgcaattgctattttcttctcagtcccagctcagatcgaattatatatccatatatatatatatatatatatatggtaaacaagcacacacaattttatccaatgcaaacaaatgtagagcatcagttacaaaaccctcgaatagcttgagagccccacaggctctgccacacccgtgacttcatccacactgacgtcacccgcgggggctccccctgcacatttgcacacgatccggagagccgaaggccgcgtgcttcctgtcacatgggctgtaatcatttgtagtttccaaagacacgtctgcatttgaatttctagattttcgaggtaaggagttttttttaattggttgtttggaaaatcacatcatgcctagaatctgaaattgaattagcaagaaccgactgtttgcattttccatatatccttttatctgctctttttaaa

SEQ ID NO: 769 - DNA, 2428 bp, Homo sapiens
  misc_feature (1)...(2428): n = A,T,C or G
acaggcagggaatccctcttcttccttttgctgaatcagctggagaagaaagcccagcaggakgcctgctagcctcagcctcgggccctaccagggtcctaggtactggaatggaacttcgccgaggtcaccgctcaaacggccacaaygagggagccgatttagatcctctgggcctgttccttccttttctttaaacgtyccagtctagcttagaggaggacctgttttgttagataaatggcaagcaaaaaacgagaagtccagttacagacagtcatcaataatcaaagcctgtgggatgagatgttgcagaacaaaggcttaacagtgattgatgtttaccaagcctggtgtggaccttgcanagcaatgcaacctttattcagaaaattgaaaaatgaactgaacgaagaygaaattctgcattttgctgtcgcagaagctgacaacattgtractttgcagccatttagagataaatgtgaacctgtttttctctttagtgttaatggcaaaattatcgaaaagattcagggtgcaaatgcaccgcttgttaataaaaaagttattaatttgatcgatgaggagagaaaaattgcagcaggtgaaatggctcgacctcagtatcctgaaattccattagtagactcagattcagaagttagtgaagaatcaccatgtgaaagtgttcaggaattatacagtattgctattatcaaaccggatgctgtgattagtaaaaaagttctagaaattaaaagaaaaattaccaaagctggatttattatagaagcagagcataagacagtgctcactgaagaacaagttgtcaacttctatagtcgaatagcagaccagygtgacttcgaagagtttgtctcttttatgacaagtggcttaagctatattctagttgtatctcaaggaagtaaacacaatcctccctctgaagaaaccgaaccacagactgacaccgaacctaacgaacgatctgaggatcaacctgaggtcgaagcccaggttacacctggaatgatgaagaacaaacaagacagtttacaagaatatctggaaagrcaacatttagctcagctctgtgacattgaagaggatgcagctaatgttgctaagttcatggatgctttcttccccgattttaaaaaaatgaaaagcatgaaattagaaaagacattggcattacttcgaccaaatctctttcatgaaaggaaagatgatgttttgcrtattaytaaagatgaagacttcaaaatactggagcaaagacaagtagtattatcggaaaaagaagcacaagcactgtgcaaggaatatgaaaatgaagactattttaataaacttatagaaaacatgaccagtggtccatctctagcccttgttttattgagagacaatggcttgcaatactggaaacaattactgggaccaagaactgttgaagaagccattgaatattttccagagagtttatgtgcacagtttgcgatggacagtttgccggtcaaccagttgtatggcagcgattcattagaaaccgctgaaagggaaatacagcatttctttcctcttcaaagcactttaggcttgattaaacctcatgcaacaagtgaacaaagagagcagatcctgaagatagttaaggaggctggatttgatctgacacaggtgaagaaaatgttcctaactcctgagcaaaywgagaaaatttatccaaaagtaacaggaaaagacttttataaagatttattggaaatgttatctgtgggtccatctatggtcatgattctgaccaagtggaatgctgttgcagaatggagacgaytgatgggcccaacagacccagaagaagcaaaattactttcccctgactccatccgagcccagtttggaataagtaaattgaaaaacattgtccatggagcatctaacgcctatgaagcaaaagaggttgttaatagactctttgaggatcctgaggaaaactaaagtatatactgtgaaaactttgagaagataatacatatgttcacgtcaatatacaaccatttggcacagcttcctgggaggaataataagaaaaacatgctttggaggaaaactcaagatacaaaaatgaatggctatgcataataacaataaraatgtattccccaaacaaatcttaatgtttatttttaactgatcttccggaaaagatttaaggtatataaatgcacacaatctacaacaagataattgagggaggaacacggaatgtggggaagaagasagtaggagagatcaaataaagccaggagtggagttaaatacaaatgcatactgcctaatgtatattgaaaattggtcaaagttttgactctaaattttcttgcagaaaatgaggaaaaggatgacatgtagatttata

SEQ ID NO: 770 - DNA, 2566 bp, Homo sapiens
  misc_feature (1)...(2566): n = A,T,C or G
gggatgggagtttggggatgaggcagctgaagaacagagtcttgtgatggtggaaccaggacttcgttgttccttcattgtgtgggcagaagaggtggaggattttaggcgccacctggtcttgtccccactgcccagacaggcagggaatccctcttcttccttttgctgaatcagctggagaagaaagcccagcaggakgcctgctagcctcagcctcgggccctaccagggtcctaggtactggaatggaacttcgccgaggtcaccgctcaaacggccacaaygagggagccgatttagatcctctgggcctgttccttccttttctttaaacgtyccagtctagcttagaggaggacctgttttgttagataaatggcaagcaaaaaacgagaagtccagttacagacagtcatcaataatcaaagcctgtgggatgagatgttgcagaacaaaggcttaacagtgattgatgtttaccaagcctggtgtggaccttgcanagcaatgcaacctttattcagaaaattgaaaaatgaactgaacgaagaygaaattctgcattttgctgtcgcagaagctgacaacattgtractttgcagccatttagagataaatgtgaacctgtttttctctttagtgttaatggcaaaattatcgaaaagattcagggtgcaaatgcaccgcttgttaataaaaaagttattaatttgatcgatgaggagagaaaaattgcagcaggtgaaatggctcgacctcagtatcctgaaattccattagtagactcagattcagaagttagtgaagaatcaccatgtgaaagtgttcaggaattatacagtattgctattatcaaaccggatgctgtgattagtaaaaaagttctagaaattaaaagaaaaattaccaaagctggatttattatagaagcagagcataagacagtgctcactgaagaacaagttgtcaacttctatagtcgaatagcagaccagygtgacttcgaagagtttgtctcttttatgacaagtggcttaagctatattctagttgtatctcaaggaagtaaacacaatcctccctctgaagaaaccgaaccacagactgacaccgaacctaacgaacgatctgaggatcaacctgaggtcgaagcccaggttacacctggaatgatgaagaacaaacaagacagtttacaagaatatctggaaagrcaacatttagctcagctctgtgacattgaagaggatgcagctaatgttgctaagttcatggatgctttcttccccgattttaaaaaaatgaaaagcatgaaattagaaaagacattggcattacttcgaccaaatctctttcatgaaaggaaagatgatgttttgcrtattaytaaagatgaagacttcaaaatactggagcaaagacaagtagtattatcggaaaaagaagcacaagcactgtgcaaggaatatgaaaatgaagactattttaataaacttatagaaaacatgaccagtggtccatctctagcccttgttttattgagagacaatggcttgcaatactggaaacaattactgggaccaagaactgttgaagaagccattgaatattttccagagagtttatgtgcacagtttgcgatggacagtttgccggtcaaccagttgtatggcagcgattcattagaaaccgctgaaagggaaatacagcatttctttcctcttcaaagcactttaggcttgattaaacctcatgcaacaagtgaacaaagagagcagatcctgaagatagttaaggaggctggatttgatctgacacaggtgaagaaaatgttcctaactcctgagcaaaywgagaaaatttatccaaaagtaacaggaaaagacttttataaagatttattggaaatgttatctgtgggtccatctatggtcatgattctgaccaagtggaatgctgttgcagaatggagacgaytgatgggcccaacagacccagaagaagcaaaattactttcccctgactccatccgagcccagtttggaataagtaaattgaaaaacattgtccatggagcatctaacgcctatgaagcaaaagaggttgttaatagactctttgaggatcctgaggaaaactaaagtatatactgtgaaaactttgagaagataatacatatgttcacgtcaatatacaaccatttggcacagcttcctgggaggaataataagaaaaacatgctttggaggaaaactcaagatacaaaaatgaatggctatgcataataacaataaraatgtattccccaaacaaatcttaatgtttatttttaactgatcttccggaaaagatttaaggtatataaatgcacacaatctacaacaagataattgagggaggaacacggaatgtggggaagaagasagtaggagagatcaaataaagccaggagtggagttaaatacaaatgcatactgcctaatgtatattgaaaattggtcaaagttttgactctaaattttcttgcagaaaatgaggaaaaggatgacatgtagatttata

SEQ ID NO: 771 - DNA, 4287 bp, Homo sapiens
tccggggargggtttgccatcctcctctagttaaaagtaagggggaaaagagtaaacgcgcgactccagcgcgcggctacctacgcttggtgcttgctttctccagccatcggagaccagagccgccccctctgctcgagaaaggggctcagcggcggcggaagcggagggggaccaccgtggagagcgcggtcccagcccggccactgcggatccctgaaaccaaaaagctcctgctgcttctgtaccccgcctgtccctcccagctgcgcagggccccttcgtgrgatcatcagcccgaagacagggatggagargcctctgtgctcccacctctgcagctgcctggctatgctggccctcctgtcccccctgagcctggcacagtatgacagctggccccattaccccgagtacttccagcaaccrgctcctgagtatcaccagccmcaggcccccgccaacgtggccaagattcagctgcgcctggctgggcagaagaggaagcacagcgagggccgggtggaggtgtactatgatggccagtggggcaccgtgtgcgatgacgacttctccatccacgctgcccacgtcgtctgccgggagctgggctaygtggaggccaagtcctggactgccagctcctcctacggcaagggagaagggcccatctggttagacaatctccaytgtactggcaacgaggcgacccttgcagcmtgcacctccaatggctggggcgtcactgactgcaagcacacggaggatgtcggtgtggtgtgcagcracaaaaggattcctgggttcaaatttgacaattcgttgatcaaccagatagagaacctgaatatccaggtggaggacattcggattcgagccatcctctcaacctaccgcaagcgcaccccagtgatggagggctacgtggaggtgaaggagggcaagacctggaagcagatctgtgacaagcactggacggccaagaattcccgcgtggtctgcggcatgtttggcttccctggggagaggacatacaataccaaagtgtacaaaatgtttgcctcacggaggaagcagcgctactggccattctccatggactgcaccggcacagaggcccacatctccagctgcaagctgggcccccaggtgtcactggaccccatgaagaatgtcacctgcgagaatgggctrccggccgtggtgagttgtgtgcctgggcaggtcttcagscctgacggaccctcragattccggaaagcrtacaagccaragcaacccctggtgcgactgagaggcggtgcctacatcggggagggccgcrtggaggtgctcaaaaatggagartgggggaccgtctgcgacgacaagtgggacctggtgtcggccagtgtggtctgcagagagctgggctttgggagtgccaaagaggcagtcactggctcccgactggggcaagggatcggacccatccacctcaacgagatccagtgcacaggcaatgagaagtccattatagactgcaagttcaatgccgagtctcagggctgcaaccacgaggaggatgctggtgtgagatgcaacacccctgccatgggcttgcagaagaagctgcgcctgaacggcggccgcaatccctacgagggccgagtggaggtgctggtggagagaaacgggtcycttgtgtgggggatggwgtgtggccaaaactggggcatcgtggaggccatggtggtctgccgccagctgggcctgggattcgccagcaacgccttccaggagacctggtattggcacggagatgtcaacagcaacaaaktggtcatgagtggagtgaagtgctcgggaacggagctgtccctggcgcactgccgccacgacggggaggacgtggcctgcccccagggyggagtgcagtacggggcyggagttgcctgctcagaaaccgcccctgacctggtcctcaatgcggagatggtgcagcagaccacctacctggaggaccggcccatgttcmtgctgcagtgtgccatggaggagaactgcctctcggcctcagccgcgcagacygaccccaccacgggctaccgccggctcctgcgcttctcctcccagatccacaacaatggccagtccgacttccggcccaagaacggccgccacgcgtggatctggcacgactgtcacaggcactaccacagcatggaggtgttcacccactatgacctgctgaacctcaatggcaccaaggtggcagagggccacaaggccagcttctgcttggaggacacagaatgtgaaggagacatccagaagaattacgagtgtgccaacttcggcgatcagggcatcaccatgggctgctgggacatgtaccgccatgacatcgactgccagtgggttgacatcactgacgtgccccctggagactacctgttccaggttgttattaaccccaacttcgaggttgcagaatccgattactccaacaacatcatgaaatgcaggagccgctatgacggccaccgcatctggatgtacaactgccacataggtggttccttcagcgaagagacggaaaaaaagtttgagcacttcagcgggctcttaaacaaccagctgtccccgcagtaaagmagcctgcgtggtcaactcctgtcttcaggccacaccacatcttccatgggacttccccccaacaactgagtctgaacgaatgccacgtgccctcacccagcccggcccccaccctgtccagacccctacagctstgtctaagctcaggaggaaagggaccctcccatcattcatggrgggctgctacytgacccttggggcctgagaaggccttgsgggggtggggtttgtccacagagctgctggagcagcaccaagagccagtcttgaccgggatgaggcccacagacaggttgtcatcagcttgtcccattcaagccaccgagctcaccacagacacagtggagccgcgctcttctccagtgacacgtggacaaatgcgggctcatcagcccccccagagagggtcaggccgaaccccakttctcctcctcttaggtcattttcagcaaacttgaatatctagacctctcttccaatgaaaccctccagtctattatagtcacatagataatggtgccacgtgttttctgatttggtgagctcagacttggtgcttccctmtccacarcccccaccccttgtttttcaagatactattattatattttcacagacttttgaagcacaaatttattggcatttaatattggacatctgggcccttggaartacaaatctaaggaaaaaccaacccactgtgtaagtgactcatcttcctgttgttccaattctgtgggtttttgattcaacggtgctataaccagggtcctgggtgacagggcgctcactgagcaccatgtgtcatcacagacacttacacatacttgaaacttggaataaaagaaagatttatgaaacgtgtctgtgtttcctttgacccacagcacctgggccctgagcagcaggcttcctatgttcagtggccagaagcagagcttcaggtacattcgtggttttctccggtggacatgggtcctcagatcccctccagcccagtgtggccaccagggcacctccttcaatagactccaaaaggggcagctcctaccatctgggagaagcaatctaaggagatcacaaaaagtaacggaacaggagtcataatctttcttgaactcctgtggtttttactgaaacttgtcagaaggcataggagttgtgcgagggctggatgggaagtctagatttaacaacagccaccaggcagcttatcaaagcaagagggcatccgttcacaggacaggggctcccagcaattcccagtggcagtgggggggtggctgggccaagccagccactcacccagacacaggggacttccccttgtgtcaacagcatgctagggcccagcaaactagagggtaggtaggaccaccttggcaccaactccactcaaaccacaattgaatgagggcgtcggcrcgcattcagatctcacctcttgcctttgtttacatttattttgcaggaactggcactgactgacaggtaagaccaggaccagcccaggggtcccagaactgtcccacagcacaggccagaaggctggatacctgaactgccaaaggagtgtgggcaggtgctacacagcaggtgcaacccagctcccaaaattgggcaggctgtgcacagaggccctgcaggccc

SEQ ID NO: 772 - DNA, 4436 bp, Homo sapiens
gcagtgatgcggggcctggacttcaatattgctggtggtggtgcaaactgcaatgcgtacccsagaagggaagctggcagcttaaaagttagcagcgtgtgtgccctttgattcagagagccacttgcgcgtggctctccggagagatttctacctgggtccatgaatggacttacggaaggattccttggtaatgattctgagtgactgtgttgatggaggcaagcaaggtcttggacaagtcaaaggcggcagccatcggagaccagagccgccccctctgctcgagaaaggggctcagcggcggcggaagcggagggggaccaccgtggagagcgcggtcccagcccggccactgcggatccctgaaaccaaaaagctcctgctgcttctgtaccccgcctgtccctcccagctgcgcagggccccttcgtgrgatcatcagcccgaagacagggatggagargcctctgtgctcccacctctgcagctgcctggctatgctggccctcctgtcccccctgagcctggcacagtatgacagctggccccattaccccgagtacttccagcaaccrgctcctgagtatcaccagccmcaggcccccgccaacgtggccaagattcagctgcgcctggctgggcagaagaggaagcacagcgagggccgggtggaggtgtactatgatggccagtggggcaccgtgtgcgatgacgacttctccatccacgctgcccacgtcgtctgccgggagctgggctaygtggaggccaagtcctggactgccagctcctcctacggcaagggagaagggcccatctggttagacaatctccaytgtactggcaacgaggcgacccttgcagcmtgcacctccaatggctggggcgtcactgactgcaagcacacggaggatgtcggtgtggtgtgcagcracaaaaggattcctgggttcaaatttgacaattcgttgatcaaccagatagaggcaagtcataacctgaatatccaggtggaggacattcggattcgagccatcctctcaacctaccgcaagcgcaccccagtgatggagggctacgtggaggtgaaggagggcaagacctggaagcagatctgtgacaagcactggacggccaagaattcccgcgtggtctgcggcatgtttggcttccctggggagaggacatacaataccaaagtgtacaaaatgtttgcctcacggaggaagcagcgctactggccattctccatggactgcaccggcacagaggcccacatctccagctgcaagctgggcccccaggtgtcactggaccccatgaagaatgtcacctgcgagaatgggctrccggccgtggtgagttgtgtgcctgggcaggtcttcagscctgacggaccctcragattccggaaagcrtacaagccaraggtgcgactgagaggcggtgcctacatcggggagggccgcrtggaggtgctcaaaaatggagartgggggaccgtctgcgacgacaagtgggacctggtgtcggccagtgtggtctgcagagagctgggctttgggagtgccaaagaggcagtcactggctcccgactggggcaagggatcggacccatccacctcaacgagatccagtgcacaggcaatgagaagtccattatagactgcaagttcaatgccgagtctcagggctgcaaccacgaggaggatgctggtgtgagatgcaacacccctgccatgggcttgcagaagaagctgcgcctgaacggcggccgcaatccctacgagggccgagtggaggtgctggtggagagaaacgggtcycttgtgtgggggatggwgtgtggccaaaactggggcatcgtggaggccatggtggtctgccgccagctgggcctgggattcgccagcaacgccttccaggagacctggtattggcacggagatgtcaacagcaacaaaktggtcatgagtggagtgaagtgctcgggaacggagctgtccctggcgcactgccgccacgacggggaggacgtggcctgcccccagggyggagtgcagtacggggcyggagttgcctgctcagaaaccgcccctgacctggtcctcaatgcggagatggtgcagcagaccacctacctggaggaccggcccatgttcmtgctgcagtgtgccatggaggagaactgcctctcggcctcagccgcgcagacygaccccaccacgggctaccgccggctcctgcgcttctcctcccagatccacaacaatggccagtccgacttccggcccaagaacggccgccacgcgtggatctggcacgactgtcacaggcactaccacagcatggaggtgttcacccactatgacctgctgaacctcaatggcaccaaggtggcagagggccacaaggccagcttctgcttggaggacacagaatgtgaaggagacatccagaagaattacgagtgtgccaacttcggcgatcagggcatcaccatgggctgctgggacatgtaccgccatgacatcgactgccagtgggttgacatcactgacgtgccccctggagactacctgttccaggttgttattaaccccaacttcgaggttgcagaatccgattactccaacaacatcatgaaatgcaggagccgctatgacggccaccgcatctggatgtacaactgccacataggtggttccttcagcgaagagacggaaaaaaagtttgagcacttcagcgggctcttaaacaaccagctgtccccgcagtaaagmagcctgcgtggtcaactcctgtcttcaggccacaccacatcttccatgggacttccccccaacaactgagtctgaacgaatgccacgtgccctcacccagcccggcccccaccctgtccagacccctacagctstgtctaagctcaggaggaaagggaccctcccatcattcatggrgggctgctacytgacccttggggcctgagaaggccttgsgggggtggggtttgtccacagagctgctggagcagcaccaagagccagtcttgaccgggatgaggcccacagacaggttgtcatcagcttgtcccattcaagccaccgagctcaccacagacacagtggagccgcgctcttctccagtgacacgtggacaaatgcgggctcatcagcccccccagagagggtcaggccgaaccccakttctcctcctcttaggtcattttcagcaaacttgaatatctagacctctcttccaatgaaaccctccagtctattatagtcacatagataatggtgccacgtgttttctgatttggtgagctcagacttggtgcttccctmtccacarcccccaccccttgtttttcaagatactattattatattttcacagacttttgaagcacaaatttattggcatttaatattggacatctgggcccttggaartacaaatctaaggaaaaaccaacccactgtgtaagtgactcatcttcctgttgttccaattctgtgggtttttgattcaacggtgctataaccagggtcctgggtgacagggcgctcactgagcaccatgtgtcatcacagacacttacacatacttgaaacttggaataaaagaaagatttatgaaacgtgtctgtgtttcctttgacccacagcacctgggccctgagcagcaggcttcctatgttcagtggccagaagcagagcttcaggtacattcgtggttttctccggtggacatgggtcctcagatcccctccagcccagtgtggccaccagggcacctccttcaatagactccaaaaggggcagctcctaccatctgggagaagcaatctaaggagatcacaaaaagtaacggaacaggagtcataatctttcttgaactcctgtggtttttactgaaacttgtcagaaggcataggagttgtgcgagggctggatgggaagtctagatttaacaacagccaccaggcagcttatcaaagcaagagggcatccgttcacaggacaggggctcccagcaattcccagtggcagtgggggggtggctgggccaagccagccactcacccagacacaggggacttccccttgtgtcaacagcatgctagggcccagcaaactagagggtaggtaggaccaccttggcaccaactccactcaaaccacaattgaatgagggcgtcggcrcgcattcagatctcacctcttgcctttgtttacatttattttgcaggaactggcactgactgacaggtaagaccaggaccagcccaggggtcccagaactgtcccacagcacaggccagaaggctggatacctgaactgccaaaggagtgtgggcaggtgctacacagcaggtgcaacccagctcccaaaattgggcaggctgtgcacagaggccctgcaggccc

SEQ ID NO: 773 - DNA, 3134 bp, Homo sapiens
gcagtgatgcggggcctggacttcaatattgctggtggtggtgcaaactgcaatgcgtacccsagaagggaagctggcagcttaaaagttagcagcgtgtgtgccctttgattcagagagccacttgcgcgtggctctccggagagatttctacctgggtccatgaatggacttacggaaggattccttggtaatgattctgagtgactgtgttgatggaggcaagcaaggtcttggacaagtcaaaggcggcagccatcggagaccagagccgccccctctgctcgagaaaggggctcagcggcggcggaagcggagggggaccaccgtggagagcgcggtcccagcccggccactgcggatccctgaaaccaaaaagctcctgctgcttctgtaccccgcctgtccctcccagctgcgcagggccccttcgtgrgatcatcagcccgaagacagggatggagargcctctgtgctcccacctctgcagctgcctggctatgctggccctcctgtcccccctgagcctggcacagtatgacagctggccccattaccccgagtacttccagcaaccrgctcctgagtatcaccagccmcaggcccccgccaacgtggccaagattcagctgcgcctggctgggcagaagaggaagcacagcgagggccgggtggaggtgtactatgatggccagtggggcaccgtgtgcgatgacgacttctccatccacgctgcccacgtcgtctgccgggagctgggctaygtggaggccaagtcctggactgccagctcctcctacggcaagggagaagggcccatctggttagacaatctccaytgtactggcaacgaggcgacccttgcagcmtgcacctccaatggctggggcgtcactgactgcaagcacacggaggatgtcggtgtggtgtgcagcracaaaaggattcctgggttcaaatttgacaattcgttgatcaaccagatagagaacctgaatatccaggtggaggacattcggattcgagccatcctctcaacctaccgcaagcgcaccccagtgatggagggctacgtggaggtgaaggagggcaagacctggaagcagatctgtgacaagcactggacggccaagaattcccgcgtggtctgcggcatgtttggcttccctggggagaggacatacaataccaaagtgtacaaaatgtttgcctcacggaggaagcagcgctactggccattctccatggactgcaccggcacagaggcccacatctccagctgcaagctgggcccccaggtgtcactggaccccatgaagaatgtcacctgcgagaatgggctrccggccgtggtgagttgtgtgcctgggcaggtcttcagscctgacggaccctcragattccggaaagcrtacaagccaragcaacccctggtgcgactgagaggcggtgcctacatcggggagggccgcrtggaggtgctcaaaaatggagartgggggaccgtctgcgacgacaagtgggacctggtgtcggccagtgtggtctgcagagagctgggctttgggagtgccaaagaggcagtcactggctcccgactggggcaagggatcggacccatccacctcaacgagatccagtgcacaggcaatgagaagtccattatagactgcaagttcaatgccgagtctcagggctgcaaccacgaggaggatgctggtgtgagatgcaacacccctgccatgggcttgcagaagaagctgcgcctgaacggcggccgcaatccctacgagggccgagtggaggtgctggtggagagaaacgggtcycttgtgtgggggatggwgtgtggccaaaactggggcatcgtggaggccatggtggtctgccgccagctgggcctgggattcgccagcaacgccttccaggagacctggtattggcacggagatgtcaacagcaacaaaktggtcatgagtggagtgaagtgctcgggaacggagctgtccctggcgcactgccgccacgacggggaggacgtggcctgcccccagggyggagtgcagtacggggcyggagttgcctgctcagaaaccgcccctgacctggtcctcaatgcggagatggtgcagcagaccacctacctggaggaccggcccatgttcmtgctgcagtgtgccatggaggagaactgcctctcggcctcagccgcgcagacygaccccaccacgggctaccgccggctcctgcgcttctcctcccagatccacaacaatggccagtccgacttccggcccaagaacggccgccacgcgtggatctggcacgactgtcacaggcactaccacagcatggaggtgttcacccactatgacctgctgaacctcaatggcaccaaggtggcagagggccacaaggccagcttctgcttggaggacacagaatgtgaaggagacatccagaagaattacgagtgtgccaacttcggcgatcagggcatcaccatgggctgctgggacatgtaccgccatgacatcgactgccagtgggttgacatcactgacgtgccccctggagactacctgttccaggttgttattaaccccaacttcgaggttgcagaatccgattactccaacaacatcatgaaatgcaggagccgctatgacggccaccgcatctggatgtacaactgccacataggtggttccttcagcgaagagacggaaaaaaagtttgagcacttcagcgggctcttaaacaaccagctgtccccgcagtaaagmagcctgcgtggtcaactcctgtcttcaggccacaccacatcttccatgggacttccccccaacaactgagtctgaacgaatgccacgtgccctcacccagcccggcccccaccctgtccagacccctacagctstgtctaagctcaggaggaaagggaccctcccatcattcatggrgggctgctacytgacccttggggcctgagaaggccttgsgggggtggggtttgtccacagagctgctggagcagcaccaagagccagtcttgaccgggatgaggctcttctccagtgacacgtggacaaatgcgggctcatcagcccccccagagagggtcaggccgaacc

SEQ ID NO: 774 - DNA, 2018 bp, Homo sapiens
cgacgctggcggaggttgcggacagccggcggggagcggttctgctccgggaggatgcggctttgccgcggccggcgggcggggcggggccgggccggggagggtgcggggttctggtggtcacgtgggctcgagcaccgccctgtccgcccgcccgcctcgaatgtccctgagacccagaagggcctgcgctcagctgctctggcaccccgctgcagggatggcctcctgggctaagggcaggagctacctggcgcctggtttgctgcagggccaagtggccatcgtcaccggcggggccacgggcatcggaaaagccatcgtgaaggagctcctggagctggggagtaatgtggtcattgcatcccgtaagttggagagattgaagtctgcggcagatgarctgcaggccaacctacctcccacaaagcaggcacgagtcattcccatacaatgcaacatccggaatgaggaggaggtgaataatttggtcaaatctaccttagatacttttggtaagatcaatttcttggtgaacaatggaggaggccagtttctttcccctgctgaacacatcagttctaagggatggcacgctgtgcttgagaccaacctgacgggtaccttctacatgtgcaaagcagtttacagctcctggatgaaaragcatggaggatctatcgtcaatatcattgtccctactaaagctggatttccattagctstgcattctggagctgcaagagcaggtgtttacaacctcaccaaatctttagctttggaatggscctgcagtggaatacggatcaattgtgttgcccctggagttatttattcccagactgctgtggagaactatggttcctggggacaaagcttctttgaagggtcttttcagaaaatccccgctaaacgaattggtgttcctgaggaggtctcctctgtggtctgcttcctactgtctcctgcagcttccttcatcactggacagtcrgtggatgtggatgggggccggagtctctatactcactcgtatgaggtaccagatcatgacaactggcccaagggagcaggggacctttctgttgtcaaaaagatgaaggagaccttwaaggagaaagctaagctctgagctgaggaaacaaggtgtcctccatcccccagtgccttcacatcttraggatatgcttctgtactttttaaaagcttatagttggtatggaaaacatttttytkwtttttaagtgttattaattatatctatggaaaaactattcctgaaatatatacagtcttatgtcccaatcagagtcttttaacctatgatttaaaaatgtataagtaacagaaattaacatattttaatgactttactttttatttctaagaaaagtatttgaaaaatggaataattttaaatcaatgataattctagggatcatgaactcccagaagattttattatttaattgtaaaggtagaggccagacgcagtggctcacgcctgtaattccagcactttgggaggccgaggtaggcgggtcagttgaggtcaggagttcaagaccaggctggccaacatggtaaaaccctgtctctactgaaaaacaacaaaaacaaaaacacaaattagtcgggtgtggtggcacacacctgtagtcccaggtacttgggaggctgaggcaggaggatcgcttgaacccaggaagcagaggttgcagtgagctgagatcatgctactgcagtccagcctgggctacagagtgagactgcatctcaaaaaaaacccaaaaaacaaaaacaaacaacaacaacaaaattawaaaggtagaaaataaacctaaattgtgtcgtaattaagattattaaaattagaattatacaatgacttatttttggtggcaaatactttaggagcaataatgccttatggtaattattgatgtatagtttcttttgtttatgaagtcaaatttgtataaattctcttaattcaaagaaaaagttttatgtgattt

SEQ ID NO: 775 - DNA, 2024 bp, Homo sapiens
cgacgctggcggaggttgcggacagccggcggggagcggttctgctccgggaggatgcggctttgccgcggccggcgggcggggcggggccgggccggggagggtgcggggttctggtggtcacgtgggctcgagcaccgccctgtccgcccgcccgcctcgaatgtccctgagacccagaagggcctgcgctcagctgctctggcaccccgctgcagggatggcctcctgggctaagggcaggagctacctggcgcctggtttgctgcagggccaagtggccatcgtcaccggcggggccacgggcatcggaaaagccatcgtgaaggagctcctggagctggggagtaatgtggtcattgcatcccgtaagttggagagattgaagtctgcggcagatgarctgcaggccaacctacctcccacaaagcaggcacgagtcattcccatacaatgcaacatccggaatgaggaggaggtgaataatttggtcaaatctaccttagatacttttggtaagatcaatttcttggtgaacaatggaggaggccagtttctttcccctgctgaacacatcagttctaagggatggcacgctgtgcttgagaccaacctgacgggtaccttctacatgtgcaaagcaggcaagtaccatcactcctggatgaaaragcatggaggatctatcgtcaatatcattgtccctactaaagctggatttccattagctstgcattctggagctgcaagagcaggtgtttacaacctcaccaaatctttagctttggaatggscctgcagtggaatacggatcaattgtgttgcccctgtagttatttattcccagactgctgtggagaactatggttcctggggacaaagcttctttgaagggtcttttcagaaaatccccgctaaacgaattggtgttcctgaggaggtctcctctgtggtctgcttcctactgtctcctgcagcttccttcatcactggacagtcrgtggatgtggatgggggccggagtctctatactcactcgtatgaggtaccagatcatgacaactggcccaagggagcaggggacctttctgttgtcaaaaagatgaaggagaccttwaaggagaaagctaagctctgagctgaggaaacaaggtgtcctccatcccccagtgccttcacatcttraggatatgcttctgtactttttaaaagcttatagttggtatggaaaacatttttytkwtttttaagtgttattaattatatctatggaaaaactattcctgaaatatatacagtcttatgtcccaatcagagtcttttaacctatgatttaaaaatgtataagtaacagaaattaacatattttaatgactttactttttatttctaagaaaagtatttgaaaaatggaataattttaaatcaatgataattctagggatcatgaactcccagaagattttattatttaattgtaaaggtagaggccagacgcagtggctcacgcctgtaattccagcactttgggaggccgaggtaggcgggtcagttgaggtcaggagttcaagaccaggctggccaacatggtaaaaccctgtctctactgaaaaacaacaaaaacaaaaacacaaattagtcgggtgtggtggcacacacctgtagtcccaggtacttgggaggctgaggcaggaggatcgcttgaacccaggaagcagaggttgcagtgagctgagatcatgctactgcagtccagcctgggctacagagtgagactgcatctcaaaaaaaacccaaaaaacaaaaacaaacaacaacaacaaaattawaaaggtagaaaataaacctaaattgtgtcgtaattaagattattaaaattagaattatacaatgacttatttttggtggcaaatactttaggagcaataatgccttatggtaattattgatgtatagtttcttttgtttatgaagtcaaatttgtataaattctcttaattcaaagaaaaagttttatgtgattt

SEQ ID NO: 776 - DNA, 2033 bp, Homo sapiens
cggtctgcgtcctcgcctgcggccccccacgctcccgccttggcggcggccggcgggacccggcactgcaggggcggcgctgcgggattgaaagccagcgtccccgctccccggccgggccgcagcctgcgtggggcccgccttagagcagctcgcgggtccttatttagtgtctctgacaaaaccggccttgtggaatttgcaagaaacctgaccgctcttggtttgaatctggtcgcttccggagggactgcaaaagctctcagggatgctggtctggcagtcagagatgtctctgagttgacgggatttcctgaaatgttggggggacgtgtgaaaactttgcatcctgcagtccatgctggaatcctagctcgtaatattccagaagataatgctgacatggccagacttgatttcaatcttataagagttgttgcctgcaatctctatccctttgtaaagacagtggcttctccaggtgtaastgttgaggaggctgtggagcaaattgacattggtggagtaaccttactgagagctgcagccaaaaaccacgctcgagtgacagtggtgtgtgaaccagaggactatgtggtggtgtccacggagatgcagagctccgagagtaaggacacctccttggagactagacgccagttagccttgaaggcattcactcatacggcacaatatgatgaagcaatttcagattatttcaggaaacagtacagcaaaggygtatctcagatgcccttgagatatggaatgaacccacatcagacscctgcccagctgtacacactgcagcccaagcttcccatcacagttctaaatggagcccctggatttataaacttgtgcgatgctttgaacgcctggcagctggtgaaggaactcaaggaggctttaggtattccagccgctgcctctttcaaacatgtcagcccagcaggtgctgctgttggaattccactcagtgaagatgaggccaaagtctgcatggtttatgatctctataaaaccctcacacccatctcagcggcatatgcaagagcaagaggggctgataggatgtcttcatttggtgattttgttgcattgtccgatgtttgtgatgtaccaactgcaaaaattatttccagagaagtatctgatggtataattgccccaggatatgaagaagaagccttgacaatactttccaaaaagaaaaatggaaactattgtgtccttcagatggaccaatcttacaaaccagatgaaaatgaagttcgaactctctttggtcttcatttaagccagaagagaaataatggtgtcgtcgacaagtcattatttagcaatgttgttaccaaaaataaagatttgccagagtctgccctccgagacctcatcgtagccaccattgctgtcaagtacactcagtctaactctgtgtgctacgccaagaacgggcaggttatcggcattggagcaggacagcagtctcgtatacactgcactcgccttgcaggagataaggcaaactattggtggcttagacaccatycacaagtgctttcgatgaagtttaaaacaggagtgaagagagcagaaatctccaatgccatcgatcaatatgtgactggaaccattgrcgaggatgaagatttgataaagtggaaggcactgtttgaggaagtccctgagttactcactgaggcagagaagaaggaatgggttgagaaactgactgaagtttctatcagctctgatgccttcttccctttccgagataacgtagacagagctaaaaggagtggtgtggcgtacattgcggctccctccggttctgctgctgacaaagttgtgattgaggcctgcgacgaactgggaatcatcctcgctcrtacgaaccttcggctcttccaccactgattttaccacacactgttttttggcttgcttatgtgtaggtgaacagtcacgcctgaaactttgaggataactttttaaaaaaataaaacagtatctcttaatcactggatcca

SEQ ID NO: 777 - DNA, 2584 bp, Homo sapiens
gctactcgggaggctgaggcaggataaactcttgaacccgggatgtggaggttgcaggttgcacgtgacatagccgagatcgcgccattgcactccagcctgggcaacaaaagcgaaactccatctcaaaaaaaaaaaaaaaaaacaaaaaaaacaaaaaaacccagaaaaacaaaaaaacaacaaacaaaaagggaggatggtagataactgtccagatactttccagctttgccgctatatgaactattccttttgtttagttttcagcatgggagcttctggcacttttacgtactttccagcttctggggaccggctgcctagaataacaggcatttgccccagaggccgtggagtggcctcactttggggtcgtgggcagatcgctggctcccacgcctggacttcgggatcgcaggcaggatcccttccagcccaagcactccgcccaggcgcrccaggcagagccccrccccatcccgccgttcccttcagccccggggcgcggatcttgcatctgaaactgagcagagcagggcgccgggcagggccggcgggccacgtgataagcccggaaacagctccgccccctcgcttcctgagycgccacatcccggcagccctcctayckgcgcacgtggtgccgcygctgctgcctcccgctcgycctgaacycagtgcctgcagccatggctcccggccagctcgccttatttagtgtctctgacaaaaccggccttgtggaatttgcaagaaacctgaccgctcttggtttgaatctggtcgcttccggagggactgcaaaagctctcagggatgctggtctggcagtcagagatgtctctgagttgacgggatttcctgaaatgttggggggacgtgtgaaaactttgcatcctgcagtccatgctggaatcctagctcgtaatattccagaagataatgctgacatggccagacttgatttcaatcttataagagttgttgcctgcaatctctatccctttgtaaagacagtggcttctccaggtgtaastgttgaggaggctgtggagcaaattgacattggtggagtaaccttactgagagctgcagccaaaaaccacgctcgagtgacagtggtgtgtgaaccagaggactatgtggtggtgtccacggagatgcagagctccgagagtaaggacacctccttggagactagacgccagttagccttgaaggcattcactcatacggcacaatatgatgaagcaatttcagattatttcaggaaacagtacagcaaaggygtatctcagatgcccttgagatatggaatgaacccacatcagacscctgcccagctgtacacactgcagcccaagcttcccatcacagttctaaatggagcccctggatttataaacttgtgcgatgctttgaacgcctggcagctggtgaaggaactcaaggaggctttaggtattccagccgctgcctctttcaaacatgtcagcccagcaggtgctgctgttggaattccactcagtgaagatgaggccaaagtctgcatggtttatgatctctataaaaccctcacacccatctcagcggcatatgcaagagcaagaggggctgataggatgtcttcatttggtgattttgttgcattgtccgatgtttgtgatgtaccaactgcaaaaattatttccagagaagtatctgatggtataattgccccaggatatgaagaagaagccttgacaatactttccaaaaagaaaaatggaaactattgtgtccttcagatggaccaatcttacaaaccagatgaaaatgaagttcgaactctctttggtcttcatttaagccagaagagaaataatggtgtcgtcgacaagtcattatttagcaatgttgttaccaaaaataaagatttgccagagtctgccctccgagacctcatcgtagccaccattgctgtcaagtacactcagtctaactctgtgtgctacgccaagaacgggcaggttatcggcattggagcaggacagcagtctcgtatacactgcactcgccttgcaggagataaggcaaactattggtggcttagacaccatycacaagtgctttcgatgaagtttaaaacaggagtgaagagagcagaaatctccaatgccatcgatcaatatgtgactggaaccattgrcgaggatgaagatttgataaagtggaaggcactgtttgaggaagtccctgagttactcactgaggcagagaagaaggaatgggttgagaaactgactgaagtttctatcagctctgatgccttcttccctttccgagataacgtagacagagctaaaaggagtggtgtggcgtacattgcggctccctccggttctgctgctgacaaagttgtgattgaggcctgcgacgaactgggaatcatcctcgctcrtacgaaccttcggctcttccaccactgattttaccacacactgttttttggcttgcttatgtgtaggtgaacagtcacgcctgaaactttgaggataactttttaaaaaaataaaacagtatctcttaatcactggatcca

SEQ ID NO: 778 - DNA, 2763 bp, Homo sapiens
gctactcgggaggctgaggcaggataaactcttgaacccgggatgtggaggttgcaggttgcacgtgacatagccgagatcgcgccattgcactccagcctgggcaacaaaagcgaaactccatctcaaaaaaaaaaaaaaaaaacaaaaaaaacaaaaaaacccagaaaaacaaaaaaacaacaaacaaaaagggaggatggtagataactgtccagatactttccagctttgccgctatatgaactattccttttgtttagttttcagcatgggagcttctggcacttttacgtactttccagcttctggggaccggctgcctagaataacaggcatttgccccagaggccgtggagtggcctcactttggggtcgtgggcagatcgctggctcccacgcctggacttcgggatcgcaggcaggatcccttccagcccaagcactccgcccaggcgcrccaggcagagccccrccccatcccgccgttcccttcagccccggggcgcggatcttgcatctgaaactgagcagagcagggcgccgggcagggccggcgggccacgtgataagcccggaaacagctccgccccctcgcttcctgagycgccacatcccggcagccctcctayckgcgcacgtggtgccgcygctgctgcctcccgctcgycctgaacycagtgcctgcagccatggctcccggccagctcgccttatttagtgtctctgacaaaaccggccttgtggaatttgcaagaaacctgaccgctcttggtttgaatctggtcgcttccggagggactgcaaaagctctcagggatgctggtctggcagtcagagatgtctctgagttgacgggatttcctgaaatgttggggggacgtgtgaaaactttgcatcctgcagtccatgctggaatcctagctcgtaatattccagaagataatgctgacatggccagacttgatttcaatcttataagatagctgtaaaccacatgagtggackttttaatgacagccagattcgtctttgttttatagagttgttgcctgcaatctctatccctttgtaaagacagtggcttctccaggtgtaastgttgaggaggctgtggagcaaattgacattggtggagtaaccttactgagagctgcagccaaaaaccacgctcgagtgacagtggtgtgtgaaccagaggactatgtggtggtgtccacggagatgcagagctccgagagtaaggacacctccttggagactagacgccagttagccttgaaggcattcactcatacggcacaatatgatgaagcaatttcagattatttcaggaaacagtacagcaaaggygtatctcagatgcccttgagatatggaatgaacccacatcagacscctgcccagctgtacacactgcagcccaagcttcccatcacagttctaaatggagcccctggatttataaacttgtgcgatgctttgaacgcctggcagctggtgaaggaactcaaggaggctttaggtattccagccgctgcctctttcaaacatgtcagcccagcaggtgctgctgttggaattccactcagtgaagatgaggccaaagtctgcatggtttatgatctctataaaaccctcacacccatctcagcggcatatgcaagagcaagagcttcttgctctgttgcccaggctggagtgcagtggcgccatctcagctcactgcaacctccacctcctgggttcaagcgattctcctgcctcagcgtcctgagtagctgggattacaggggctgataggatgtcttcatttggtgattttgttgcattgtccgatgtttgtgatgtaccaactgcaaaaattatttccagagaagtatctgatggtataattgccccaggatatgaagaagaagccttgacaatactttccaaaaagaaaaatggaaactattgtgtccttcagatggaccaatcttacaaaccagatgaaaatgaagttcgaactctctttggtcttcatttaagccagaagagaaataatggtgtcgtcgacaagtcattatttagcaatgttgttaccaaaaataaagatttgccagagtctgccctccgagacctcatcgtagccaccattgctgtcaagtacactcagtctaactctgtgtgctacgccaagaacgggcaggttatcggcattggagcaggacagcagtctcgtatacactgcactcgccttgcaggagataaggcaaactattggtggcttagacaccatycacaagtgctttcgatgaagtttaaaacaggagtgaagagagcagaaatctccaatgccatcgatcaatatgtgactggaaccattgrcgaggatgaagatttgataaagtggaaggcactgtttgaggaagtccctgagttactcactgaggcagagaagaaggaatgggttgagaaactgactgaagtttctatcagctctgatgccttcttccctttccgagataacgtagacagagctaaaaggagtggtgtggcgtacattgcggctccctccggttctgctgctgacaaagttgtgattgaggcctgcgacgaactgggaatcatcctcgctcrtacgaaccttcggctcttccaccactgattttaccacacactgttttttggcttgcttatgtgtaggtgaacagtcacgcctgaaactttgaggataactttttaaaaaaataaaacagtatctcttaatcactggatcca

SEQ ID NO: 779 - DNA, 2280 bp, Homo sapiens
gtggtgccgcygctgctgcctcccgctcgycctgaacycagtgcctgcagccatggctcccggccagctcggtgaggccctagcggagcggcgcggtctgcgtcctcgcctgcggccccccacgctcccgccttggcggcggccggcgggacccggcactgcaggggcggcgctgcgggattgaaagccagcgtccccgctccccggccgggccgcagcctgcgtggggcccgccttagagcagctcgcgggtgtaagacctggggaggcccggaccaggcctgcgaacgcagggtccaggtgctggccttgcgattcgagaatctcctcccccagaccctcccaaggccttgcagaacacagtgcaatgtgctgcgaatcatgagaaaaaatgtcttctctttcagccttatttagtgtctctgacaaaaccggccttgtggaatttgcaagaaacctgaccgctcttggtttgaatctggtcgcttccggagggactgcaaaagctctcagggatgctggtctggcagtcagagatgtctctgagttgacgggatttcctgaaatgttggggggacgtgtgaaaactttgcatcctgcagtccatgctggaatcctagctcgtaatattccagaagataatgctgacatggccagacttgatttcaatcttataagagttgttgcctgcaatctctatccctttgtaaagacagtggcttctccaggtgtaastgttgaggaggctgtggagcaaattgacattggtggagtaaccttactgagagctgcagccaaaaaccacgctcgagtgacagtggtgtgtgaaccagaggactatgtggtggtgtccacggagatgcagagctccgagagtaaggacacctccttggagactagacgccagttagccttgaaggcattcactcatacggcacaatatgatgaagcaatttcagattatttcaggaaacagtacagcaaaggygtatctcagatgcccttgagatatggaatgaacccacatcagacscctgcccagctgtacacactgcagcccaagcttcccatcacagttctaaatggagcccctggatttataaacttgtgcgatgctttgaacgcctggcagctggtgaaggaactcaaggaggctttaggtattccagccgctgcctctttcaaacatgtcagcccagcaggtgctgctgttggaattccactcagtgaagatgaggccaaagtctgcatggtttatgatctctataaaaccctcacacccatctcagcggcatatgcaagagcaagaggggctgataggatgtcttcatttggtgattttgttgcattgtccgatgtttgtgatgtaccaactgcaaaaattatttccagagaagtatctgatggtataattgccccaggatatgaagaagaagccttgacaatactttccaaaaagaaaaatggaaactattgtgtccttcagatggaccaatcttacaaaccagatgaaaatgaagttcgaactctctttggtcttcatttaagccagaagagaaataatggtgtcgtcgacaagtcattatttagcaatgttgttaccaaaaataaagatttgccagagtctgccctccgagacctcatcgtagccaccattgctgtcaagtacactcagtctaactctgtgtgctacgccaagaacgggcaggttatcggcattggagcaggacagcagtctcgtatacactgcactcgccttgcaggagataaggcaaactattggtggcttagacaccatycacaagtgctttcgatgaagtttaaaacaggagtgaagagagcagaaatctccaatgccatcgatcaatatgtgactggaaccattgrcgaggatgaagatttgataaagtggaaggcactgtttgaggaagtccctgagttactcactgaggcagagaagaaggaatgggttgagaaactgactgaagtttctatcagctctgatgccttcttccctttccgagataacgtagacagagctaaaaggagtggtgtggcgtacattgcggctccctccggttctgctgctgacaaagttgtgattgaggcctgcgacgaactgggaatcatcctcgctcrtacgaaccttcggctcttccaccactgattttaccacacactgttttttggcttgcttatgtgtaggtgaacagtcacgcctgaaactttgaggataactttttaaaaaaataaaacagtatctcttaatcactggatcca

SEQ ID NO: 780 - DNA, 2403 bp, Homo sapiens
tcgtaggaaaaattatgacatcaacatccaaaggaattcttcgcccatttttaattgtctgcattatcctgggctgtttcatggcatgtcttctcatttacatcaaacctaccaacagctggatcttcagtccaatggaatcagccagctctgtgctgaaaatgaaaaacttcttttccaccaaaactgattattttaatgaaactactattctggtgtgggtgtggccatttgggcagacctttgaccttacatcctgccaagcaatgttcaacatccaaggatgccatctcacaacggaccgttcactgtacaacaaatcccatgcagttctgatccatcaccgagacatcagttgggatctgacaaatttacctcagcaagctaggccacccttccagaaatggatttggatgaatttggaatcaccaactcacactccccaaaagagtggcattgagcacttgtttaacctgactctgacttaccgccgtgattcagatatccaagtgccttatggcttcttgacggtaagcacaaatcccttcgtgtttgaagtgccaagcaaagagaaattggtgtgctgggttgtgagtaactggaaccctgagcatgccagagtcaagtattacaatgagctaagcaaaagcattgaaatccatacctacgggcaagcatttggagaatatgtcaatgataaaaatttgattcctaccatatctrcttgtaaattttatctttcctttgaaaattcaatccacaaggattacatcacggaaaagctatacaatgcttttctggctggctctgtacctgttgttctgggaccatctagggaaaactatgagaattatattccagcagattcattcattcatgtggaagattataactctcccagtgagctagcaaagtatctgaaggaagtcgacaaaaacaataagttataccttagttactttaactggaggaaggatttcactgtaaatcttccacgattttgggaatcacatgcatgtttggcttgcgatcatgtgaaaaggcatcaagaatataagtctgttggtaatttagagaaatggttttggaattaaaatttttcatcacttgcacacttgataaatattttgatgagatatcatccaagtattgaggataagaagagatgcaacatactacttttgtgtcacaatttatttttatcaccctctctagggtaacgtgtatattttggtggagatttttaaaagctcagcatgagcaatcattccattcggttttaaattatcctgtatatacctaattatgtgcactggagagtaatttattcttcattatcatttgtaaacattgytttttcacatttttgtagttgtccataatgtaagcttgtggtttgattattgtttccacactgatcagctgtttaatctatttgggaaatgaagatgcacatcttaaagtatgaaaaattttcactaagtattacaatgtctagttccaactttgcatactataacagaggaagaacatgttgcgattgaattctaacctctttgactcctaagatgaatgaagtgtataactgtctctatttgatctattttttttacctgtttatcacatttgtgaaggtgaaattattcatggagtgaataagaaagatatgaagcagaactgttctattcaggaagctattagacttctcatttattttcattaagctgatttgcagctacttattctcatggtcttaaattaaattattcaagtatttttaaatatccaatttgttgtgattttcagcacctgggaagtaatcccaataatactttagaaaatctaagacagttctttctgctactgatgacactcattgtcataataaaacaaataatttcctcaaataacaaagaaaaatgatacctataaatatatttataaatggtgtcatttatgaacaatgtttaattatgtatcaatttaagatttttttctgaagccctaatatttaaaatggccttattttaccatatggatataagatttggctcataatgatgagccctatcatttgatttgagttctatcatttaagagagcctaaataaaattatcatcaaggtattaaatataagacgttaaatataataaagtggggatatatagaaaacacacagtgttagcacasagtaagatctcaatgcacatttgttggatgaataaataaatgcaattgaattcccagaaaaatgattgtttcaaggaagtgacagttctactttagaagtactaattggagatgacttttatatcccattttggtaattattcatacatagcacatatgaccatgatgttcagggctttatagaaccaaataaacctaccattacatgaaaa

SEQ ID NO: 781 - DNA, 2710 bp, Homo sapiens
cagcttcagcgaagccggagatgggcagagagcgcgcgcggcgcagcagctccagattcactgctctcccctgcagctccccgcgcccccgccgctgtcgctgcctcggtgtcccccagccccagtcgcgctcttaggacagcgccgccaccgccgcctggccctgcctgcctcctgcgccgcgcagccctcgcgagcgccccggatggcgctttacccctaggaccgatttagaatgtaataactcaaggatttgataatacagtgaagtagtataacaactgtctacgtgcttcccatgatatgttctctatattgaaaaattatgacatcaacatccaaaggaattcttcgcccatttttaattgtctgcattatcctgggctgtttcatggcatgtcttctcatttacatcaaacctaccaacagctggatcttcagtccaatggaatcagccagctctgtgctgaaaatgaaaaacttcttttccaccaaaactgattattttaatgaaactactattctggtgtgggtgtggccatttgggcagacctttgaccttacatcctgccaagcaatgttcaacatccaaggatgccatctcacaacggaccgttcactgtacaacaaatcccatgcagttctgatccatcaccgagacatcagttgggatctgacaaatttacctcagcaagctaggccacccttccagaaatggatttggatgaatttggaatcaccaactcacactccccaaaagagtggcattgagcacttgtttaacctgactctgacttaccgccgtgattcagatatccaagtgccttatggcttcttgacggtaagcacaaatcccttcgtgtttgaagtgccaagcaaagagaaattggtgtgctgggttgtgagtaactggaaccctgagcatgccagagtcaagtattacaatgagctaagcaaaagcattgaaatccatacctacgggcaagcatttggagaatatgtcaatgataaaaatttgattcctaccatatctrcttgtaaattttatctttcctttgaaaattcaatccacaaggattacatcacggaaaagctatacaatgcttttctggctggctctgtacctgttgttctgggaccatctagggaaaactatgagaattatattccagcagattcattcattcatgtggaagattataactctcccagtgagctagcaaagtatctgaaggaagtcgacaaaaacaataagttataccttagttactttaactggaggaaggatttcactgtaaatcttccacgattttgggaatcacatgcatgtttggcttgcgatcatgtgaaaaggcatcaagaatataagtctgttggtaatttagagaaatggttttggaattaaaatttttcatcacttgcacacttgataaatattttgatgagatatcatccaagtattgaggataagaagagatgcaacatactacttttgtgtcacaatttatttttatcaccctctctagggtaacgtgtatattttggtggagatttttaaaagctcagcatgagcaatcattccattcggttttaaattatcctgtatatacctaattatgtgcactggagagtaatttattcttcattatcatttgtaaacattgytttttcacatttttgtagttgtccataatgtaagcttgtggtttgattattgtttccacactgatcagctgtttaatctatttgggaaatgaagatgcacatcttaaagtatgaaaaattttcactaagtattacaatgtctagttccaactttgcatactataacagaggaagaacatgttgcgattgaattctaacctctttgactcctaagatgaatgaagtgtataactgtctctatttgatctattttttttacctgtttatcacatttgtgaaggtgaaattattcatggagtgaataagaaagatatgaagcagaactgttctattcaggaagctattagacttctcatttattttcattaagctgatttgcagctacttattctcatggtcttaaattaaattattcaagtatttttaaatatccaatttgttgtgattttcagcacctgggaagtaatcccaataatactttagaaaatctaagacagttctttctgctactgatgacactcattgtcataataaaacaaataatttcctcaaataacaaagaaaaatgatacctataaatatatttataaatggtgtcatttatgaacaatgtttaattatgtatcaatttaagatttttttctgaagccctaatatttaaaatggccttattttaccatatggatataagatttggctcataatgatgagccctatcatttgatttgagttctatcatttaagagagcctaaataaaattatcatcaaggtattaaatataagacgttaaatataataaagtggggatatatagaaaacacacagtgttagcacasagtaagatctcaatgcacatttgttggatgaataaataaatgcaattgaattcccagaaaaatgattgtttcaaggaagtgacagttctactttagaagtactaattggagatgacttttatatcccattttggtaattattcatacatagcacatatgaccatgatgttcagggctttatagaaccaaataaacctaccattacatg

SEQ ID NO: 782 - DNA, 2482 bp, Homo sapiens
atttagaatgtaataactcaaggatttgataatacagtgaagtagtataacaactgtctacgtgcttcccatgatatgttctctatattgaaaaattatgacatcaacatccaaaggaattcttcgcccatttttaattgtctgcattatcctgggctgtttcatggcatgtcttctcatttacatcaaacctaccaacagctggatcttcagtccaatggaatcagccagctctgtgctgaaaatgaaaaacttcttttccaccaaaactgattattttaatgaaactactattctggtgtgggtgtggccatttgggcagacctttgaccttacatcctgccaagcaatgttcaacatccaaggatgccatctcacaacggaccgttcactgtacaacaaatcccatgcagttctgatccatcaccgagacatcagttgggatctgacaaatttacctcagcaagctaggccacccttccagaaatggatttggatgaatttggaatcaccaactcacactccccaaaagagtggcattgagcacttgtttaacctgactctgacttaccgccgtgattcagatatccaagtgccttatggcttcttgacggtaagcacaaatcccttcgtgtttgaagtgccaagcaaagagaaattggtgtgctgggttgtgagtaactggaaccctgagcatgccagagtcaagtattacaatgagctaagcaaaagcattgaaatccatacctacgggcaagcatttggagaatatgtcaatgataaaaatttgattcctaccatatctrcttgtaaattttatctttcctttgaaaattcaatccacaaggattacatcacggaaaagctatacaatgcttttctggctggctctgtacctgttgttctgggaccatctagggaaaactatgagaattatattccagcagattcattcattcatgtggaagattataactctcccagtgagctagcaaagtatctgaaggaagtcgacaaaaacaataagttataccttagttactttaactggaggaaggatttcactgtaaatcttccacgattttgggaatcacatgcatgtttggcttgcgatcatgtgaaaaggcatcaagaatataagtctgttggtaatttagagaaatggttttggaattaaaatttttcatcacttgcacacttgataaatattttgatgagatatcatccaagtattgaggataagaagagatgcaacatactacttttgtgtcacaatttatttttatcaccctctctagggtaacgtgtatattttggtggagatttttaaaagctcagcatgagcaatcattccattcggttttaaattatcctgtatatacctaattatgtgcactggagagtaatttattcttcattatcatttgtaaacattgytttttcacatttttgtagttgtccataatgtaagcttgtggtttgattattgtttccacactgatcagctgtttaatctatttgggaaatgaagatgcacatcttaaagtatgaaaaattttcactaagtattacaatgtctagttccaactttgcatactataacagaggaagaacatgttgcgattgaattctaacctctttgactcctaagatgaatgaagtgtataactgtctctatttgatctattttttttacctgtttatcacatttgtgaaggtgaaattattcatggagtgaataagaaagatatgaagcagaactgttctattcaggaagctattagacttctcatttattttcattaagctgatttgcagctacttattctcatggtcttaaattaaattattcaagtatttttaaatatccaatttgttgtgattttcagcacctgggaagtaatcccaataatactttagaaaatctaagacagttctttctgctactgatgacactcattgtcataataaaacaaataatttcctcaaataacaaagaaaaatgatacctataaatatatttataaatggtgtcatttatgaacaatgtttaattatgtatcaatttaagatttttttctgaagccctaatatttaaaatggccttattttaccatatggatataagatttggctcataatgatgagccctatcatttgatttgagttctatcatttaagagagcctaaataaaattatcatcaaggtattaaatataagacgttaaatataataaagtggggatatatagaaaacacacagtgttagcacasagtaagatctcaatgcacatttgttggatgaataaataaatgcaattgaattcccagaaaaatgattgtttcaaggaagtgacagttctactttagaagtactaattggagatgacttttatatcccattttggtaattattcatacatagcacatatgaccatgatgttcagggctttatagaaccaaataaacctaccattacatg

SEQ ID NO: 783 - DNA, 5696 bp, Homo sapiens
gctcttttaaaatagttgctttcttaggaaatgtagttgctttcttaacctcatcaaattcatgaagatttagccgaggcccatgctacccattatcttctaaatggccttcagaaatgatggagaaactgacacgttatgagtatttcctgccctacatggattttgaacttgaattcccagcctcgcttgcatctagacacagccacaaatcatywaaatgacgaggattttgacagctttcaaagtggtgaggacactgaagactggttttggctttaccaatgtgactgcacaccaaaaatggaaattttcaagacctggcatcaggctcctttctgtcaaggcacagacagcacacattgtcctggaagatggaactaagatgaaaggttactcctttggccatccatcctctgttgctggtgaagtggtttttaatactggcctgggagggtacccagaagctattactgaccctgcctacaaaggacagattctcacaatggccaaccctattattgggaatggtggagctcctgatactactgctctggatgaactgggacttagcaaatatttggagtctaatggaatcaaggtttcaggtttgctggtgctggattatagtaaagactacaaccactggctggctaccaagagtttagggcaatggctacaggaagaaaaggttcctgcaatttatggagtggacacaagaatgctgactaaaataattcgggataagggtaccatgcttgggaagattgaatttgaaggtcagcctgtggattttgtggatccaaataaacagaatttgattgctgaggtttcaaccaaggatgtcaaagtgtacggcaaaggaaaccccacaaaagtggtagctgtagactgtgggattaaaaacaatgtaatccgcctgctagtaaagcgaggagctgaagtgcacttagttccctggaaccatgatttcaccaagatggagtatgatgggattttgatcgcgggaggaccggggaacccagctcttgcagaaccactaattcagaatgtcagaaagattttggagagtgatcgcaaggagccattgtttggaatcagtacaggaaacttaataacaggattggctgctggtgccaaaacctacaagatgtccatggccaacagagggcagaatcagcctgttttgaatatcacaaacaaacaggctttcattactgctcagaatcrtggctatgccttggacaacdcyctccctgctggctggaaaccactttttgtgaatgtsaacgatcaaacaaatgaggggattatgcatgagagcaaacccttcttcgctgtgcagttccacccagaggtcaccccggggccaatagacactgagtacctgtttgattcctttttctcactgataaagaaaggaaaagctaccaccattacatcagtcttaccgaagccagcactagttgcatctcgggttgaggtttccaaagtccttattctaggatcaggaggtctgtccattggtcaggctggagaatttgattactcaggatctcaagctgtaaaagccatgaaggaagaaaatgtcaaaactgttctgatgaacccaaacattgcatcagtccagaccaatgaggtgggcttaaagcaagcggatactgtctactttcttcccatcacccctcagtttgtcacagaggtcatcaaggcagaacagccagatgggttaattctgggcatgggtggccagacagctctgaactgtggagtggaactattcaagagaggtgtgctcaaggaatatggtgtgaaagtcctgggaacttcagttgagtccattatggctayggaagacaggcagctgttttcagataaactaaatgagatcaatgaaaagattgctccaagttttgcagtggaatcgattgaggatgcactgaaggcagcagacaccattggctacccagtgatgatccgttccgcctatgcactgggtgggttaggctcaggcatctgtcccaacagagagactttgatggacctcagcacaaaggcctttgctatgaccaaccaaattctggtggagaagtcagtgacaggttggaaagaaatagaatatgaagtggttcgagatgctgatgacaattgtgtcactgtctgtaacatggaaaatgttgatgccatgggtgttcacacaggtgactcagttgttgtggctcctgcccagacactctccaatgccgagtttcagatgttgagacgtacttcaatcaatgttgttcgccacttgggcattgtgggtgaatgcaacattcagtttgcccttcatcctacctcaatggaatactgcatcattgaagtgaatgccagactgtcccgaagctctgctctggcctcaaaagccactggctacccattggcattcattgctgcaaagattgccctaggaatcccacttccagaaattaagaacgtcgtatcygggaagacatcagcctgttttgaacctagcctggattacatggtcaccaagattccccgctgggatcttgaccgttttcatggaacatctagccgaattggtagctctatgaaaagtgtaggagaggtmatggctattggtcgtacctttgaggagagtttccagaaagctttacggatgtgccacccatctatagaaggtttcactccccgtctcccaatgaacaaagaatggccatctaatttagatcttagaaaagagttgtctgaaccaagcagcacgcgtatctatgccattgccaaggccattgatgacaacatgtcccttgatgagattgagaagctcacatacattgacaagtggtttttgtataagatgcgtgatattttaaacatggaaaagacactgaaaggsctcaacagtgagtccatgacagaagaaaccctgaaaagggcaaaggagattgggttctcagataagcagatttcaaaatgccttgggctcactgaggcccagacaagggagctgaggttaaagaaaaacatccacccttgggttaaacagattgatacactggctgcagaatacccatcagtaacaaactatctctatgttacctacaatggtcaggagcatgatgtcaattttgatgwccatggaatgatggtgctaggctgtggtccatatcacattggcagcagtgtggaatttgattggtgtgctgtctctagtatccgcacactgcgtcaacttggcaagaagacggtsgtggtgaattgcaatcctgagactgtgagcacagactttgatgagtgtgacaaactgtactttgaagagttgtccttggagagaatcctagacatctaccatcaggaggcatgtggtggctgcatcatatcagttggaggccagattccaaacaacctggcagttcctctatacaagaatggtgtcaagatcatgggcacaagccccctgcagatcgacagggctgaggatcgctccatcttctcagctgtcttggatgagctgaaggtggctcaggcaccttggaaagctgttaatactttgaatgaagcactggaatttgcaaagtctgtggactacccctgcttgttgaggccttcctatgttttgagtgggtctgctatgaatgtggtattctctgaggatgagatgaaaaaattcctagaagaggcgactagagtttctcaggagcacccagtggtgctgacaaaatttgttgaaggggcccgagaagtagaaatggacgctgttggcaaagatggaagggttatctctcatgccatctctgaacatgttgaagatgcaggtgtccactcgggagatgccactctgatgctgcccacacaaaccatcagccaaggggccattgaaaaggtgaaggatgctacccggaagattgcaaaggcttttgccatctctggtccattcaacgtccaatttcttgtcaaaggaaatgatgtcttggtgattgagtgtaacttgagagcttctcgatccttcccctytgtttccaagactcttggggttgacttcattgatgtggccaccaaggtgwtgattggagagaatgttgatgagaaacatcttccaacattggaccatcccataattcctgctgactatgttgcaattaaggctcccatgttttcctggccccggttgagggatgctgaccccattctgagatgtgagatggcttccactggagaggtggcttgctttggtgaaggtattcatacagccttcctaaaggcaatgctttccacaggatttaagataccccagaaaggcatcctgataggcatccagcaatcattccggccaagattccttggtgtggctgaacaattacacaatgaaggtttcaagctgtttgccacggaagccacatcagactggctcaacgccaacaatgtccctgccamcccagtggcatggccgtctcaagaaggacagaatcccagcctctcttccatcagaaaattgattagagatggcagcattgacctagtgattaaccttcccaacaacaacactaaatttgtccatgataattatgtgattcggaggacagctgttgatagtggaatccctctcctcactaattttcaggtgaccaaactttttgctgaagctgtgcagaaatctcgcaaggtggactccaagagtcttttccactacaggcagtacagtgctggaaaagcagcatagagatgcagacaccccagccccattattaaatcaacctgagccacatgttatctaaaggaactgattcacaactttctcagagatgaatattgataactaaacttcatttcagtttactttgttatgccttaatattctgtgtcttttgcaattaaattgtcagtcacttcttcaaaaccttacagtccttcctaagttactcttcatgaggatactctatttttaaaacactatctgcaaactcaggacactttaacagggcagaatactctaaaaacttgataaaatkaaatatagatttaatttatgaaccttccatcatgatgtttgtgtattgcttctttttggatcctcattctcacccatttggctaatccaggaatattgttatcccttcccattatattgaagttgagaaatgtgacagaggcatttagagtatggacttttcttttytttttctttttctttttttctttttgagatggagtcacactctccaggctggagtgcagtggcacaatctcggctcactgcaatttscgtctcccaagttcaagcgattctcctgctttagactatggatttctttaaggaatactggtttgcagttttgttttctggactatatcagcagatggtagacagtgtttatgtagatgtgttgttgtttttatcattggattttaacttggcccgagtgaaataatcagatttttgtcattcacactctcccccagttttggaataacttggaagtaaggttcattcccttaagacgatggattctgttgaactatggggtcccacactgcactattaattccacccactgtaagggcaaggacaccattccttctacatataagaaaaaagtctctccccaagggcagcctttgttacttttaaatattttctgttattacaagtgctctaattgtgaacttttaaataaaatactattaagaggtaa

SEQ ID NO: 784 - DNA, 5887 bp, Homo sapiens
agatcgctgtgcagtcagccttaaacactgactgcacccctcccagatttcttttacattaactaaaaagtcttatcacacaatctcataaaatttatgtaatttcatttaattttagccacaaatcatywaaatgacgaggattttgacagctttcaaagtggtgaggacactgaagactggttttggctttaccaatgtgactgcacaccaaaaatggaaattttcaagacctggcatcaggctcctttctgtcaaggcacagacagcacacattgtcctggaagatggaactaagatgaaaggttactcctttggccatccatcctctgttgctggtgaagtggtttttaatactggcctgggagggtacccagaagctattactgaccctgcctacaaaggacagattctcacaatggccaaccctattattgggaatggtggagctcctgatactactgctctggatgaactgggacttagcaaatatttggagtctaatggaatcaaggtttcaggtttgctggtgctggattatagtaaagactacaaccactggctggctaccaagagtttagggcaatggctacaggaagaaaaggttcctgcaatttatggagtggacacaagaatgctgactaaaataattcgggataagggtaccatgcttgggaagattgaatttgaaggtcagcctgtggattttgtggatccaaataaacagaatttgattgctgaggtttcaaccaaggatgtcaaagtgtacggcaaaggaaaccccacaaaagtggtagctgtagactgtgggattaaaaacaatgtaatccgcctgctagtaaagcgaggagctgaagtgcacttagttccctggaaccatgatttcaccaagatggagtatgatgggattttgatcgcgggaggaccggggaacccagctcttgcagaaccactaattcagaatgtcagaaagattttggagagtgatcgcaaggagccattgtttggaatcagtacaggaaacttaataacaggattggctgctggtgccaaaacctacaagatgtccatggccaacagagggcagaatcagcctgttttgaatatcacaaacaaacaggctttcattactgctcagaatcrtggctatgccttggacaacdcyctccctgctggctggaaaccactttttgtgaatgtsaacgatcaaacaaatgaggggattatgcatgagagcaaacccttcttcgctgtgcagttccacccagaggtcaccccggggccaatagacactgagtacctgtttgattcctttttctcactgataaagaaaggaaaagctaccaccattacatcagtcttaccgaagccagcactagttgcatctcgggttgaggtttccaaagtccttattctaggatcaggaggtctgtccattggtcaggctggagaatttgattactcaggatctcaagctgtaaaagccatgaaggaagaaaatgtcaaaactgttctgatgaacccaaacattgcatcagtccagaccaatgaggtgggcttaaagcaagcggatactgtctactttcttcccatcacccctcagtttgtcacagaggtcatcaaggcagaacagccagatgggttaattctgggcatgggtggccagacagctctgaactgtggagtggaactattcaagagaggtgtgctcaaggaatatggtgtgaaagtcctgggaacttcagttgagtccattatggctayggaagacaggcagctgttttcagataaactaaatgagatcaatgaaaagattgctccaagttttgcagtggaatcgattgaggatgcactgaaggcagcagacaccattggctacccagtgatgatccgttccgcctatgcactgggtgggttaggctcaggcatctgtcccaacagagagactttgatggacctcagcacaaaggcctttgctatgaccaaccaaattctggtggagaagtcagtgacaggttggaaagaaatagaatatgaagtggttcgagatgctgatgacaattgtgtcactgtctgtaacatggaaaatgttgatgccatgggtgttcacacaggtgactcagttgttgtggctcctgcccagacactctccaatgccgagtttcagatgttgagacgtacttcaatcaatgttgttcgccacttgggcattgtgggtgaatgcaacattcagtttgcccttcatcctacctcaatggaatactgcatcattgaagtgaatgccagactgtcccgaagctctgctctggcctcaaaagccactggctacccattggcattcattgctgcaaagattgccctaggaatcccacttccagaaattaagaacgtcgtatcygggaagacatcagcctgttttgaacctagcctggattacatggtcaccaagattccccgctgggatcttgaccgttttcatggaacatctagccgaattggtagctctatgaaaagtgtaggagaggtmatggctattggtcgtacctttgaggagagtttccagaaagctttacggatgtgccacccatctatagaaggtttcactccccgtctcccaatgaacaaagaatggccatctaatttagatcttagaaaagagttgtctgaaccaagcagcacgcgtatctatgccattgccaaggccattgatgacaacatgtcccttgatgagattgagaagctcacatacattgacaagtggtttttgtataagatgcgtgatattttaaacatggaaaagacactgaaaggsctcaacagtgagtccatgacagaagaaaccctgaaaagggcaaaggagattgggttctcagataagcagatttcaaaatgccttgggctcactgaggcccagacaagggagctgaggttaaagaaaaacatccacccttgggttaaacagattgatacactggctgcagaatacccatcagtaacaaactatctctatgttacctacaatggtcaggagcatgatgtcaattttgatgwccatggaatgatggtgctaggctgtggtccatatcacattggcagcagtgtggaatttgattggtgtgctgtctctagtatccgcacactgcgtcaacttggcaagaagacggtsgtggtgaattgcaatcctgagactgtgagcacagactttgatgagtgtgacaaactgtactttgaagagttgtccttggagagaatcctagacatctaccatcaggaggcatgtggtggctgcatcatatcagttggaggccagattccaaacaacctggcagttcctctatacaagaatggtgtcaagatcatgggcacaagccccctgcagatcgacagggctgaggatcgctccatcttctcagctgtcttggatgagctgaaggtggctcaggcaccttggaaagctgttaatactttgaatgaagcactggaatttgcaaagtctgtggactacccctgcttgttgaggccttcctatgttttgagtgggtctgctatgaatgtggtattctctgaggatgagatgaaaaaattcctagaagaggcgactagagtttctcaggagcacccagtggtgctgacaaaatttgttgaaggggcccgagaagtagaaatggacgctgttggcaaagatggaagggttatctctcatgccatctctgaacatgttgaagatgcaggtgtccactcgggagatgccactctgatgctgcccacacaaaccatcagccaaggggccattgaaaaggtgaaggatgctacccggaagattgcaaaggcttttgccatctctggtccattcaacgtccaatttcttgtcaaaggaaatgatgtcttggtgattgagtgtaacttgagagcttctcgatccttcccctytgtttccaagactcttggggttgacttcattgatgtggccaccaaggtgwtgattggagagaatgttgatgagaaacatcttccaacattggaccatcccataattcctgctgactatgttgcaattaaggctcccatgttttcctggccccggttgagggatgctgaccccattctgagatgtgagatggcttccactggagaggtggcttgctttggtgaaggtattcatacagccttcctaaaggcaatgctttccacaggatttaagataccccagaaaggcatcctgataggcatccagcaatcattccggccaagattccttggtgtggctgaacaattacacaatgaaggtttcaagctgtttgccacggaagccacatcagactggctcaacgccaacaatgtccctgccamcccagtggcatggccgtctcaagaaggacagaatcccagcctctcttccatcagaaaattgattagagatggcagcattgacctagtgattaaccttcccaacaacaacactaaatttgtccatgataattatgtgattcggaggacagctgttgatagtggaatccctctcctcactaattttcaggtgaccaaactttttgctgaagctgtgcagaaatctcgcaaggtggactccaagagtcttttccactacaggcagtacagtgctggaaaagcagcatagagatgcagacaccccagccccattattaaatcaacctgagccacatgttatctaaaggaactgattcacaactttctcagagatgaatattgataactaaacttcatttcagtttactttgttatgccttaatattctgtgtcttttgcaattaaattgtcagtcacttcttcaaaaccttacagtccttcctaagttactcttcatgagatttcatccatttactaatactgtatttttggtggactaggcttgcctatgtgcttatgtgtagctttttactttttatggtgctgattaatggtgatcaaggtaggaaaagttgctgttctattttctgaactcyttctatactttaagatactctatttttaaaacactatctgcaaactcaggacactttaacagggcagaatactctaaaaacttgataaaatkaaatatagatttaatttatgaaccttccatcatgatgtttgtgtattgcttctttttggatcctcattctcacccatttggctaatccaggaatattgttatcccttcccattatattgaagttgagaaatgtgacagaggcatttagagtatggacttttcttttytttttctttttctttttttctttttgagatggagtcacactctccaggctggagtgcagtggcacaatctcggctcactgcaatttscgtctcccaagttcaagcgattctcctgctttagactatggatttctttaaggaatactggtttgcagttttgttttctggactatatcagcagatggtagacagtgtttatgtagatgtgttgttgtttttatcattggattttaacttggcccgagtgaaataatcagatttttgtcattcacactctcccccagttttggaataacttggaagtaaggttcattcccttaagacgatggattctgttgaactatggggtcccacactgcactattaattccacccactgtaagggcaaggacaccattccttctacatataagaaaaaagtctctccccaagggcagcctttgttacttttaaatattttctgttattacaagtgctctaattgtgaacttttaaataaaatactattaagaggtaatgcagttgaatctggttttattttatgttgctgtacaaaaatcagtttacttctatgataaaatagggttttgggccaggattgcattgcttatttattttttccatgcaaacccatatagggatgaga

SEQ ID NO: 785 - DNA, 5887 bp, Homo sapiens
agatcgctgtgcagtcagccttaaacactgactgcacccctcccagatttcttttacattaactaaaaagtcttatcacacaatctcataaaatttatgtaatttcatttaattttagccacaaatcatywaaatgacgaggattttgacagctttcaaagtggtgaggacactgaagactggttttggctttaccaatgtgactgcacaccaaaaatggaaattttcaagacctggcatcaggctcctttctgtcaaggcacagacagcacacattgtcctggaagatggaactaagatgaaaggttactcctttggccatccatcctctgttgctggtgaagtggtttttaatactggcctgggagggtacccagaagctattactgaccctgcctacaaaggacagattctcacaatggccaaccctattattgggaatggtggagctcctgatactactgctctggatgaactgggacttagcaaatatttggagtctaatggaatcaaggtttcaggtttgctggtgctggattatagtaaagactacaaccactggctggctaccaagagtttagggcaatggctacaggaagaaaaggttcctgcaatttatggagtggacacaagaatgctgactaaaataattcgggataagggtaccatgcttgggaagattgaatttgaaggtcagcctgtggattttgtggatccaaataaacagaatttgattgctgaggtttcaaccaaggatgtcaaagtgtacggcaaaggaaaccccacaaaagtggtagctgtagactgtgggattaaaaacaatgtaatccgcctgctagtaaagcgaggagctgaagtgcacttagttccctggaaccatgatttcaccaagatggagtatgatgggattttgatcgcgggaggaccggggaacccagctcttgcagaaccactaattcagaatgtcagaaagattttggagagtgatcgcaaggagccattgtttggaatcagtacaggaaacttaataacaggattggctgctggtgccaaaacctacaagatgtccatggccaacagagggcagaatcagcctgttttgaatatcacaaacaaacaggctttcattactgctcagaatcrtggctatgccttggacaacdcyctccctgctggctggaaaccactttttgtgaatgtsaacgatcaaacaaatgaggggattatgcatgagagcaaacccttcttcgctgtgcagttccacccagaggtcaccccggggccaatagacactgagtacctgtttgattcctttttctcactgataaagaaaggaaaagctaccaccattacatcagtcttaccgaagccagcactagttgcatctcgggttgaggtttccaaagtccttattctaggatcaggaggtctgtccattggtcaggctggagaatttgattactcaggatctcaagctgtaaaagccatgaaggaagaaaatgtcaaaactgttctgatgaacccaaacattgcatcagtccagaccaatgaggtgggcttaaagcaagcggatactgtctactttcttcccatcacccctcagtttgtcacagaggtcatcaaggcagaacagccagatgggttaattctgggcatgggtggccagacagctctgaactgtggagtggaactattcaagagaggtgtgctcaaggaatatggtgtgaaagtcctgggaacttcagttgagtccattatggctayggaagacaggcagctgttttcagataaactaaatgagatcaatgaaaagattgctccaagttttgcagtggaatcgattgaggatgcactgaaggcagcagacaccattggctacccagtgatgatccgttccgcctatgcactgggtgggttaggctcaggcatctgtcccaacagagagactttgatggacctcagcacaaaggcctttgctatgaccaaccaaattctggtggagaagtcagtgacaggttggaaagaaatagaatatgaagtggttcgagatgctgatgacaattgtgtcactgtctgtaacatggaaaatgttgatgccatgggtgttcacacaggtgactcagttgttgtggctcctgcccagacactctccaatgccgagtttcagatgttgagacgtacttcaatcaatgttgttcgccacttgggcattgtgggtgaatgcaacattcagtttgcccttcatcctacctcaatggaatactgcatcattgaagtgaatgccagactgtcccgaagctctgctctggcctcaaaagccactggctacccattggcattcattgctgcaaagattgccctaggaatcccacttccagaaattaagaacgtcgtatcygggaagacatcagcctgttttgaacctagcctggattacatggtcaccaagattccccgctgggatcttgaccgttttcatggaacatctagccgaattggtagctctatgaaaagtgtaggagaggtmatggctattggtcgtacctttgaggagagtttccagaaagctttacggatgtgccacccatctatagaaggtttcactccccgtctcccaatgaacaaagaatggccatctaatttagatcttagaaaagagttgtctgaaccaagcagcacgcgtatctatgccattgccaaggccattgatgacaacatgtcccttgatgagattgagaagctcacatacattgacaagtggtttttgtataagatgcgtgatattttaaacatggaaaagacactgaaaggsctcaacagtgagtccatgacagaagaaaccctgaaaagggcaaaggagattgggttctcagataagcagatttcaaaatgccttgggctcactgaggcccagacaagggagctgaggttaaagaaaaacatccacccttgggttaaacagattgatacactggctgcagaatacccatcagtaacaaactatctctatgttacctacaatggtcaggagcatgatgtcaattttgatgwccatggaatgatggtgctaggctgtggtccatatcacattggcagcagtgtggaatttgattggtgtgctgtctctagtatccgcacactgcgtcaacttggcaagaagacggtsgtggtgaattgcaatcctgagactgtgagcacagactttgatgagtgtgacaaactgtactttgaagagttgtccttggagagaatcctagacatctaccatcaggaggcatgtggtggctgcatcatatcagttggaggccagattccaaacaacctggcagttcctctatacaagaatggtgtcaagatcatgggcacaagccccctgcagatcgacagggctgaggatcgctccatcttctcagctgtcttggatgagctgaaggtggctcaggcaccttggaaagctgttaatactttgaatgaagcactggaatttgcaaagtctgtggactacccctgcttgttgaggccttcctatgttttgagtgggtctgctatgaatgtggtattctctgaggatgagatgaaaaaattcctagaagaggcgactagagtttctcaggtacacccagtggtgctgacaaaatttgttgaaggggcccgagaagtagaaatggacgctgttggcaaagatggaagggttatctctcatgccatctctgaacatgttgaagatgcaggtgtccactcgggagatgccactctgatgctgcccacacaaaccatcagccaaggggccattgaaaaggtgaaggatgctacccggaagattgcaaaggcttttgccatctctggtccattcaacgtccaatttcttgtcaaaggaaatgatgtcttggtgattgagtgtaacttgagagcttctcgatccttcccctytgtttccaagactcttggggttgacttcattgatgtggccaccaaggtgwtgattggagagaatgttgatgagaaacatcttccaacattggaccatcccataattcctgctgactatgttgcaattaaggctcccatgttttcctggccccggttgagggatgctgaccccattctgagatgtgagatggcttccactggagaggtggcttgctttggtgaaggtattcatacagccttcctaaaggcaatgctttccacaggatttaagataccccagaaaggcatcctgataggcatccagcaatcattccggccaagattccttggtgtggctgaacaattacacaatgaaggtttcaagctgtttgccacggaagccacatcagactggctcaacgccaacaatgtccctgccamcccagtggcatggccgtctcaagaaggacagaatcccagcctctcttccatcagaaaattgattagagatggcagcattgacctagtgattaaccttcccaacaacaacactaaatttgtccatgataattatgtgattcggaggacagctgttgatagtggaatccctctcctcactaattttcaggtgaccaaactttttgctgaagctgtgcagaaatctcgcaaggtggactccaagagtcttttccactacaggcagtacagtgctggaaaagcagcatagagatgcagacaccccagccccattattaaatcaacctgagccacatgttatctaaaggaactgattcacaactttctcagagatgaatattgataactaaacttcatttcagtttactttgttatgccttaatattctgtgtcttttgcaattaaattgtcagtcacttcttcaaaaccttacagtccttcctaagttactcttcatgagatttcatccatttactaatactgtatttttggtggactaggcttgcctatgtgcttatgtgtagctttttactttttatggtgctgattaatggtgatcaaggtaggaaaagttgctgttctattttctgaactcyttctatactttaagatactctatttttaaaacactatctgcaaactcaggacactttaacagggcagaatactctaaaaacttgataaaatkaaatatagatttaatttatgaaccttccatcatgatgtttgtgtattgcttctttttggatcctcattctcacccatttggctaatccaggaatattgttatcccttcccattatattgaagttgagaaatgtgacagaggcatttagagtatggacttttcttttytttttctttttctttttttctttttgagatggagtcacactctccaggctggagtgcagtggcacaatctcggctcactgcaatttscgtctcccaagttcaagcgattctcctgctttagactatggatttctttaaggaatactggtttgcagttttgttttctggactatatcagcagatggtagacagtgtttatgtagatgtgttgttgtttttatcattggattttaacttggcccgagtgaaataatcagatttttgtcattcacactctcccccagttttggaataacttggaagtaaggttcattcccttaagacgatggattctgttgaactatggggtcccacactgcactattaattccacccactgtaagggcaaggacaccattccttctacatataagaaaaaagtctctccccaagggcagcctttgttacttttaaatattttctgttattacaagtgctctaattgtgaacttttaaataaaatactattaagaggtaatgcagttgaatctggttttattttatgttgctgtacaaaaatcagtttacttctatgataaaatagggttttgggccaggattgcattgcttatttattttttccatgcaaacccatatagggatgaga

SEQ ID NO: 786 - DNA, 2233 bp, Homo sapiens
acacacgcgcgcacacacacgcgcacaccggaccccgcgcgcacacgcacggagggcgcgagcgagcagacgcgcacaccggcgagccaagttccgcagcctggcatggcttctggggacctttacgaggttgaaaggattgtagacaagaggaagaacaagaaaggaaaatgggagtatcttatccgatggaaaggctacgggagcacygaggacacgtgggagccggagcaccacctcttgcactgtgaggagtttattgatgaattcaatgggytgcacatgtccaaggacaagaggatcaagtcagggaagcagtccagtacctccaagctgctgcgtgacagtcgaggcccgtcggttgagaaactgtcccacagaccttcagatcctggaaagagcaaggggacctcccataaacggaagcgaattaaccctcccctggccaagccaaaaaaagggtattcaggcaagccctcttcaggaggtgacagggccaccaagacrgtgtcttacaggactacccccagtggtttrcaaataatgcccctgaaaaagtctcagaacgggatggaaaatggggacgccggctctgagaaggatgagaggcactttggaaatgggtcccatcagcctggcttggatttgaatgatcatgttggagagcaagatatgggtgaatgtgacgtgaatcacgctacactggcggagaacgggctcggctctgctctgaccaacgggggattgaacctgcacagtccrgtgaagaggaagctggaagcggagaaggactacgtctttgacaaaaggctcagatacagtgtccgccagaatgaaagcaactgtcggtttcgagacatcgtygtgcggaaggaagaagggttcacrcacatcctgctgtccagtcagacctcggataacaatgccctgacacctgagatcatgaaagaagtccggcgagcgctctgcaacgcagccacagacgacagcaaactgctgctcctcagcgcagtggggagcgtgttctgcagcggcctggattattcctacctaattggccggttgtccagcgaccggcgaaaggagagcactcggattgcagaagccatcagggactttgtgaaggcctttatccagtttaagaagcctatcgtggtggccatcaatggkccggccctgggcctgggtgcctccatcctgcccctctgtgacatcgtgtgggccagtgagaaggcctggttccagacgccctaygccaccatccgcytcacgcctgctggctgctcctcctacaccttcccccagatcctgggcgtcgcgctggccaatgagatgctgttctgtgggcggaagctcaccgcccaggaggcctgcagcagrgggctggtgtcgcaggtcttctggcccaccacgttcagccaggaggtcatgctgcgggtcaaggagatggcatcctgcagtgccgtggtgttagaggagtccaaatgcctcgtgcggagcttcctgaaatcagtgctggaagacgtgaacgagaaggaatgcctcatgctcaagcagctctggagctcctccaaaggccttgactcccttttcagctacctgcaggacaaaatttatgaagtctgaggggccccagctcacgggcccccaacttccagctctgccctgtgtttcggaaaccagagcacagtgtctgccccggccaaggagtttgtcaaggtgtctctttatacgtagggttgtgtccatttcctcgtgtcctttggttgctcctccttggtttgattttgtgtaatggatggaaaacgcagcatacttggcctcccccacctccctgcccttcctggccagagagctgtccaaggctgtatcttcccagggctccgccaagcaccgctgtcctttccccacttgctgaaatgcaccatgacrgtccaggaaggggaagaccactttcacattcttctgactcaggctgtgtctacacagtgcctctgacttggagacttggccatcatggctctctctggttgtatttagatckggtgtcagaggacgaccaatcttagggaatttccagaccaatgagcaaaatgattgtgcacacctggcctcagtctcctttccgacgcaaatctgtgtgactattagggcttggtcttaaaacccaattgagtgatttgcaaacccagatattstacatttagaaatgttttgttaaatatatattttt

SEQ ID NO: 787 - DNA, 4311 bp, Homo sapiens
cgcggcggagtgtaccgtgctgctctactcgctgccattcgcccgcaggtcggcgcgctcgcccacctgagccgckccggggctgcgggaccgtgggacagcgcgctcagcccagcctaggaaagaggcagcagtctcagcgcggagatggggagcgggcgaagttgacgagtctcccgcccacgctgcgcccctcctgcccagaggggctgcagccagcggtctgtcgcgcgtgcctgtgtgcccgaggagccgccccggggagaagacccggcgcggagttgttcccccagggaggatccgcagcccagccgagggggtcgggcggcctggctacgcaggacccagccccgcagccgcggactcccagcggcggcgaagtttggctgctgagcggcgcggcgccggaccactggacagcgggagcgatgcccgtggggggcctgttgccgctcttcagcagccccgcgggcggcgtcctgggcggggggctcggcggcggcggtggcaggaaggggtcgggccccgccgccctccgcctgacggagaagttcgtgctgctgctggtattcagcgccttcatcacgctctgcttcggggcgatcttcttcctgccagactcctccaagctgctcagcggggtcctgttccactccagccccgccttgcagccggccgccgaccacaagcccgggcccggggcgcgcgccgaggacgcggccgaggggcgagcccggcgccgcgaggagggggcacccggggacccggaggccgccctggargacaacttggccaggatccgcgaaaaccacgagcgggctctcagggaagccaaggagaccctgcagaagctgcccgaggagatccaaagagacatcctactggagaagaagaaggtggcccaggaccagctgcgtgacaaggcgccgttcagaggcctgcccccggtggacttcgtgcccccaatcggggtggagagccgggagcccgccgacgccgccatccgcgagaaaagggcaaagatcaaagagatgatgaaacatgcttggaataattataaaggttatgcctggggattaaatgaactcaaacctatatcaaaaggaggccattcaagcagtttgtttggtaacatcaaaggagcaactatagtagatgccctggatacactttttattatggaaatgaaacatgaatttgaagaagcaaaatcatgggttgaagaaaatttagattttaatgtgaatgctgaaatttctgtctttgaagtaaatatacgctttgttggtggactactctcagcctactatctgtctggagaagagatttttcgaaagraagcagtggaacttggggtaaaattgctacctgcatttcatactccctctggaataccttgggcattgctgaatatgaaaagtggtattggaaggaactggccctgggcctctggaggcagcagtattctggcagaatttggaaccctgcatttggagtttatgcacttgagccacttatcaggaaaccccatctttgctgaaaaggtaatgaatattcgaacagtactgaacaaactggaaaaaccacaaggcctttatcctaactatctgaatcccagtagtggacagtggggtcaacatcatgtatcagttggaggacttggagacagcttctatgagtatttgctgaaggcctggttaatgtctgacaagacagatctggaagctaagaagatgtattttgatgctgttcaggctatcgagactcatttgatccgcaagtctagcagcggactaacttatatcgcagagtggaaagggggcctcctggagcacaagatgggccacctgacctgcttcrckgggggcatgttcgcactcggggctgatgcagctcccgaaggcatggcccaacactaccttgaactcggggctgaaattgcccgtacttgtcatgaatcatataatcgaacatttatgaaactgggaccagaagctttcagatttgatggtggtgttgaagccatcgctacaagacaaaatgaaaaatactacatcttacggccagaagttatggagacttacatgtatatgtggagactgactcatgatccaaagtacaggaaatgggcctgggaagccgtagaggccttggaaaaccattgcagagtgaatggaggctattcaggcctaagggatgtttaccttcttcatgagagttatgatgatgtgcagcagagtttcttcctggcagagacattgaaatatttgtacctaatattttctgacgacgatcttcttccactggagcattggatcttcaatagcgaggcacatcttctccctatcctccctaaagataaaaaggaagttgaaatcrgagaggaataaaaagacattttatattttattctgctccattcccttcactgtataccttaataattccttttctggtratcaggcacatgatgaactttgattagtaggtctgtgattaagttcttaaattgttttgcagtcttttatgtttattatcataggtataggtggacctaaattccttatcatatcctttattaattcagccagtgtatccaccagttttttgtttatgtttttaagtaacctattatctctggatttcatgaaggtgtaatatygtttttgttaaactgaatagaattgtatagcgatgacytcttaattayaatttgatttgactgcaaaactttttcctcctctaagaggagatgatgtctgctttaagctgtaatgttttgccatgttgcaaaaagccataataataagtataaaaaagctttttcctttacaatttcatgttaatctggtttgtctgtccaccagagacagatcttctgtgacagcctccttatgcaggtctatcattatttgatagaatgtcttctaaaatacttcactcacattgtaattcaaattagaaagtcattccaaaaggatcatgtcatgttgacctcatttcatcggaactgcagtatatttttgttggttaattatattagtgttttctattttgwaaatgtgtcctttaattttactttaaatgccctgtgtcatttctggattatatactagttaatttcttccattcccyactacacagagaggtgagctttcaaattttkcagagctctgctatcactgaattacatttatctgaagaaaatagtacaacttaatggattagcttttgggtttaactgaatatatgaagaaattgggtctgtctaaagagagggtatttcatatggcttttagttcacttgtttgtatttcatcttgatttttttctttggaaaataaagcattctatttggttcagatttctcagatttgaaaaaggctctatctcagatgtagtaaattatttcctttcagtttgtgaaagcaggatttgactctgaaagaagctttgccaattttacttattcgtgatcaatcaaggaaaatctaataaattttaggccaaataagaatatagcatatttagtatggttatagtcaacacagagatcacaacttagaagaaatataaagaaatggccactccccatcccccacagtcctggagtaaatcaaaatcaatatatgattcttttaaacattaagtttgaaataggaatggttttctcaagaatagatttggtgtgataccttgtgtttgcttacattggcccactatatatacatatatatttatgtagatatacttccatgaaagggctaatacgatgcatatactgaagggcaaggactttgaccatgtsaattttcagccgagaatggtcagaaagatcagtacaaccccatggattaggctgaaacatatgaaattgctgcatttgtagtttaaaaactgtcagcagtttcatatggttccacctaatattattgaagacaattattttcttagctatcaataggcttaatagttttagttattttagcttttgaaagtgttttaaaagatttcctttatcggacaggaccatctttatgacctgctttctgtttttcaatatcatacattggtgtatgtcaaagaataaattagtaaaattagtaaatgaaaaagactcttccgtacatcattatttccatgctaatgtgtgtctgtgatccagaataacttctcccactcatatcttcagttcacctaatgaaatgaatggatagcaagagccctttgttcccaggactttaaggcaaaatattaaaaattattgccaaaattaagaatataatgtttgtataaatgtccttgaatttg

SEQ ID NO: 788 - DNA, 3323 bp, Homo sapiens
cgcggcggagtgtaccgtgctgctctactcgctgccattcgcccgcaggtcggcgcgctcgcccacctgagccgckccggggctgcgggaccgtgggacagcgcgctcagcccagcctaggaaagaggcagcagtctcagcgcggagatggggagcgggcgaagttgacgagtctcccgcccacgctgcgcccctcctgcccagaggggctgcagccagcggtctgtcgcgcgtgcctgtgtgcccgaggagccgccccggggagaagacccggcgcggagttgttcccccagggaggatccgcagcccagccgagggggtcgggcggcctggctacgcaggacccagccccgcagccgcggactcccagcggcggcgaagtttggctgctgagcggcgcggcgccggaccactggacagcgggagcgatgcccgtggggggcctgttgccgctcttcagcagccccgcgggcggcgtcctgggcggggggctcggcggcggcggtggcaggaaggggtcgggccccgccgccctccgcctgacggagaagttcgtgctgctgctggtattcagcgccttcatcacgctctgcttcggggcgatcttcttcctgccagactcctccaagctgctcagcggggtcctgttccactccagccccgccttgcagccggccgccgaccacaagcccgggcccggggcgcgcgccgaggacgcggccgaggggcgagcccggcgccgcgaggagggggcacccggggacccggaggccgccctggargacaacttggccaggatccgcgaaaaccacgagcgggctctcagggaagccaaggagaccctgcagaagctgcccgaggagatccaaagagacatcctactggagaagaagaaggtggcccaggaccagctgcgtgacaaggcgccgttcagaggcctgcccccggtggacttcgtgcccccaatcggggtggagagccgggagcccgccgacgccgccatccgcgagaaaagggcaaagatcaaagagatgatgaaacatgcttggaataattataaaggttatgcctggggattaaatgaactcaaacctatatcaaaaggaggccattcaagcagtttgtttggtaacatcaaaggagcaactatagtagatgccctggatacactttttattatggaaatgaaacatgaatttgaagaagcaaaatcatgggttgaagaaaatttagattttaatgtgaatgctgaaatttctgtctttgaagtaaatatacgctttgttggtggactactctcagcctactatctgtctggagaagagatttttcgaaagraagcagtggaacttggggtaaaattgctacctgcatttcatactccctctggaataccttgggcattgctgaatatgaaaagtggtattggaaggaactggccctgggcctctggaggcagcagtattctggcagaatttggaaccctgcatttggagtttatgcacttgagccacttatcaggaaaccccatctttgctgaaaaggtaatgaatattcgaacagtactgaacaaactggaaaaaccacaaggcctttatcctaactatctgaatcccagtagtggacagtggggtcaacatcatgtatcagttggaggacttggagacagcttctatgagtatttgctgaaggcctggttaatgtctgacaagacagatctggaagctaagaagatgtattttgatgctgttcaggctatcgagactcatttgatccgcaagtctagcagcggactaacttatatcgcagagtggaaagggggcctcctggagcacaagatgggccacctgacctgcttcrckgggggcatgttcgcactcggggctgatgcagctcccgaaggcatggcccaacactaccttgaactcggggctgaaattgcccgtacttgtcatgaatcatataatcgaacatttatgaaactgggaccagaagctttcagatttgatggtggtgttgaagccatcgctacaagacaaaatgaaaaatactacatcttacggccagaagttatggagacttacatgtatatgtggagactgactcatgatccaaagtacaggaaatgggcctgggaagccgtagaggccttggaaaaccattgcagagtgaatggaggctattcaggcctaagggatgtttaccttcttcatgagagttatgatgatgtgcagcagagtttcttcctggcagagacattgaaatatttgtacctaatattttctgacgacgatcttcttccactggagcattggatcttcaatagcgaggcacatcttctccctatcctccctaaagataaaaaggaagttgaaatcrgagaggaataattccttttctggtratcaggcacatgatgaactttgattagtaggtctgtgattaagttcttaaattgttttgcagtcttttatgtttattatcataggtataggtggacctaaattccttatcatatcctttattaattcagccagtgtatccaccagttttttgtttatgtttttaagtaacctattatctctggatttcatgaaggtgtaatatygtttttgttaaactgaatagaattgtatagcgatgacytcttaattayaatttgatttgactgcaaaactttttcctcctctaagaggagatgatgtctgctttaagctgtaatgttttgccatgttgcaaaaagccataataataagtataaaaaagctttttcctttacaatttcatgttaatctggtttgtctgtccaccagagacagatcttctgtgacagcctccttatgcaggtctatcattatttgatagaatgtcttctaaaatacttcactcacattgtaattcaaattagaaagtcattccaaaaggatcatgtcatgttgacctcatttcatcggaactgcagtatatttttgttggttaattatattagtgttttctattttgwaaatgtgtcctttaattttactttaaatgccctgtgtcatttctggattatatactagttaatttcttccattcccyactacacagagaggtgagctttcaaattttkcagagctctgctatcactgaattacatttatctgaagaaaatagtacaacttaatggattagcttttgggtttaactgaatatatgaagaaattgggtctgtctaaagagagggtatttcatatggcttttagttcacttgtttgtatttcatcttgatttttttctttggaaaataaagcattctatttggttcagatttctcagatttg

SEQ ID NO: 789 - DNA, 2627 bp, Homo sapiens
ctgcgcgtaggcgggcgggcggggctgcgcgtccgggctcccggggctggtaatatagcggctcgccgaggcgctggtgcacgggggcagcgcgcagcaggccggcgggcaggcgggcgggctggctggcasgcaggactgggatcgaggcccagaaaacggagcagcgggcaccagggaggcctggaacggggcgagcgccatgagcaacaaatgcgacgtggtcgtggtggggggcggcatctcaggtatggcagcagccaaacttctgcatgactctggactkaatgtggttgttctggaagcccgggaccgtgtgggaggcaggacttacactcttaggaaccaaaaggttaaatatgtggaccttggaggatcctatgttggaccaacccagaatcgtatcttgagattagccaaggagctaggattggagacctacaaagtgaatgaggttgagcgtctgatccaccatgtaaagggcaaatcataccccttcagggggccattcccacctgtatggaatccaattacctacttagatcataacaacttttggaggacaatggatgacatggggcgagagattccgagtgatgccccatggaaggctccccttgcagaagagtgggacaacatgacaatgaaggagctactggacaagctctgctggactgaatctgcaaagcagcttgccactctctttgtgaacctgtgtgtcactgcagagacccatgaggtctctgctctctggttcctgtggtatgtgaagcagtgtggaggcacaacaagaatcatctcgacaacraatggaggacaggagaggaaatttgtgggcggatctggtcaagtgagtgagcggataatggacctccttggagaccgagtgaagctggagaggcctgtgatctacattgaccagacaagagaaaatgtccttgtggagaccctaaaccatgagatgtatgaggctaaatatgtgattagtgctattcctcctactctgggcatgaagattcacttcaatccccctctgccaatgatgagaaaccagatgatcactcgtgtgcctttgggttcagtcatcaagtgtatagtttattataaagagcctttctggaggaaaaaggattactgtggaaccatgattattgatggagaagaagctccagttgcctacacgttggatgataccaaacctgaaggcaactatgctgccataatgggatttatcctggcccacaaagccagaaaactggcacgtcttaccaaagaggaaaggttgaagaaactttgtgaactctatgccaaggttctgggttccctagaagctctggagccagtgcattatgaagaaaagaactggtgtgaggagcagtactctgggggctgctacacaacttatttcccccctgggatcctgactcaatatggaakggttctacgccagccagtggacaggatttactttgcaggcaccgagactgccacacactggagcggctacatggagggggctgtagaggccggggagagagcagcccgagagatcctgcatgccatggggaagattccagaggatgaaatctggcagtcagaaccagagtctgtggatgtccctgcacagcccatcaccaccacctttttggagagacatttgccytccgtgccaggcctgctcaggctgattggattgaccaccatcttttcagcaacggctcttggcttcctggcccacaaaagggggctacttgtgagagtctaaagagagagggtgtctgtaatcacactctcttcttactgtatttgggatatgagtttggggaaagagttgcagtaaagttccatgaagacaaatagtgtggagtgaggcggggagcatgaagataaatccaactctgactgtaaaatacatggtatctctttctccgttgtggcccctgcttagtgtcccttacctggcttagcgttctgtttcaccrgtttccaagtttatygccctcaaaatctttagaatagttaaattggcttgtttaaggttcttgctgccccacaacacaccttgcccatgcacaaggaatgaattttttcctaccattatggctttgtgcttgttcttcctcttacctgtaatagcctcaccttcccwagttctttgcattcgtccttagratactgtattgttacagctgaaagacagtaaagaccatttagtcctcaccttctgttttagagttgagcaaactgaagcccacagaggtggaacttaattacctaagagccacaataagccactggtatctgggggactagaacacaaatccaaygcttttcccacctcyttggatgttttccccaattatcctccttcactccctgtcatagttaccgayggtgtcccgttgtgtgggtttactctgtgctaagttgtctwacacttctcaaatgctactcagtatatagccttaastcttactgttttgtgcggtgtgtctccagctgattttaacttttttgatggtagaaattttatctcttcttccttttgtatcctccattgtatcttcatacaaaggacagtacacacttgggtaattaaaaataaaagttgattgaccatatctgct

SEQ ID NO: 790 - DNA, 2155 bp, Homo sapiens
ctgcgcgtaggcgggcgggcggggctgcgcgtccgggctcccggggctggtaatatagcggctcgccgaggcgctggtgcacgggggcagcgcgcagcaggccggcgggcaggcgggcgggctggctggcasgcaggactgggatcgaggcccagaaaacggagcagcgggcaccagggaggcctggaacggggcgagcgccatgagcaacaaatgcgacgtggtcgtggtggggggcggcatctcaggtatggcagcagccaaacttctgcatgactctggactkaatgtggttgttctggaagcccgggaccgtgtgggaggcaggacttacactcttaggaaccaaaaggttaaatatgtggaccttggaggatcctatgttggaccaacccagaatcgtatcttgagattagccaaggagctaggattggagacctacaaagtgaatgaggttgagcgtctgatccaccatgtaaagggcaaatcataccccttcagggggccattcccacctgtatggaatccaattacctacttagatcataacaacttttggaggacaatggatgacatggggcgagagattccgagtgatgccccatggaaggctccccttgcagaagagtgggacaacatgacaatgaaggagctactggacaagctctgctggactgaatctgcaaagcagcttgccactctctttgtgaacctgtgtgtcactgcagagacccatgaggtctctgctctctggttcctgtggtatgtgaagcagtgtggaggcacaacaagaatcatctcgacaacraatggaggacaggagaggaaatttgtgggcggatctggtcaagtgagtgagcggataatggacctccttggagaccgagtgaagctggagaggcctgtgatctacattgaccagacaagagaaaatgtccttgtggagaccctaaaccatgagatgtatgaggctaaatatgtgattagtgctattcctcctactctgggcatgaagattcacttcaatccccctctgccaatgatgagaaaccagatgatcactcgtgtgcctttgggttcagtcatcaagtgtatagtttattataaagagcctttctggaggaaaaaggattactgtggaaccatgattattgatggagaagaagctccagttgcctacacgttggatgataccaaacctgaaggcaactatgctgccataatgggatttatcctggcccacaaagccagaaaactggcacgtcttaccaaagaggaaaggttgaagaaactttgtgaactctatgccaaggttctgggttccctagaagctctggagccagtgcattatgaagaaaagaactggtgtgaggagcagtactctgggggctgctacacaacttatttcccccctgggatcctgactcaatatggaakggttctacgccagccagtggacaggatttactttgcaggcaccgagactgccacacactggagcggctacatggagggggctgtagaggccggggagagagcagcccgagagatcctgcatgccatggggaagattccagaggatgaaatctggcagtcagaaccagagtctgtggatgtccctgcacagcccatcaccaccacctttttggagagacatttgccytccgtgccaggcctgctcaggctgattggattgaccaccatcttttcagcaacggctcttggcttcctggcccacaaaagggggctacttgtgagagtctaaagagagagggtgtctgtaatcacactctcttcttactgtatttgggatatgagtttggggaaagagttgcagtaaagttccatgaagacaaatagtgtggagtgaggcggggagcatgaagataaatccaactctgactgtaaaatacatggtatctctttctccttgtgtgggtttactctgtgctaagttgtctwacacttctcaaatgctactcagtatatagccttaastcttactgttttgtgcggtgtgtctccagctgattttaacttttttgatggtagaaattttatctcttcttccttttgtatcctccattgtatcttcatacaaaggacagtacacacttgggtaattaaaaataaaagttgattgaccatatctgct

SEQ ID NO: 791 - DNA, 630 bp, Homo sapiens
cgccgaggcgctggtgcacgggggcagcgcgcagcaggccggcgggcaggcgggcgggctggctggcasgcaggactgggatcgaggcccagaaaacggagcagcgggcaccagggaggcctggaacggggcgagcgccatgagcaacaaatgcgacgtggtcgtggtggggggcggcatctcaggttagtcgcggctccaaacttctgcatgactctggactkaatgtggttgttctggaagcccgggaccgtgtgggaggcaggacttacactcttagggctaaatatgtgattagtgctattcctcctactctgggcatgaagattcacttcaatccccctctgccaatgatgagaaaccagatgatcactcgtgtgcctttgggttcagtcatcaagtgtatagtttattataaagagcctttctggaggaaaaaggattactgtggaaccatgattattgatggagaagaagctccagttgcctacacgttggatgataccaaacctgaaggcaactatgctgccataatggggttgaagaaactttgtgaactctatgccaaggttctgggttccctagaagctctggaggatttactttgcaggcaccgagactgccacacac

SEQ ID NO: 792 - DNA, 2672 bp, Homo sapiens
  misc_feature (1)...(2672): n = A,T,C or G
gggttcgccccgcccacagtgcccggctccccccgggtatcaaaagaaggatcggctccgcccccgggctccccgggggagttgatagaagggtccttcccaccctttgccgtccccactcctgtgcctacgacccaggagcgtgtcagccaaagcatggagaatcaagagaaggcgagtatcgcgggccacatgttcgacgtagtcgtgatcggaggtggcatttcaggactatctgctgccaaactcttgactgaatatggcgttagtgttttggttttagaagctcgggacagggttggaggaagaacatatactataaggaatgagcatgttgattacgtagatgttggtggagcttatgtgggaccaacccaaaacagaatcttacgcttgtctaaggagctgggcatagagacttacaaagtgaatgtcagtgagcgtctcgttcaatatgtcaaggggaaaacatatccatttcggggcgcctttccaccagtatggaatcccattgcatatttggattacaataatctgtggmggacaatagataacatggggaaggagattccaactgatgcaccctgggaggctcaacatgctgacaaatgggacaaaatgaccatgaaagagctcattgacaaaatctgctggacaaagactgctaggcrgtttgcttatctttttgtgaatatcaatgtgacctctgagcctcacgaagtgtctgccctgtggttcttgtggtatgtgaagcagtgcgggggcaccactcggatattctctgtcaccaatggtggccaggaacggaagtttgtaggtggatctggtcaagtgagcgaacggataatggacctcctcggagaccaagtgaagctgaaccatcctgtcactcacgttgaccagtcaagtgacaacatcatcatagagacgctgaaccatgaacattatgagtgcaaatacgtaattaatgcgatccctccgaccttgactgccaagattcacttcagaccagagcttccagcagagagaaaccagttaattyagcgncytccaatgggagctgtcattaagtgcatgatgtattacaaggaggccktctggaagaagaaggattactgtggctgcatgatcattgaagatgaagatgctccaatttcaataaccttggatgacaccaagccwgatgggtcactgcctgccatcatgggcttcattcttgcccggaaagctgatcgacttgctaagctacataaggaaataaggaagaagaaaatctgtgagctctatgccaaagtgctkggatcccaagaagctttacatccagtgcattatgaagagaagaactggtgtgaggagcagtactctgggggctgctacacggcctacttccctcctgggatcatgactcaatatggaagggtgattcgtcaacccgtgggcaggattttctttgcgggcacagagactgccacaaagtggagcggctacatkgaaggggcagttgaggctggagaacgagcagctagggaggtcttaaatggtctcgggaaggtgaccgagaaagayatctgggtacaagaacctgaatcaaaggacgttccagcggtagaaatcacccacaccttctgggaaaggaacctgccctctgtttctggcctgctgaagatcattggattttccacatcagtaactgccctggggtttgtgctgtacaratacaagctcctgccacggtcttgaagttctgttcttatgctctctgctcactggttttcaataccaccaagaggaaaatattgacaagtttaaaggctgtgtcattgggccatgtttaagtgtactggatttaactacctttggcttaattccaatcattgttaaacttatttgtcagtgtagatcaactcatgttaattgatagaataaagccttgtgatcactttctgaaattcacaaagttaaacgtgatgtgctcatcagaaacaatttctgtgtcctgtttttattcccttcaatgcaaaatacatgatgatttcagaaacaaagcatttgactttctgtctgtggaggtggagtaggtgaaggcccagcctgtaactgtcctttttcttcccttaggcaatggtgaactgtcattacagagcctagaggctcacagcctcctggagggtctgctgcctcaggaatctcctgaccacttgtagtccctccgacttctctagacatctagtctcagtgctagcttatttgtatttttcctctttcacttcttatggaggagagtgtttaactgagttagaatgttgaaactgacttgctgtgacttatgtgcagctttccagttgagcagaggaaaatagtggcaggactgtcccccaggaggactccctgcttagctctgtgggagaccaactacgactggcatcttctcttccccctggaaggcagctagacaccaatggatccttgtcagttgtaacattctatttcaacttcaggaaagcagcagttttcttttaatttttcctatgaccataaaattagacatacctctcaacttacatatgtcttcaacatggttacctctgcataaatattagcaaagcatgccaatttctcttaagtactgaaatacatatgataaatttgactgttatttgttgagactatca

SEQ ID NO: 793 - DNA, 4504 bp, Homo sapiens
  misc_feature (1)...(4504): n = A,T,C or G
acgcctcagcctccttccccggcggcaccggcaccggcaccagtacccgcaccagtaccggcaccggcaccagtacccgcaccagtaccggcaccggcaccagtacccgcaccagtaccggcaccggcaccgagcgcaaggcggagggcccgcccgaagccgggggcacaactgcccaggtcccgaacccggactccagcttggacgacacctcctacagccttgtcaaggcaggcgtctacccccacctcagtgcctgacactccgcggggttcaatacaagaacctcctgcacccagtaatcctttccagctgccgacacaaggacattctaaacctaataactctcgccgagtgtcagtacaagggtccgccccgctctcagtgcccagctccccccgggtatcagctgaaacatcagctccgcccctgggcgctcccggagtatcagcaaaagggttcgccccgcccacagtgcccggctccccccgggtatcaaaagaaggatcggctccgcccccgggctccccgggggagttgatagaagggtccttcccaccctttgccgtccccactcctgtgcctacgacccaggagcgtgtcagccaaagcatggagaatcaagagaaggcgagtatcgcgggccacatgttcgacgtagtcgtgatcggaggtggcatttcaggactatctgctgccaaactcttgactgaatatggcgttagtgttttggttttagaagctcgggacagggttggaggaagaacatatactataaggaatgagcatgttgattacgtagatgttggtggagcttatgtgggaccaacccaaaacagaatcttacgcttgtctaaggagctgggcatagagacttacaaagtgaatgtcagtgagcgtctcgttcaatatgtcaaggggaaaacatatccatttcggggcgcctttccaccagtatggaatcccattgcatatttggattacaataatctgtggmggacaatagataacatggggaaggagattccaactgatgcaccctgggaggctcaacatgctgacaaatgggacaaaatgaccatgaaagagctcattgacaaaatctgctggacaaagactgctaggcrgtttgcttatctttttgtgaatatcaatgtgacctctgagcctcacgaagtgtctgccctgtggttcttgtggtatgtgaagcagtgcgggggcaccactcggatattctctgtcaccaatggtggccaggaacggaagtttgtaggtggatctggtcaagtgagcgaacggataatggacctcctcggagaccaagtgaagctgaaccatcctgtcactcacgttgaccagtcaagtgacaacatcatcatagagacgctgaaccatgaacattatgagtgcaaatacgtaattaatgcgatccctccgaccttgactgccaagattcacttcagaccagagcttccagcagagagaaaccagttaattyagcgncytccaatgggagctgtcattaagtgcatgatgtattacaaggaggccktctggaagaagaaggattactgtggctgcatgatcattgaagatgaagatgctccaatttcaataaccttggatgacaccaagccwgatgggtcactgcctgccatcatgggcttcattcttgcccggaaagctgatcgacttgctaagctacataaggaaataaggaagaagaaaatctgtgagctctatgccaaagtgctkggatcccaagaagctttacatccagtgcattatgaagagaagaactggtgtgaggagcagtactctgggggctgctacacggcctacttccctcctgggatcatgactcaatatggaagggtgattcgtcaacccgtgggcaggattttctttgcgggcacagagactgccacaaagtggagcggctacatkgaaggggcagttgaggctggagaacgagcagctagggaggtcttaaatggtctcgggaaggtgaccgagaaagayatctgggtacaagaacctgaatcaaaggacgttccagcggtagaaatcacccacaccttctgggaaaggaacctgccctctgtttctggcctgctgaagatcattggattttccacatcagtaactgccctggggtttgtgctgtacaratacaagctcctgccacggtcttgaagttctgttcttatgctctctgctcactggttttcaataccaccaagaggaaaatattgacaagtttaaaggctgtgtcattgggccatgtttaagtgtactggatttaactacctttggcttaattccaatcattgttaaagtaaaaacaattcaaagaatcacctaattaatttcagtaagatcaagctccatcttatttgtcagtgtagatcaactcatgttaattgatagaataaagccttgtgatcactttctgaaattcacaaagttaaacgtgatgtgctcatcagaaacaatttctgtgtcctgtttttattcccttcaatgcaaaatacatgatgatttcagaaacaaagcatttgactttctgtctgtggaggtggagtaggtgaaggcccagcctgtaactgtcctttttcttcccttaggcaatggtgaactgtcattacagagcctagaggctcacagcctcctggaggaagcagcctccactttggatcaggaaatagtaaaggaaagcagtgttgggggtagcggcatgcagaccctcagaccagaatggggacatcttgtggtctgctgcctcaggaatctcctgaccacttgtagtccctccgacttctctagacatctagtctcagtgctagcttatttgtatttttcctctttcacttcttatggaggagagtgtttaactgagttagaatgttgaaactgacttgctgtgacttatgtgcagctttccagttgagcagaggaaaatagtggcaggactgtcccccaggaggactccctgcttagctctgtgggagaccaactacgactggcatcttctcttccccctggaaggcagctagacaccaatggatccttgtcagttgtaacattctatttcaacttcaggaaagcagcagttttcttttaatttttcctatgaccataaaattagacatacctctcaacttacatatgtcttcaacatggttacctctgcataaatattagcaaagcatgccaatttctcttaagtactgaaatacatatgataaatttgactgttatttgttgagactatcaracagaaaagaaattagggctctaatttccttaaagcaagctcacttgctttagttgttaagttttataaaagacatgaaattgagtcattttatatatgaaaactaagttctctatcttaggagtaatgtcggcccacaagggtgcccacctcttgttttccccttttaaaaactcagatttttaaaagccctttccaaaggtttcaactgtaaaatacttctttttacaatgtatcaacatatttttatttaaggggaattaacaattgccagggaaaccagccaacccaagtttattatatcattaaccttatcataaattcaaacctaagttgctggaccctggtgtgaggacataaatcttccaaagttttgcctrtcctaagagctgcatttttctactgctctttaccttgcattttagctaatttaggagttttgagaatgtattggatacgctccagtacataaggagttgccgcatattatatcagactgctttgagaaatctcatccctagtctattgcagttgtttctattagcttactgattaactcagtcctgacacaccttttgggaaatgctgatttaaacttcttaactggcaacagttggaacagtaatcagtttgctaacatatttaaagtcttgaatgttgaagaactcatgtgatttacccttttcaactttttggaaaacgatttaatttattctaattagattaaccctattaatctatggattgggtatcaaaatgaatgccagtccagatgtgcctagacacgaaattggagctgaggactctcacgatatgcaagttcatccaacgtgaagataccataagctttttctctgaaccagagaaatgaaagtcagtttaagaggctgatagatcttggccctgttaaggcatccacttcacagttctgaaggctgagtcagccccactccacagttaggccaagaattagattttaaaacttcatctgtctgtcccagttaactgttaaataaggcctcatcctccactgaagagtatggattgaaggattgtgaactatgtttagtgtgattgtgaacttggtgcctaatgttccatgtctgaagtttgccccagtgctacacgttggagtatacctatgtgtgtgctttgccactgaagtaagattttgcctgtatggtactgttttgtttgttaataaagtgcactgccacccccaatgca

SEQ ID NO: 794 - DNA, 4281 bp, Homo sapiens
  misc_feature (1)...(4281): n = A,T,C or G
tgtcaaggcaggcgtctacccccacctcagtgcctgacactccgcggggttcaatacaagaacctcctgcacccagtaatcctttccagctgccgacacaaggacattctaaacctaataactctcgccgagtgtcagtacaagggtccgccccgctctcagtgcccagctccccccgggtatcagctgaaacatcagctccgcccctgggcgctcccggagtatcagcaaaagggttcgccccgcccacagtgcccggctccccccgggtatcaaaagaaggatcggctccgcccccgggctccccgggggagttgatagaagggtccttcccaccctttgccgtccccactcctgtgcctacgacccaggagcgtgtcagccaaagcatggagaatcaagagaaggcgagtatcgcgggccacatgttcgacgtagtcgtgatcggaggtggcatttcaggactatctgctgccaaactcttgactgaatatggcgttagtgttttggttttagaagctcgggacagggttggaggaagaacatatactataaggaatgagcatgttgattacgtagatgttggtggagcttatgtgggaccaacccaaaacagaatcttacgcttgtctaaggagctgggcatagagacttacaaagtgaatgtcagtgagcgtctcgttcaatatgtcaaggggaaaacatatccatttcggggcgcctttccaccagtatggaatcccattgcatatttggattacaataatctgtggmggacaatagataacatggggaaggagattccaactgatgcaccctgggaggctcaacatgctgacaaatgggacaaaatgaccatgaaagagctcattgacaaaatctgctggacaaagactgctaggcrgtttgcttatctttttgtgaatatcaatgtgacctctgagcctcacgaagtgtctgccctgtggttcttgtggtatgtgaagcagtgcgggggcaccactcggatattctctgtcaccaatggtggccaggaacggaagtttgtaggtggatctggtcaagtgagcgaacggataatggacctcctcggagaccaagtgaagctgaaccatcctgtcactcacgttgaccagtcaagtgacaacatcatcatagagacgctgaaccatgaacattatgagtgcaaatacgtaattaatgcgatccctccgaccttgactgccaagattcacttcagaccagagcttccagcagagagaaaccagttaattyagcgncytccaatgggagctgtcattaagtgcatgatgtattacaaggaggccktctggaagaagaaggattactgtggctgcatgatcattgaagatgaagatgctccaatttcaataaccttggatgacaccaagccwgatgggtcactgcctgccatcatgggcttcattcttgcccggaaagctgatcgacttgctaagctacataaggaaataaggaagaagaaaatctgtgagctctatgccaaagtgctkggatcccaagaagctttacatccagtgcattatgaagagaagaactggtgtgaggagcagtactctgggggctgctacacggcctacttccctcctgggatcatgactcaatatggaagggtgattcgtcaacccgtgggcaggattttctttgcgggcacagagactgccacaaagtggagcggctacatkgaaggggcagttgaggctggagaacgagcagctagggaggtcttaaatggtctcgggaaggtgaccgagaaagayatctgggtacaagaacctgaatcaaaggacgttccagcggtagaaatcacccacaccttctgggaaaggaacctgccctctgtttctggcctgctgaagatcattggattttccacatcagtaactgccctggggtttgtgctgtacaratacaagctcctgccacggtcttgaagttctgttcttatgctctctgctcactggttttcaataccaccaagaggaaaatattgacaagtttaaaggctgtgtcattgggccatgtttaagtgtactggatttaactacctttggcttaattccaatcattgttaaagtaaaaacaattcaaagaatcacctaattaatttcagtaagatcaagctccatcttatttgtcagtgtagatcaactcatgttaattgatagaataaagccttgtgatcactttctgaaattcacaaagttaaacgtgatgtgctcatcagaaacaatttctgtgtcctgtttttattcccttcaatgcaaaatacatgatgatttcagaaacaaagcatttgactttctgtctgtggaggtggagtaggtgaaggcccagcctgtaactgtcctttttcttcccttaggcaatggtgaactgtcattacagagcctagaggctcacagcctcctggaggaagcagcctccactttggatcaggaaatagtaaaggaaagcagtgttgggggtagcggcatgcagaccctcagaccagaatggggacatcttgtggtctgctgcctcaggaatctcctgaccacttgtagtccctccgacttctctagacatctagtctcagtgctagcttatttgtatttttcctctttcacttcttatggaggagagtgtttaactgagttagaatgttgaaactgacttgctgtgacttatgtgcagctttccagttgagcagaggaaaatagtggcaggactgtcccccaggaggactccctgcttagctctgtgggagaccaactacgactggcatcttctcttccccctggaaggcagctagacaccaatggatccttgtcagttgtaacattctatttcaacttcaggaaagcagcagttttcttttaatttttcctatgaccataaaattagacatacctctcaacttacatatgtcttcaacatggttacctctgcataaatattagcaaagcatgccaatttctcttaagtactgaaatacatatgataaatttgactgttatttgttgagactatcaracagaaaagaaattagggctctaatttccttaaagcaagctcacttgctttagttgttaagttttataaaagacatgaaattgagtcattttatatatgaaaactaagttctctatcttaggagtaatgtcggcccacaagggtgcccacctcttgttttccccttttaaaaactcagatttttaaaagccctttccaaaggtttcaactgtaaaatacttctttttacaatgtatcaacatatttttatttaaggggaattaacaattgccagggaaaccagccaacccaagtttattatatcattaaccttatcataaattcaaacctaagttgctggaccctggtgtgaggacataaatcttccaaagttttgcctrtcctaagagctgcatttttctactgctctttaccttgcattttagctaatttaggagttttgagaatgtattggatacgctccagtacataaggagttgccgcatattatatcagactgctttgagaaatctcatccctagtctattgcagttgtttctattagcttactgattaactcagtcctgacacaccttttgggaaatgctgatttaaacttcttaactggcaacagttggaacagtaatcagtttgctaacatatttaaagtcttgaatgttgaagaactcatgtgatttacccttttcaactttttggaaaacgatttaatttattctaattagattaaccctattaatctatggattgggtatcaaaatgaatgccagtccagatgtgcctagacacgaaattggagctgaggactctcacgatatgcaagttcatccaacgtgaagataccataagctttttctctgaaccagagaaatgaaagtcagtttaagaggctgatagatcttggccctgttaaggcatccacttcacagttctgaaggctgagtcagccccactccacagttaggccaagaattagattttaaaacttcatctgtctgtcccagttaactgttaaataaggcctcatcctccactgaagagtatggattgaaggattgtgaactatgtttagtgtgattgtgaacttggtgcctaatgttccatgtctgaagtttgccccagtgctacacgttggagtatacctatgtgtgtgctttgccactgaagtaagattttgcctgtatggtactgttttgtttgttaataaagtgcactgccacccccaatgca

SEQ ID NO: 795 - DNA, 822 bp, Homo sapiens
agagccctttgctcctccctcagaatgaatggagaccagaaatcagatgtttrtgcccaagaaaagcaggatttcgttcagcacttcccccagatcattagggtgctgagtgaggatgagatggggcactcagagacaggagatgctgttgaccggctcaaggaggtcctggagtacaatgccattggaggcaagtatcaccaggatttgatggtgctagtagcattctgggagctggtggagccgaggaaacaggatgctgatagtctccagcaggccctgaccgtgggctggtgtgtggaactgctgcaagctttcttcctggtggcagatgacatcatggattcatccgtctccygccggggacagatctggtggtatcagaagccgggcatgggtttggatgccatcaatgatgctatgcttctggaactgcagccatgtacagcaggaattgatggcgacaaggagcatgctaatggcaagaagatcctgctggagatgggagagttctttcagattcaggatgattaccttgacctctttggggaccccagtgtgaccagcaaagttggcactgacatccaggacaacaaatgcggttggctgtaccagatcctgaaggagaactaccggcagaagaaggccaagaaggtggcccaggttaaggcactatctgaggagctgaatctgctggccgtgttcttgcaatatgaggaagacagttacagccacattatgggtctcattgaacagtacgcagcacccctgaccccagccatctttctggggctggtgcgcaaaatctataagcagaaaaag

SEQ ID NO: 796 - DNA, 5296 bp, Homo sapiens
gaggtgatggcaacggccaacttcggcaagatccagatcgggatttacgtggagatcaagcgcagccgaatacatcaagcaatggtaacatctttaaatgaagataatgaaagtgtaactgttgaatggatagaaaatggagatacaaaaggcaaagagattgacctggagagcatcttttcacttaaccctgaccttgttcctgatgaagaaattgaacccagtccagaaacacctccacctccagcatcctcagccaaagtaaacaaaattgtaaagaatcgacggactgtagcttctattaagaatgaccctccttcaagagataatagagtggttggttcagcacgtgcacggcccagtcaatttcctgaacagtcttcctctgcacaacagaatgcacgtagaaaatctaattgtgtgaaagaagtagaaaaactgcaagaaaaacgagagaaaaggagattgcaacagcaagaacttagagaaaaaagagcccaggacgttgatgctacaaacccaaattatgaaattatgtgtatgatcagagactttagaggaagtttggattatagaccattaacaacagcagatcctattgatgaacataggatatgtgtgtgtgtaagaaaacgaccactcaataaaaaagaaactcaaatgaaagatcttgatgtaatcacaattcctagtaaagatgttgtgatggtacatgaaccaaaacaaaaagtagatttaacaaggtacctagaaaaccaaacatttcgttttgattatgcctttgatgactcagctcctaatgaaatggtttacaggtttactgctagaccactagtggaaactatatttgaaaggggaatggctacatgctttgcttatgggcagactggaagtggaaaaactcatactatgggtggtgacttttcaggaaagaaccaagattgttctaaaggaatttatgcattagcagctcgagatgtctttttaatgctaaagaagccaaactataagaagctagaacttcaagtatatgcaaccttctttgaaatttatagtggaaaggtgtttgacttgctaaacaggaaaacaaaattaagagttctagaagatggaaaacagcaggttcaagtggtgggattacaggaacgggaggtcaaatgtgttgaagatgtactgaaactcattgacataggcaacagttgcagaacatccggtcaaacatctgcaaatgcacattcatctcggagccatgcagtgtttcagattattcttagaaggaaaggaaaactacatggcaaattttctctcattgatttggctggaaatgaaagaggagctgatacttccagtgcggacaggcaaactaggcttgaaggtgctgaaattaataaaagccttttagcactcaaggagtgcatcagagccttaggtagaaataaacctcatactcctttccgtgcaagtaaactcactcaggtgttaagagattctttcataggtgaaaactctcgtacctgcatgattgccacaatctctccaggaatggcatcctgtgaaaatactcttaatacattaagatatgcaaatagggtcaaagaattgactgtagatccaactgctgctggtgatgttcgtccaataatgcaccatccaccaaaccagattgatgacttagagasacagtggggtgtggggagttcccctcagagagatgatctaaaacttctttgtgaacaaaatgaagaagaagtctctccacagttgtttactttccacgaagctgtttcacaaatggtagaaatggaagaacaagttgtagaagatcacagggcagtgttccaggaatctattcggtggttagaagatgaaaaggccctcttagagatgactgaagaagtagattatgatgtcgattcatatgctacacaacttgaagctattcttgagcaaaaaatagacattttaactgaactgcgggataaagtgaaatctttccgtgcagctctacaagaggaggaacaagccagcaagcaaatcaacccgaagagaccccgtgccctttaaaccggcatttgctgctaaaggatacccagaaccctcactactgtaacatacaacggttcagctgtaagggccatttgaaagtttggaattttaagtgtctgtggaaaatgttttgtccttcacctgaattacatttcaattttgtgaaacactcttttgtctacaaaatgcttctagtccaggaggcacaaccaagaactgggattaatgaagcattttgtttcatttacacaaatagtgatttacttttggagatccttgtcagttttattttctatttgatgaagtaagactgtggactcaatccagagccagatagtagggggaagccacagcatttccttttaactcagttcaatttttgtagtgagactgagcagttttaaatcctttgcgtgcatgcatacctcatcagtgattgtacataccttgcccactcctagagacagctgtgctcaccttttcctgctttgtgccttgattaaggctactgaccctaaatttctgaagcacagccaagaaaaattacattcctwgtcattgtaaattacctttgtgtgtacatttttactgtatttgagacattttttgtgtgtgactagttaattttgcaggatgtgccatatcattgaacggaactaaagtctgtgacagtggatatagctgctggaccattccatcttatatgtaaagaaatctggaattattattttaaaaccatataacatgtgattataatttttcttagcattttctttgtaaagaactacaatataaactagttggtgtataataaaaagtaatgaaattctgagaagagttttatcttaggaaaatacatatatatgcagtgtgtgtgccagtgtggtattaacaagactaatagtgcagtttgatccttaccaatatcattacttaatttgaagtgttcattagcaccccaaaatataccttttctatgtactgttaaaagaaattggcttctgatgcatgaacatttacatgtacattgaaagtagtccataatagaagttagtttaagccaagtgtagacagtacattactcccttgaaaaagaattaagttgaaagagttgactttgccttaaaaggcagatctaacccaagctccatccagtaccaaatgtgaaacttcattgttgtttggtgagaatcgccaaattctcactaatacattggtatggtgtagggcatgctactttttaaacagcagcacttatttttacagattgctactccaaggaagaaaactggccacttttcatgtaaatattttgttcaaagatttgtatatctctctaggagttttccctcagttcccaggatggggtccaggagtagattaacagctaaaaatctcccaaggatatcttgttttgatttatttactccagggaactatcagctccttcacaggagccaaaggggagctatgaatagagggtcacatgagccagattctttactgttcataaaacccagagagtagttgtgaaagatcctaatacaattgtgaaaakctctgtaaacatgaaatctaaaacaaatgtagattttcacaatatgcttattaataaatgaagtctatggaataagttttagagataatttacttcagtcacctttgttttggaaaggactcaggttttcttgcagctgtaagatatattctatttgtgtttatttcaaagggaagaggaaggatggasaactgttacaattgaccttgcaaaggatatttaaaaaaaaggtagtttttgagattaaccaactttcaaagggcaataaagacatgtgaatttgctcattttaaagcacaacagatgattagcttcaaatttattatttgcattggatgggtactgtctttggaaagtctccttatagacaaatatgctgccttacactatgatggcttcattctgatcaggtattttaaaaattagtaccagaaaagatactggaggtaatataatacagtccttcagctttacagatagtgaaaactgaaggccagaaaaggaactaaaactcagcagttcataggggtagagggaaataacctgagaaagccgagwtaaatcttaaaatttttactataaggatagagatgatacaagtgaactctgcaaaatagttttgtgaaattaaacaaaaaaatctaytcttaatgwatatttcatatttgtttaacaaaagcagcttgatgcctttgttctggattatacattaagaacaagcattattttaaacactcttctattaagttaggtattaaaaaaagccaaatatcaataaagatatttttattaattttttatagaaacaaaatagctactataactctattatagtatattaacagcacttagtattatattgacttaaacatagtagctaataaaactagtttatgacatctattgaaattctcagtctgacagttttaaaatagcttaaaactaagcaccrggtatatgaaaaaggaactggaaattttaattgtccagaaatcataggaatactgggaacctgtagttaygggaaatggctgtttttctgaagttgaaaccagtttcaattacaaaaccctctgaaattttgctaagcctatagttatctccctaagaaccataaaaaaagatmattttattgttaatttcattccagtttagcttcctcattttacatgttgggagtcatgccctttaatatgcctggcactgcacggtggcagtagcagacttgggcttacccagaaccctaagtctctgacgctataggatagcgaaagaggtaggcaatcgtaacagacactgtataggataaatagggaagagaatgagagaaccaaaataaaaataatttaagaaacaattgttttactgtacatgtgaataacaagaaatggtacggggaatgtgaataacacgaaatggtatggggaatgtgtgactagtgaagcatattttaacttttttattactggaggaacagagctaaaggcctaaagaaggccttacagtatataacagtaaatagaagagtaacatctttatacaataaactgttagaaatgataagtgtaaagttgtgcgtctctgcggctcctgaacttgaagattattatgaatagattggaccagcattatatattaaaaactttgatacttagaactttccaactttaaaattcagaatcataaatggtg

SEQ ID NO: 797 - DNA, 5362 bp, Homo sapiens
ataggccgaatacatcaagcaatggtaacatctttaaatgaagataatgaaagtgtaactgttgaatggatagaaaatggagatacaaaaggcaaagagattgacctggagagcatcttttcacttaaccctgaccttgttcctgatgaagaaattgaacccagtccagaaacacctccacctccagcatcctcagccaaagtaaacaaaattgtaaagaatcgacggactgtagcttctattaagaatgaccctccttcaagagataatagagtggttggttcagcacgtgcacggcccagtcaatttcctgaacagtcttcctctgcacaacagaatggtagtgtttcagatatatctccagttcaagctgcaaaaaaggaatttggacccccttcacgtagaaaatctaattgtgtgaaagaagtagaaaaactgcaagaaaaacgagagaaaaggagattgcaacagcaagaacttagagaaaaaagagcccaggacgttgatgctacaaacccaaattatgaaattatgtgtatgatcagagactttagaggaagtttggattatagaccattaacaacagcagatcctattgatgaacataggatatgtgtgtgtgtaagaaaacgaccactcaataaaaaagaaactcaaatgaaagatcttgatgtaatcacaattcctagtaaagatgttgtgatggtacatgaaccaaaacaaaaagtagatttaacaaggtacctagaaaaccaaacatttcgttttgattatgcctttgatgactcagctcctaatgaaatggtttacaggtttactgctagaccactagtggaaactatatttgaaaggggaatggctacatgctttgcttatgggcagactggaagtggaaaaactcatactatgggtggtgacttttcaggaaagaaccaagattgttctaaaggaatttatgcattagcagctcgagatgtctttttaatgctaaagaagccaaactataagaagctagaacttcaagtatatgcaaccttctttgaaatttatagtggaaaggtgtttgacttgctaaacaggaaaacaaaattaagagttctagaagatggaaaacagcaggttcaagtggtgggattacaggaacgggaggtcaaatgtgttgaagatgtactgaaactcattgacataggcaacagttgcagaacatccggtcaaacatctgcaaatgcacattcatctcggagccatgcagtgtttcagattattcttagaaggaaaggaaaactacatggcaaattttctctcattgatttggctggaaatgaaagaggagctgatacttccagtgcggacaggcaaactaggcttgaaggtgctgaaattaataaaagccttttagcactcaaggagtgcatcagagccttaggtagaaataaacctcatactcctttccgtgcaagtaaactcactcaggtgttaagagattctttcataggtgaaaactctcgtacctgcatgattgccacaatctctccaggaatggcatcctgtgaaaatactcttaatacattaagatatgcaaatagggtcaaagaattgactgtagatccaactgctgctggtgatgttcgtccaataatgcaccatccaccaaaccagattgatgacttagagasacagtggggtgtggggagttcccctcagagagatgatctaaaacttctttgtgaacaaaatgaagaagaagtctctccacagttgtttactttccacgaagctgtttcacaaatggtagaaatggaagaacaagttgtagaagatcacagggcagtgttccaggaatctattcggtggttagaagatgaaaaggccctcttagagatgactgaagaagtagattatgatgtcgattcatatgctacacaacttgaagctattcttgagcaaaaaatagacattttaactgaactgcgggataaagtgaaatctttccgtgcagctctacaagaggaggaacaagccagcaagcaaatcaacccgaagagaccccgtgccctttaaaccggcatttgctgctaaaggatacccagaaccctcactactgtaacatacaacggttcagctgtaagggccatttgaaagtttggaattttaagtgtctgtggaaaatgttttgtccttcacctgaattacatttcaattttgtgaaacactcttttgtctacaaaatgcttctagtccaggaggcacaaccaagaactgggattaatgaagcattttgtttcatttacacaaatagtgatttacttttggagatccttgtcagttttattttctatttgatgaagtaagactgtggactcaatccagagccagatagtagggggaagccacagcatttccttttaactcagttcaatttttgtagtgagactgagcagttttaaatcctttgcgtgcatgcatacctcatcagtgattgtacataccttgcccactcctagagacagctgtgctcaccttttcctgctttgtgccttgattaaggctactgaccctaaatttctgaagcacagccaagaaaaattacattcctwgtcattgtaaattacctttgtgtgtacatttttactgtatttgagacattttttgtgtgtgactagttaattttgcaggatgtgccatatcattgaacggaactaaagtctgtgacagtggatatagctgctggaccattccatcttatatgtaaagaaatctggaattattattttaaaaccatataacatgtgattataatttttcttagcattttctttgtaaagaactacaatataaactagttggtgtataataaaaagtaatgaaattctgagaagagttttatcttaggaaaatacatatatatgcagtgtgtgtgccagtgtggtattaacaagactaatagtgcagtttgatccttaccaatatcattacttaatttgaagtgttcattagcaccccaaaatataccttttctatgtactgttaaaagaaattggcttctgatgcatgaacatttacatgtacattgaaagtagtccataatagaagttagtttaagccaagtgtagacagtacattactcccttgaaaaagaattaagttgaaagagttgactttgccttaaaaggcagatctaacccaagctccatccagtaccaaatgtgaaacttcattgttgtttggtgagaatcgccaaattctcactaatacattggtatggtgtagggcatgctactttttaaacagcagcacttatttttacagattgctactccaaggaagaaaactggccacttttcatgtaaatattttgttcaaagatttgtatatctctctaggagttttccctcagttcccaggatggggtccaggagtagattaacagctaaaaatctcccaaggatatcttgttttgatttatttactccagggaactatcagctccttcacaggagccaaaggggagctatgaatagagggtcacatgagccagattctttactgttcataaaacccagagagtagttgtgaaagatcctaatacaattgtgaaaakctctgtaaacatgaaatctaaaacaaatgtagattttcacaatatgcttattaataaatgaagtctatggaataagttttagagataatttacttcagtcacctttgttttggaaaggactcaggttttcttgcagctgtaagatatattctatttgtgtttatttcaaagggaagaggaaggatggasaactgttacaattgaccttgcaaaggatatttaaaaaaaaggtagtttttgagattaaccaactttcaaagggcaataaagacatgtgaatttgctcattttaaagcacaacagatgattagcttcaaatttattatttgcattggatgggtactgtctttggaaagtctccttatagacaaatatgctgccttacactatgatggcttcattctgatcaggtattttaaaaattagtaccagaaaagatactggaggtaatataatacagtccttcagctttacagatagtgaaaactgaaggccagaaaaggaactaaaactcagcagttcataggggtagagggaaataacctgagaaagccgagwtaaatcttaaaatttttactataaggatagagatgatacaagtgaactctgcaaaatagttttgtgaaattaaacaaaaaaatctaytcttaatgwatatttcatatttgtttaacaaaagcagcttgatgcctttgttctggattatacattaagaacaagcattattttaattatgtagtaacatttactatgactttgaagccagatttcaaaatctggctttgttaaattaattggaaacactcttctattaagttaggtattaaaaaaagccaaatatcaataaagatatttttattaattttttatagaaacaaaatagctactataactctattatagtatattaacagcacttagtattatattgacttaaacatagtagctaataaaactagtttatgacatctattgaaattctcagtctgacagttttaaaatagcttaaaactaagcaccrggtatatgaaaaaggaactggaaattttaattgtccagaaatcataggaatactgggaacctgtagttaygggaaatggctgtttttctgaagttgaaaccagtttcaattacaaaaccctctgaaattttgctaagcctatagttatctccctaagaaccataaaaaaagatmattttattgttaatttcattccagtttagcttcctcattttacatgttgggagtcatgccctttaatatgcctggcactgcacggtggcagtagcagacttgggcttacccagaaccctaagtctctgacgctataggatagcgaaagaggtaggcaatcgtaacagacactgtataggataaatagggaagagaatgagagaaccaaaataaaaataatttaagaaacaattgttttactgtacatgtgaataacaagaaatggtacggggaatgtgaataacacgaaatggtatggggaatgtgtgactagtgaagcatattttaacttttttattactggaggaacagagctaaaggcctaaagaaggccttacagtatataacagtaaatagaagagtaacatctttatacaataaactgttagaaatgataagtgtaaagttgtgcgtctctgcggctcctgaacttgaagattattatgaatagattggaccagcattatatattaaaaactttgatacttagaactttccaactttaaaattcagaatcataaatggtg

SEQ ID NO: 798 - DNA, 5353 bp, Homo sapiens
gaggtgatggcaacggccaacttcggcaagatccagatcgggatttacgtggagatcaagcgcagccgaatacatcaagcaatggtaacatctttaaatgaagataatgaaagtgtaactgttgaatggatagaaaatggagatacaaaaggcaaagagattgacctggagagcatcttttcacttaaccctgaccttgttcctgatgaagaaattgaacccagtccagaaacacctccacctccagcatcctcagccaaagtaaacaaaattgtaaagaatcgacggactgtagcttctattaagaatgaccctccttcaagagataatagagtggttggttcagcacgtgcacggcccagtcaatttcctgaacagtcttcctctgcacaacagaatggtagtgtttcagatatatctccagttcaagctgcaaaaaaggaatttggacccccttcacgtagaaaatctaattgtgtgaaagaagtagaaaaactgcaagaaaaacgagagaaaaggagattgcaacagcaagaacttagagaaaaaagagcccaggacgttgatgctacaaacccaaattatgaaattatgtgtatgatcagagactttagaggaagtttggattatagaccattaacaacagcagatcctattgatgaacataggatatgtgtgtgtgtaagaaaacgaccactcaataaaaaagaaactcaaatgaaagatcttgatgtaatcacaattcctagtaaagatgttgtgatggtacatgaaccaaaacaaaaagtagatttaacaaggtacctagaaaaccaaacatttcgttttgattatgcctttgatgactcagctcctaatgaaatggtttacaggtttactgctagaccactagtggaaactatatttgaaaggggaatggctacatgctttgcttatgggcagactggaagtggaaaaactcatactatgggtggtgacttttcaggaaagaaccaagattgttctaaaggaatttatgcattagcagctcgagatgtctttttaatgctaaagaagccaaactataagaagctagaacttcaagtatatgcaaccttctttgaaatttatagtggaaaggtgtttgacttgctaaacaggaaaacaaaattaagagttctagaagatggaaaacagcaggttcaagtggtgggattacaggaacgggaggtcaaatgtgttgaagatgtactgaaactcattgacataggcaacagttgcagaacatccggtcaaacatctgcaaatgcacattcatctcggagccatgcagtgtttcagattattcttagaaggaaaggaaaactacatggcaaattttctctcattgatttggctggaaatgaaagaggagctgatacttccagtgcggacaggcaaactaggcttgaaggtgctgaaattaataaaagccttttagcactcaaggagtgcatcagagccttaggtagaaataaacctcatactcctttccgtgcaagtaaactcactcaggtgttaagagattctttcataggtgaaaactctcgtacctgcatgattgccacaatctctccaggaatggcatcctgtgaaaatactcttaatacattaagatatgcaaatagggtcaaagaattgactgtagatccaactgctgctggtgatgttcgtccaataatgcaccatccaccaaaccagattgatgacttagagasacagtggggtgtggggagttcccctcagagagatgatctaaaacttctttgtgaacaaaatgaagaagaagtctctccacagttgtttactttccacgaagctgtttcacaaatggtagaaatggaagaacaagttgtagaagatcacagggcagtgttccaggaatctattcggtggttagaagatgaaaaggccctcttagagatgactgaagaagtagattatgatgtcgattcatatgctacacaacttgaagctattcttgagcaaaaaatagacattttaactgaactgcgggataaagtgaaatctttccgtgcagctctacaagaggaggaacaagccagcaagcaaatcaacccgaagagaccccgtgccctttaaaccggcatttgctgctaaaggatacccagaaccctcactactgtaacatacaacggttcagctgtaagggccatttgaaagtttggaattttaagtgtctgtggaaaatgttttgtccttcacctgaattacatttcaattttgtgaaacactcttttgtctacaaaatgcttctagtccaggaggcacaaccaagaactgggattaatgaagcattttgtttcatttacacaaatagtgatttacttttggagatccttgtcagttttattttctatttgatgaagtaagactgtggactcaatccagagccagatagtagggggaagccacagcatttccttttaactcagttcaatttttgtagtgagactgagcagttttaaatcctttgcgtgcatgcatacctcatcagtgattgtacataccttgcccactcctagagacagctgtgctcaccttttcctgctttgtgccttgattaaggctactgaccctaaatttctgaagcacagccaagaaaaattacattcctwgtcattgtaaattacctttgtgtgtacatttttactgtatttgagacattttttgtgtgtgactagttaattttgcaggatgtgccatatcattgaacggaactaaagtctgtgacagtggatatagctgctggaccattccatcttatatgtaaagaaatctggaattattattttaaaaccatataacatgtgattataatttttcttagcattttctttgtaaagaactacaatataaactagttggtgtataataaaaagtaatgaaattctgagaagagttttatcttaggaaaatacatatatatgcagtgtgtgtgccagtgtggtattaacaagactaatagtgcagtttgatccttaccaatatcattacttaatttgaagtgttcattagcaccccaaaatataccttttctatgtactgttaaaagaaattggcttctgatgcatgaacatttacatgtacattgaaagtagtccataatagaagttagtttaagccaagtgtagacagtacattactcccttgaaaaagaattaagttgaaagagttgactttgccttaaaaggcagatctaacccaagctccatccagtaccaaatgtgaaacttcattgttgtttggtgagaatcgccaaattctcactaatacattggtatggtgtagggcatgctactttttaaacagcagcacttatttttacagattgctactccaaggaagaaaactggccacttttcatgtaaatattttgttcaaagatttgtatatctctctaggagttttccctcagttcccaggatggggtccaggagtagattaacagctaaaaatctcccaaggatatcttgttttgatttatttactccagggaactatcagctccttcacaggagccaaaggggagctatgaatagagggtcacatgagccagattctttactgttcataaaacccagagagtagttgtgaaagatcctaatacaattgtgaaaakctctgtaaacatgaaatctaaaacaaatgtagattttcacaatatgcttattaataaatgaagtctatggaataagttttagagataatttacttcagtcacctttgttttggaaaggactcaggttttcttgcagctgtaagatatattctatttgtgtttatttcaaagggaagaggaaggatggasaactgttacaattgaccttgcaaaggatatttaaaaaaaaggtagtttttgagattaaccaactttcaaagggcaataaagacatgtgaatttgctcattttaaagcacaacagatgattagcttcaaatttattatttgcattggatgggtactgtctttggaaagtctccttatagacaaatatgctgccttacactatgatggcttcattctgatcaggtattttaaaaattagtaccagaaaagatactggaggtaatataatacagtccttcagctttacagatagtgaaaactgaaggccagaaaaggaactaaaactcagcagttcataggggtagagggaaataacctgagaaagccgagwtaaatcttaaaatttttactataaggatagagatgatacaagtgaactctgcaaaatagttttgtgaaattaaacaaaaaaatctaytcttaatgwatatttcatatttgtttaacaaaagcagcttgatgcctttgttctggattatacattaagaacaagcattattttaaacactcttctattaagttaggtattaaaaaaagccaaatatcaataaagatatttttattaattttttatagaaacaaaatagctactataactctattatagtatattaacagcacttagtattatattgacttaaacatagtagctaataaaactagtttatgacatctattgaaattctcagtctgacagttttaaaatagcttaaaactaagcaccrggtatatgaaaaaggaactggaaattttaattgtccagaaatcataggaatactgggaacctgtagttaygggaaatggctgtttttctgaagttgaaaccagtttcaattacaaaaccctctgaaattttgctaagcctatagttatctccctaagaaccataaaaaaagatmattttattgttaatttcattccagtttagcttcctcattttacatgttgggagtcatgccctttaatatgcctggcactgcacggtggcagtagcagacttgggcttacccagaaccctaagtctctgacgctataggatagcgaaagaggtaggcaatcgtaacagacactgtataggataaatagggaagagaatgagagaaccaaaataaaaataatttaagaaacaattgttttactgtacatgtgaataacaagaaatggtacggggaatgtgaataacacgaaatggtatggggaatgtgtgactagtgaagcatattttaacttttttattactggaggaacagagctaaaggcctaaagaaggccttacagtatataacagtaaatagaagagtaacatctttatacaataaactgttagaaatgataagtgtaaagttgtgcgtctctgcggctcctgaacttgaagattattatgaatagattggaccagcattatatattaaaaactttgatacttagaactttccaactttaaaattcagaatcataaatggtg

SEQ ID NO: 799 - DNA, 5588 bp, Homo sapiens
tagcttcaccccgactacccggcgtgcgcgtcctcctgccggcctgcaggcccggggcctccgcctgcttccccacagctgctccttgcggccccgcttgcgttcacgctgtcgcccgggccggcgcggccgcgggcaaccgctccccctcccacacctaccccgccccctccccgccttttccgccctccggtccccctccctcggcccgctgctgctgctccagatgaggtgatggcaacggccaacttcggcaagatccagatcgggatttacgtggagatcaagcgcagcgataggccgaatacatcaagcaatggtaacatctttaaatgaagataatgaaagtgtaactgttgaatggatagaaaatggagatacaaaaggcaaagagattgacctggagagcatcttttcacttaaccctgaccttgttcctgatgaagaaattgaacccagtccagaaacacctccacctccagcatcctcagccaaagtaaacaaaattgtaaagaatcgacggactgtagcttctattaagaatgaccctccttcaagagataatagagtggttggttcagcacgtgcacggcccagtcaatttcctgaacagtcttcctctgcacaacagaatggtagtgtttcagatatatctccagttcaagctgcaaaaaaggaatttggacccccttcacgtagaaaatctaattgtgtgaaagaagtagaaaaactgcaagaaaaacgagagaaaaggagattgcaacagcaagaacttagagaaaaaagagcccaggacgttgatgctacaaacccaaattatgaaattatgtgtatgatcagagactttagaggaagtttggattatagaccattaacaacagcagatcctattgatgaacataggatatgtgtgtgtgtaagaaaacgaccactcaataaaaaagaaactcaaatgaaagatcttgatgtaatcacaattcctagtaaagatgttgtgatggtacatgaaccaaaacaaaaagtagatttaacaaggtacctagaaaaccaaacatttcgttttgattatgcctttgatgactcagctcctaatgaaatggtttacaggtttactgctagaccactagtggaaactatatttgaaaggggaatggctacatgctttgcttatgggcagactggaagtggaaaaactcatactatgggtggtgacttttcaggaaagaaccaagattgttctaaaggaatttatgcattagcagctcgagatgtctttttaatgctaaagaagccaaactataagaagctagaacttcaagtatatgcaaccttctttgaaatttatagtggaaaggtgtttgacttgctaaacaggaaaacaaaattaagagttctagaagatggaaaacagcaggttcaagtggtgggattacaggaacgggaggtcaaatgtgttgaagatgtactgaaactcattgacataggcaacagttgcagaacatccggtcaaacatctgcaaatgcacattcatctcggagccatgcagtgtttcagattattcttagaaggaaaggaaaactacatggcaaattttctctcattgatttggctggaaatgaaagaggagctgatacttccagtgcggacaggcaaactaggcttgaaggtgctgaaattaataaaagccttttagcactcaaggagtgcatcagagccttaggtagaaataaacctcatactcctttccgtgcaagtaaactcactcaggtgttaagagattctttcataggtgaaaactctcgtacctgcatgattgccacaatctctccaggaatggcatcctgtgaaaatactcttaatacattaagatatgcaaatagggtcaaagaattgactgtagatccaactgctgctggtgatgttcgtccaataatgcaccatccaccaaaccagattgatgacttagagasacagtggggtgtggggagttcccctcagagagatgatctaaaacttctttgtgaacaaaatgaagaagaagtctctccacagttgtttactttccacgaagctgtttcacaaatggtagaaatggaagaacaagttgtagaagatcacagggcagtgttccaggaatctattcggtggttagaagatgaaaaggccctcttagagatgactgaagaagtagattatgatgtcgattcatatgctacacaacttgaagctattcttgagcaaaaaatagacattttaactgaactgcgggataaagtgaaatctttccgtgcagctctacaagaggaggaacaagccagcaagcaaatcaacccgaagagaccccgtgccctttaaaccggcatttgctgctaaaggatacccagaaccctcactactgtaacatacaacggttcagctgtaagggccatttgaaagtttggaattttaagtgtctgtggaaaatgttttgtccttcacctgaattacatttcaattttgtgaaacactcttttgtctacaaaatgcttctagtccaggaggcacaaccaagaactgggattaatgaagcattttgtttcatttacacaaatagtgatttacttttggagatccttgtcagttttattttctatttgatgaagtaagactgtggactcaatccagagccagatagtagggggaagccacagcatttccttttaactcagttcaatttttgtagtgagactgagcagttttaaatcctttgcgtgcatgcatacctcatcagtgattgtacataccttgcccactcctagagacagctgtgctcaccttttcctgctttgtgccttgattaaggctactgaccctaaatttctgaagcacagccaagaaaaattacattcctwgtcattgtaaattacctttgtgtgtacatttttactgtatttgagacattttttgtgtgtgactagttaattttgcaggatgtgccatatcattgaacggaactaaagtctgtgacagtggatatagctgctggaccattccatcttatatgtaaagaaatctggaattattattttaaaaccatataacatgtgattataatttttcttagcattttctttgtaaagaactacaatataaactagttggtgtataataaaaagtaatgaaattctgagaagagttttatcttaggaaaatacatatatatgcagtgtgtgtgccagtgtggtattaacaagactaatagtgcagtttgatccttaccaatatcattacttaatttgaagtgttcattagcaccccaaaatataccttttctatgtactgttaaaagaaattggcttctgatgcatgaacatttacatgtacattgaaagtagtccataatagaagttagtttaagccaagtgtagacagtacattactcccttgaaaaagaattaagttgaaagagttgactttgccttaaaaggcagatctaacccaagctccatccagtaccaaatgtgaaacttcattgttgtttggtgagaatcgccaaattctcactaatacattggtatggtgtagggcatgctactttttaaacagcagcacttatttttacagattgctactccaaggaagaaaactggccacttttcatgtaaatattttgttcaaagatttgtatatctctctaggagttttccctcagttcccaggatggggtccaggagtagattaacagctaaaaatctcccaaggatatcttgttttgatttatttactccagggaactatcagctccttcacaggagccaaaggggagctatgaatagagggtcacatgagccagattctttactgttcataaaacccagagagtagttgtgaaagatcctaatacaattgtgaaaakctctgtaaacatgaaatctaaaacaaatgtagattttcacaatatgcttattaataaatgaagtctatggaataagttttagagataatttacttcagtcacctttgttttggaaaggactcaggttttcttgcagctgtaagatatattctatttgtgtttatttcaaagggaagaggaaggatggasaactgttacaattgaccttgcaaaggatatttaaaaaaaaggtagtttttgagattaaccaactttcaaagggcaataaagacatgtgaatttgctcattttaaagcacaacagatgattagcttcaaatttattatttgcattggatgggtactgtctttggaaagtctccttatagacaaatatgctgccttacactatgatggcttcattctgatcaggtattttaaaaattagtaccagaaaagatactggaggtaatataatacagtccttcagctttacagatagtgaaaactgaaggccagaaaaggaactaaaactcagcagttcataggggtagagggaaataacctgagaaagccgagwtaaatcttaaaatttttactataaggatagagatgatacaagtgaactctgcaaaatagttttgtgaaattaaacaaaaaaatctaytcttaatgwatatttcatatttgtttaacaaaagcagcttgatgcctttgttctggattatacattaagaacaagcattattttaaacactcttctattaagttaggtattaaaaaaagccaaatatcaataaagatatttttattaattttttatagaaacaaaatagctactataactctattatagtatattaacagcacttagtattatattgacttaaacatagtagctaataaaactagtttatgacatctattgaaattctcagtctgacagttttaaaatagcttaaaactaagcaccrggtatatgaaaaaggaactggaaattttaattgtccagaaatcataggaatactgggaacctgtagttaygggaaatggctgtttttctgaagttgaaaccagtttcaattacaaaaccctctgaaattttgctaagcctatagttatctccctaagaaccataaaaaaagatmattttattgttaatttcattccagtttagcttcctcattttacatgttgggagtcatgccctttaatatgcctggcactgcacggtggcagtagcagacttgggcttacccagaaccctaagtctctgacgctataggatagcgaaagaggtaggcaatcgtaacagacactgtataggataaatagggaagagaatgagagaaccaaaataaaaataatttaagaaacaattgttttactgtacatgtgaataacaagaaatggtacggggaatgtgaataacacgaaatggtatggggaatgtgtgactagtgaagcatattttaacttttttattactggaggaacagagctaaaggcctaaagaaggccttacagtatataacagtaaatagaagagtaacatctttatacaataaactgttagaaatgataagtgtaaagttgtgcgtctctgcggctcctgaacttgaagattattatgaatagattggaccagcattatatattaaaaactttgatacttagaactttccaactttaaaattcagaatcataaatggtg

SEQ ID NO: 800 - DNA, 5656 bp, Homo sapiens
tagcttcaccccgactacccggcgtgcgcgtcctcctgccggcctgcaggcccggggcctccgcctgcttccccacagctgctccttgcggccccgcttgcgttcacgctgtcgcccgggccggcgcggccgcgggcaaccgctccccctcccacacctaccccgccccctccccgccttttccgccctccggtccccctccctcggcccgctgctgctgctccagatgaggtgatggcaacggccaacttcggcaagatccagatcgggatttacgtggagatcaagcgcagcgatggccgaatacatcaagcaatggtaacatctttaaatgaagataatgaaagtgtaactgttgaatggatagaaaatggagatacaaaaggcaaagagattgacctggagagcatcttttcacttaaccctgaccttgttcctgatgaagaaattgaacccagtccagaaacacctccacctccagcatcctcagccaaagtaaacaaaattgtaaagaatcgacggactgtagcttctattaagaatgaccctccttcaagagataatagagtggttggttcagcacgtgcacggcccagtcaatttcctgaacagtcttcctctgcacaacagaatggtagtgtttcagatatatctccagttcaagctgcaaaaaaggaatttggacccccttcacgtagaaaatctaattgtgtgaaagaagtagaaaaactgcaagaaaaacgagagaaaaggagattgcaacagcaagaacttagagaaaaaagagcccaggacgttgatgctacaaacccaaattatgaaattatgtgtatgatcagagactttagaggaagtttggattatagaccattaacaacagcagatcctattgatgaacataggatatgtgtgtgtgtaagaaaacgaccactcaataaaaaagaaactcaaatgaaagatcttgatgtaatcacaattcctagtaaagatgttgtgatggtacatgaaccaaaacaaaaagtagatttaacaaggtacctagaaaaccaaacatttcgttttgattatgcctttgatgactcagctcctaatgaaatggtttacaggtttactgctagaccactagtggaaactatatttgaaaggggaatggctacatgctttgcttatgggcagactggaagtggaaaaactcatactatgggtggtgacttttcaggaaagaaccaagattgttctaaaggaatttatgcattagcagctcgagatgtctttttaatgctaaagaagccaaactataagaagctagaacttcaagtatatgcaaccttctttgaaatttatagtggaaaggtgtttgacttgctaaacaggaaaacaaaattaagagttctagaagatggaaaacagcaggttcaagtggtgggattacaggaacgggaggtcaaatgtgttgaagatgtactgaaactcattgacataggcaacagttgcagaacatccggtcaaacatctgcaaatgcacattcatctcggagccatgcagtgtttcagattattcttagaaggaaaggaaaactacatggcaaattttctctcattgatttggctggaaatgaaagaggagctgatacttccagtgcggacaggcaaactaggcttgaaggtgctgaaattaataaaagccttttagcactcaaggagtgcatcagagccttaggtagaaataaacctcatactcctttccgtgcaagtaaactcactcaggtgttaagagattctttcataggtgaaaactctcgtacctgcatgattgccacaatctctccaggaatggcatcctgtgaaaatactcttaatacattaagatatgcaaatagggtcaaagaattgactgtagatccaactgctgctggtgatgttcgtccaataatgcaccatccaccaaaccagattgatgacttagagasacagtggggtgtggggagttcccctcagagagatgatctaaaacttctttgtgaacaaaatgaagaagaagtctctccacagttgtttactttccacgaagctgtttcacaaatggtagaaatggaagaacaagttgtagaagatcacagggcagtgttccaggaatctattcggtggttagaagatgaaaaggccctcttagagatgactgaagaagtagattatgatgtcgattcatatgctacacaacttgaagctattcttgagcaaaaaatagacattttaactgaactgcgggataaagtgaaatctttccgtgcagctctacaagaggaggaacaagccagcaagcaaatcaacccgaagagaccccgtgccctttaaaccggcatttgctgctaaaggatacccagaaccctcactactgtaacatacaacggttcagctgtaagggccatttgaaagtttggaattttaagtgtctgtggaaaatgttttgtccttcacctgaattacatttcaattttgtgaaacactcttttgtctacaaaatgcttctagtccaggaggcacaaccaagaactgggattaatgaagcattttgtttcatttacacaaatagtgatttacttttggagatccttgtcagttttattttctatttgatgaagtaagactgtggactcaatccagagccagatagtagggggaagccacagcatttccttttaactcagttcaatttttgtagtgagactgagcagttttaaatcctttgcgtgcatgcatacctcatcagtgattgtacataccttgcccactcctagagacagctgtgctcaccttttcctgctttgtgccttgattaaggctactgaccctaaatttctgaagcacagccaagaaaaattacattcctwgtcattgtaaattacctttgtgtgtacatttttactgtatttgagacattttttgtgtgtgactagttaattttgcaggatgtgccatatcattgaacggaactaaagtctgtgacagtggatatagctgctggaccattccatcttatatgtaaagaaatctggaattattattttaaaaccatataacatgtgattataatttttcttagcattttctttgtaaagaactacaatataaactagttggtgtataataaaaagtaatgaaattctgagaagagttttatcttaggaaaatacatatatatgcagtgtgtgtgccagtgtggtattaacaagactaatagtgcagtttgatccttaccaatatcattacttaatttgaagtgttcattagcaccccaaaatataccttttctatgtactgttaaaagaaattggcttctgatgcatgaacatttacatgtacattgaaagtagtccataatagaagttagtttaagccaagtgtagacagtacattactcccttgaaaaagaattaagttgaaagagttgactttgccttaaaaggcagatctaacccaagctccatccagtaccaaatgtgaaacttcattgttgtttggtgagaatcgccaaattctcactaatacattggtatggtgtagggcatgctactttttaaacagcagcacttatttttacagattgctactccaaggaagaaaactggccacttttcatgtaaatattttgttcaaagatttgtatatctctctaggagttttccctcagttcccaggatggggtccaggagtagattaacagctaaaaatctcccaaggatatcttgttttgatttatttactccagggaactatcagctccttcacaggagccaaaggggagctatgaatagagggtcacatgagccagattctttactgttcataaaacccagagagtagttgtgaaagatcctaatacaattgtgaaaakctctgtaaacatgaaatctaaaacaaatgtagattttcacaatatgcttattaataaatgaagtctatggaataagttttagagataatttacttcagtcacctttgttttggaaaggactcaggttttcttgcagctgtaagatatattctatttgtgtttatttcaaagggaagaggaaggatggasaactgttacaattgaccttgcaaaggatatttaaaaaaaaggtagtttttgagattaaccaactttcaaagggcaataaagacatgtgaatttgctcattttaaagcacaacagatgattagcttcaaatttattatttgcattggatgggtactgtctttggaaagtctccttatagacaaatatgctgccttacactatgatggcttcattctgatcaggtattttaaaaattagtaccagaaaagatactggaggtaatataatacagtccttcagctttacagatagtgaaaactgaaggccagaaaaggaactaaaactcagcagttcataggggtagagggaaataacctgagaaagccgagwtaaatcttaaaatttttactataaggatagagatgatacaagtgaactctgcaaaatagttttgtgaaattaaacaaaaaaatctaytcttaatgwatatttcatatttgtttaacaaaagcagcttgatgcctttgttctggattatacattaagaacaagcattattttaattatgtagtaacatttactatgactttgaagccagatttcaaaatctggctttgttaaattaattggaaacactcttctattaagttaggtattaaaaaaagccaaatatcaataaagatatttttattaattttttatagaaacaaaatagctactataactctattatagtatattaacagcacttagtattatattgacttaaacatagtagctaataaaactagtttatgacatctattgaaattctcagtctgacagttttaaaatagcttaaaactaagcaccrggtatatgaaaaaggaactggaaattttaattgtccagaaatcataggaatactgggaacctgtagttaygggaaatggctgtttttctgaagttgaaaccagtttcaattacaaaaccctctgaaattttgctaagcctatagttatctccctaagaaccataaaaaaagatmattttattgttaatttcattccagtttagcttcctcattttacatgttgggagtcatgccctttaatatgcctggcactgcacggtggcagtagcagacttgggcttacccagaaccctaagtctctgacgctataggatagcgaaagaggtaggcaatcgtaacagacactgtataggataaatagggaagagaatgagagaaccaaaataaaaataatttaagaaacaattgttttactgtacatgtgaataacaagaaatggtacggggaatgtgaataacacgaaatggtatggggaatgtgtgactagtgaagcatattttaacttttttattactggaggaacagagctaaaggcctaaagaaggccttacagtatataacagtaaatagaagagtaacatctttatacaataaactgttagaaatgataagtgtaaagttgtgcgtctctgcggctcctgaacttgaagattattatgaatagattggaccagcattatatattaaaaactttgatacttagaactttccaactttaaaattcagaatcataaatggtg

SEQ ID NO: 801 - DNA, 5657 bp, Homo sapiens
tagcttcaccccgactacccggcgtgcgcgtcctcctgccggcctgcaggcccggggcctccgcctgcttccccacagctgctccttgcggccccgcttgcgttcacgctgtcgcccgggccggcgcggccgcgggcaaccgctccccctcccacacctaccccgccccctccccgccttttccgccctccggtccccctccctcggcccgctgctgctgctccagatgaggtgatggcaacggccaacttcggcaagatccagatcgggatttacgtggagatcaagcgcagcgataggccgaatacatcaagcaatggtaacatctttaaatgaagataatgaaagtgtaactgttgaatggatagaaaatggagatacaaaaggcaaagagattgacctggagagcatcttttcacttaaccctgaccttgttcctgatgaagaaattgaacccagtccagaaacacctccacctccagcatcctcagccaaagtaaacaaaattgtaaagaatcgacggactgtagcttctattaagaatgaccctccttcaagagataatagagtggttggttcagcacgtgcacggcccagtcaatttcctgaacagtcttcctctgcacaacagaatggtagtgtttcagatatatctccagttcaagctgcaaaaaaggaatttggacccccttcacgtagaaaatctaattgtgtgaaagaagtagaaaaactgcaagaaaaacgagagaaaaggagattgcaacagcaagaacttagagaaaaaagagcccaggacgttgatgctacaaacccaaattatgaaattatgtgtatgatcagagactttagaggaagtttggattatagaccattaacaacagcagatcctattgatgaacataggatatgtgtgtgtgtaagaaaacgaccactcaataaaaaagaaactcaaatgaaagatcttgatgtaatcacaattcctagtaaagatgttgtgatggtacatgaaccaaaacaaaaagtagatttaacaaggtacctagaaaaccaaacatttcgttttgattatgcctttgatgactcagctcctaatgaaatggtttacaggtttactgctagaccactagtggaaactatatttgaaaggggaatggctacatgctttgcttatgggcagactggaagtggaaaaactcatactatgggtggtgacttttcaggaaagaaccaagattgttctaaaggaatttatgcattagcagctcgagatgtctttttaatgctaaagaagccaaactataagaagctagaacttcaagtatatgcaaccttctttgaaatttatagtggaaaggtgtttgacttgctaaacaggaaaacaaaattaagagttctagaagatggaaaacagcaggttcaagtggtgggattacaggaacgggaggtcaaatgtgttgaagatgtactgaaactcattgacataggcaacagttgcagaacatccggtcaaacatctgcaaatgcacattcatctcggagccatgcagtgtttcagattattcttagaaggaaaggaaaactacatggcaaattttctctcattgatttggctggaaatgaaagaggagctgatacttccagtgcggacaggcaaactaggcttgaaggtgctgaaattaataaaagccttttagcactcaaggagtgcatcagagccttaggtagaaataaacctcatactcctttccgtgcaagtaaactcactcaggtgttaagagattctttcataggtgaaaactctcgtacctgcatgattgccacaatctctccaggaatggcatcctgtgaaaatactcttaatacattaagatatgcaaatagggtcaaagaattgactgtagatccaactgctgctggtgatgttcgtccaataatgcaccatccaccaaaccagattgatgacttagagasacagtggggtgtggggagttcccctcagagagatgatctaaaacttctttgtgaacaaaatgaagaagaagtctctccacagttgtttactttccacgaagctgtttcacaaatggtagaaatggaagaacaagttgtagaagatcacagggcagtgttccaggaatctattcggtggttagaagatgaaaaggccctcttagagatgactgaagaagtagattatgatgtcgattcatatgctacacaacttgaagctattcttgagcaaaaaatagacattttaactgaactgcgggataaagtgaaatctttccgtgcagctctacaagaggaggaacaagccagcaagcaaatcaacccgaagagaccccgtgccctttaaaccggcatttgctgctaaaggatacccagaaccctcactactgtaacatacaacggttcagctgtaagggccatttgaaagtttggaattttaagtgtctgtggaaaatgttttgtccttcacctgaattacatttcaattttgtgaaacactcttttgtctacaaaatgcttctagtccaggaggcacaaccaagaactgggattaatgaagcattttgtttcatttacacaaatagtgatttacttttggagatccttgtcagttttattttctatttgatgaagtaagactgtggactcaatccagagccagatagtagggggaagccacagcatttccttttaactcagttcaatttttgtagtgagactgagcagttttaaatcctttgcgtgcatgcatacctcatcagtgattgtacataccttgcccactcctagagacagctgtgctcaccttttcctgctttgtgccttgattaaggctactgaccctaaatttctgaagcacagccaagaaaaattacattcctwgtcattgtaaattacctttgtgtgtacatttttactgtatttgagacattttttgtgtgtgactagttaattttgcaggatgtgccatatcattgaacggaactaaagtctgtgacagtggatatagctgctggaccattccatcttatatgtaaagaaatctggaattattattttaaaaccatataacatgtgattataatttttcttagcattttctttgtaaagaactacaatataaactagttggtgtataataaaaagtaatgaaattctgagaagagttttatcttaggaaaatacatatatatgcagtgtgtgtgccagtgtggtattaacaagactaatagtgcagtttgatccttaccaatatcattacttaatttgaagtgttcattagcaccccaaaatataccttttctatgtactgttaaaagaaattggcttctgatgcatgaacatttacatgtacattgaaagtagtccataatagaagttagtttaagccaagtgtagacagtacattactcccttgaaaaagaattaagttgaaagagttgactttgccttaaaaggcagatctaacccaagctccatccagtaccaaatgtgaaacttcattgttgtttggtgagaatcgccaaattctcactaatacattggtatggtgtagggcatgctactttttaaacagcagcacttatttttacagattgctactccaaggaagaaaactggccacttttcatgtaaatattttgttcaaagatttgtatatctctctaggagttttccctcagttcccaggatggggtccaggagtagattaacagctaaaaatctcccaaggatatcttgttttgatttatttactccagggaactatcagctccttcacaggagccaaaggggagctatgaatagagggtcacatgagccagattctttactgttcataaaacccagagagtagttgtgaaagatcctaatacaattgtgaaaakctctgtaaacatgaaatctaaaacaaatgtagattttcacaatatgcttattaataaatgaagtctatggaataagttttagagataatttacttcagtcacctttgttttggaaaggactcaggttttcttgcagctgtaagatatattctatttgtgtttatttcaaagggaagaggaaggatggasaactgttacaattgaccttgcaaaggatatttaaaaaaaaggtagtttttgagattaaccaactttcaaagggcaataaagacatgtgaatttgctcattttaaagcacaacagatgattagcttcaaatttattatttgcattggatgggtactgtctttggaaagtctccttatagacaaatatgctgccttacactatgatggcttcattctgatcaggtattttaaaaattagtaccagaaaagatactggaggtaatataatacagtccttcagctttacagatagtgaaaactgaaggccagaaaaggaactaaaactcagcagttcataggggtagagggaaataacctgagaaagccgagwtaaatcttaaaatttttactataaggatagagatgatacaagtgaactctgcaaaatagttttgtgaaattaaacaaaaaaatctaytcttaatgwatatttcatatttgtttaacaaaagcagcttgatgcctttgttctggattatacattaagaacaagcattattttaattatgtagtaacatttactatgactttgaagccagatttcaaaatctggctttgttaaattaattggaaacactcttctattaagttaggtattaaaaaaagccaaatatcaataaagatatttttattaattttttatagaaacaaaatagctactataactctattatagtatattaacagcacttagtattatattgacttaaacatagtagctaataaaactagtttatgacatctattgaaattctcagtctgacagttttaaaatagcttaaaactaagcaccrggtatatgaaaaaggaactggaaattttaattgtccagaaatcataggaatactgggaacctgtagttaygggaaatggctgtttttctgaagttgaaaccagtttcaattacaaaaccctctgaaattttgctaagcctatagttatctccctaagaaccataaaaaaagatmattttattgttaatttcattccagtttagcttcctcattttacatgttgggagtcatgccctttaatatgcctggcactgcacggtggcagtagcagacttgggcttacccagaaccctaagtctctgacgctataggatagcgaaagaggtaggcaatcgtaacagacactgtataggataaatagggaagagaatgagagaaccaaaataaaaataatttaagaaacaattgttttactgtacatgtgaataacaagaaatggtacggggaatgtgaataacacgaaatggtatggggaatgtgtgactagtgaagcatattttaacttttttattactggaggaacagagctaaaggcctaaagaaggccttacagtatataacagtaaatagaagagtaacatctttatacaataaactgttagaaatgataagtgtaaagttgtgcgtctctgcggctcctgaacttgaagattattatgaatagattggaccagcattatatattaaaaactttgatacttagaactttccaactttaaaattcagaatcataaatggtg

SEQ ID NO: 802 - DNA, 4408 bp, Homo sapiens
  misc_feature (1)...(4408): n = A,T,C or G
cctggcctcgcgggccgtgtctccggcatcatgtgtggtatatttgcttacttaaactaccatgttcctcgaacgagacgagaaattcctggagaccctaatcaaaggcctcagagactggagtacagagctcatgatggtttaggtgtgggatttgatggaggcaatgataaagaytgggaagccaatgcctgcaaaatccagcttattaagaagaaaggaaaagttaaggcactggatgaagaagttcacaagcaacaagatatggatttggatatagaatttgatgtacaccttggaatagctcatacccgttgggcaacacatggagaacccagtcctgtcaatagccacccccagcgctctgataaaaataatgaatttatcgttattcacaatggaatcatcaccaactacaaagacttgaaaaagtttttggaaagcaaaggctatgacttcgaatctgaaacagacacagagacaattgccaagctcgttaagtatatgtatgacaatcgggaaagtcaagataccagctttactaccttggtggagagagttatccaacaattggaaggtgcttttgcacttgtgtttaaaagtgttcattttcccgggcaagcagttggcacaaggcgaggtagccctctgttgattggtgtacggagtgaacataaactttctactgatcacattcctatactctacagaacaggcaaagacaagaaaggaagctgcaatctctctcgtgtggacagcacaacctgccttttcccggtggaagaaaaagcagtggagtattactttgcttctgatgcaagtgctgtcatagaacacaccaatcgcgtcatctttctggaagatgatgatgttgcagcagtagtggatggacgtctttctatccatcgaattaaacgaactgcaggagatcaccccggacgagctgtgcaaacactccagatggaactccagcagatcatgaagggcaacttcagttcatttatgcagaaggaaatatttgagcagccagagtctgtcgtgaacacaatgagaggaagagtcaactttgatgactatactgtgaatttgggtggtttgaaggatcacataaaggagatccagagatgccggcgtttgattcttattgcttgtggaacaagttaccatgctggtgtagcaacacgtcaagttcttgaggagctgactgagttgcctgtgatggtggaactagcaagtgacttcctggacagaaacacaccagtctttcgagatgatgtttgctttttccttagtcaatcaggtgagacagcagatactttgatgggtcttcgttactgtaaggagagaggagctttaactgtggggatcacaaacacagttggcagttccatatcacgggagacagattgtggagttcatattaatgctggtcctgagattggtgtggccagtacaaaggcttataccagccagtttgtatcccttgtgatgtttgcccttatgatgtgtgatgatcggatctccatgcaagaaagacgcaaagagatcatgcttggattgaaacggctgcctgatttgattaaggaagtactgagcatggatgacgaaattcagaaactagcaacagaactttatcatcagaagtcagttctgataatgggacgaggctatcattatgctacttgtcttgaaggggcactgaaaatcaaagaaattacttatatgcactctgaaggcatccttgctggtgaattgaaacatggccctctggctttggtggataaattgatgcctgtgatcatgatcatcatgagagatcacacttatgccaagtgtcagaatgctcttcagcaagtggttgctcggcaggggcggcctgtggtaatttgtgataaggaggatactgagaccattaagaacacaaaaagaacgatcaaggtgccccactcagtggactgcttgcagggcattctcagcgtgatccctttacagttgctggctttccaccttgctgtgctgagaggctatgatgttgatttcccacggaatcttgccaaatctgtgactgtagagtgaggaatatctatacaaaatgtacgaaactgtatgattaagcaacacaagacaccttttgtatttaaaaccttgatttaaaatatcaccccttgaagcctttttttagtaaatccttatttatatatcagttataattattccactcaatatgtgatttttgtgaagttacctcttacattttcccagtaatttgtggaggactttgaataatggaatctatattggaatctgtatcagaaagattctagctattattttctttaaagaatgctgggtgttgcatttctggaccctccacttcaatctgagaagacaatatgtttctaaaaattggtacttgtttcaccatacttcattcagaccagtgaaagagtagtgcatttaattggagtatctaaagccagtggcagtgtatgctcatacttggacagttagggaagggtttgccaagttttaagagaagatgtgatttattttgaaatttgtttctgttttgtttttaaatcaaactgtaaaacttaaaactgaaaaattttattggtakgatttatatctaagtttggttagccttagtttctcagacttgttgtctattatctgtaggtggaagaaatttaggaagcgaaatattacagtagtgcattggtgggtctcaatccttaacatatttgcacaattttatagcacaaactttaaattcaagctgctttggacaactgacaatatgattttaaatttgaagatgggatgtgtacatgttgggtatcctactactttgtgttttcatctcctaaaagtgntttttatttccttgtatctgtagtcttttattttttaaatgactgctgaatgacatattttatcttgttctttaaaatcacaacacagagctgctattaaattaatattgatatattcagtattctcttcaactttgtcacgaggaagaatttcctgtagttaattttaactttccttcattacattgttgcataaaactagtcccttagtgccagtttggaagttacttgcaattgtttggaagatttgcaggtcgctgacctcatcatttcactctaagtatatgtggtaggctaagctcagaaaaaggtatgtatgctttacactgataggcaccaaatttagtattgtatcctaagtatttttcmtcttctgtattttctgtgctctacccctgaaatatatttaggaataaagaagatataaataaagtgatattggggtatgttcagcttgtaagtgtcagaaatggaagttgacaatttggattaaaatatttaaagtagaatgttattatttgatacccccaaaattgtgagtaataatttcttaatggagcttttctggccagatcttcagggctataggagagtgtgtttgtttttggtgaagtccttctttttcaaaggtttttacttttaaattgtgaagataagctatttagcacaattatttaagtaagctgttttttcctttcttttctttcttttcttgttttaacttctgggtgaggttaagattttctaatagttattgttgttgccagagaagcatagaattctgcttgtgtcttagggttagagaaagatttgttatattttgaggtaatttggaaggactttcatacatggtgactagaaacctgatctttttaagaataaaatagggtcactatttacattatatataatatatggctattatagctatattaatctactttaattgtttctaagattattttgtgtaagtcagctagcgtgtgtatagtgtcatttcttatgttttgtatattaacgttttacaaacacaatttgtgtgggtttgtagcatttcttatagtttaaagtatgattcagcattctaagttaaaactaatatgtgaagtcagtcattagtctgcataatctctgtctccctctgtgtgtgtctttctataaagcacatgtgtacacacacacacacaaatatactgaaagctagggtaagttctaaactgaatatcaaaaaccaaaatcaagaacaaagaagtgatattttccaaacaaacatggattctctgccgggtgcagtggctcagcctgtaataccagcctccactttgggagtctgaggtgggagtattgcttgagctcaagagttggagaacagcctgggcaacatggtgagacctggtctttacaaaaatttttttggccggacgcagtggctcacacctgtaatcccagcactttgggaggccgaggcrggttgatcatgaggtcaagagatcgagaccatcctggccarcatggtgaaaccccgtctttac

SEQ ID NO: 803 - DNA, 937 bp, Homo sapiens
cctggcctcgcgggccgtgtctccggcatcatgtgtggtatatttgcttacttaaactaccatgttcctcgaacgagacgagaaattcctggagaccctaatcaaaggcctcagagactggagtacagaggtatttcttttaatccagatttatctcccaagctgtattctaggcctcctacaagtttcttcctagatagaccatgatattttaaactttgcatgttcaaaaattgaactgaggccgggcgtggtgactcacgcctgtaatcccagcactttgggaggctgaggtggatggatcacttgaggtgtgggatttgatggaggcaatgataaagaytgggaagccaatgcctgcaaaatccagcttattaagaagaaaggaaaagttaaggcactggatgaagaagttcacaagcaacaagatatggatttggatatagaatttgatgtacaccttggaatagctcatacccgttgggcaacacatggagaacccagtcctgtcaatagccacccccagcgctctgataaaaataatgaatttatcgttattcacaatggaatcatcaccaactacaaagacttgaaaaagtttttggaaagcaaaggctatgacttcgaatctgaaacagacacagagacaattgccaagctcgttaagtatatgtatgacaatcgggaaagtcaagataccagctttactaccttggtggagagagttatccaacaattggaaggtgcttttgcacttgtgtttaaaagtgttcattttcccgggcaagcagttggcacaaggcgaggtagccctctgttgattggtgtacggagtgaacataaactttctactgatcacattcctatactctacagaacagctaggactcagattggatcaaaattcacacggtggggatcacagggagaaagaggt

SEQ ID NO: 804 - DNA, 4734 bp, Homo sapiens
  misc_feature (1)...(4734): n = A,T,C or G
cctggcctcgcgggccgtgtctccggcatcatgtgtggtatatttgcttacttaaactaccatgttcctcgaacgagacgagaaattcctggagaccctaatcaaaggcctcagagactggagtacagagctcatgatggtttaggtgtgggatttgatggaggcaatgataaagaytgggaagccaatgcctgcaaaatccagcttattaagaagaaaggaaaagttaaggcactggatgaagaagttcacaagcaacaagatatggatttggatatagaatttgatgtacaccttggaatagctcatacccgttgggcaacacatggagaacccagtcctgtcaatagccacccccagcgctctgataaaaataatgaatttatcgttattcacaatggaatcatcaccaactacaaagacttgaaaaagtttttggaaagcaaaggctatgacttcgaatctgaaacagacacagagacaattgccaagctcgttaagtatatgtatgacaatcgggaaagtcaagataccagctttactaccttggtggagagagttatccaacaattggaaggtgcttttgcacttgtgtttaaaagtgttcattttcccgggcaagcagttggcacaaggcgaggtagccctctgttgattggtgtacggagtgaacataaactttctactgatcacattcctatactctacagaacaggcaaagacaagaaaggaagctgcaatctctctcgtgtggacagcacaacctgccttttcccggtggaagaaaaagcagtggagtattactttgcttctgatgcaagtgctgtcatagaacacaccaatcgcgtcatctttctggaagatgatgatgttgcagcagtagtggatggacgtctttctatccatcgaattaaacgaactgcaggagatcaccccggacgagctgtgcaaacactccagatggaactccagcagatcatgaagggcaacttcagttcatttatgcagaaggaaatatttgagcagccagagtctgtcgtgaacacaatgagaggaagagtcaactttgatgactatactgtgaatttgggtggtttgaaggatcacataaaggagatccagagatgccggcgtttgattcttattgcttgtggaacaagttaccatgctggtgtagcaacacgtcaagttcttgaggagctgactgagttgcctgtgatggtggaactagcaagtgacttcctggacagaaacacaccagtctttcgagatgatgtttgctttttccttagtcaatcaggtgagacagcagatactttgatgggtcttcgttactgtaaggagagaggagctttaactgtggggatcacaaacacagttggcagttccatatcacgggagacagattgtggagttcatattaatgctggtcctgagattggtgtggccagtacaaaggcttataccagccagtttgtatcccttgtgatgtttgcccttatgatgtgtgatgatcggatctccatgcaagaaagacgcaaagagatcatgcttggattgaaacggctgcctgatttgattaaggaagtactgagcatggatgacgaaattcagaaactagcaacagaactttatcatcagaagtcagttctgataatgggacgaggctatcattatgctacttgtcttgaaggggcactgaaaatcaaagaaattacttatatgcactctgaaggcatccttctgtgctgagaggctatgatgttgatttcccacggaatcttgccaaatctgtgactgtagagtgaggaatatctatacaaaatgtacgaaactgtatgattaagcaacacaagacaccttttgtatttaaaaccttgatttaaaatatcaccccttgaagcctttttttagtaaatccttatttatatatcagttataattattccactcaatatgtgatttttgtgaagttacctcttacattttcccagtaatttgtggaggactttgaataatggaatctatattggaatctgtatcagaaagattctagctattattttctttaaagaatgctgggtgttgcatttctggaccctccacttcaatctgagaagacaatatgtttctaaaaattggtacttgtttcaccatacttcattcagaccagtgaaagagtagtgcatttaattggagtatctaaagccagtggcagtgtatgctcatacttggacagttagggaagggtttgccaagttttaagagaagatgtgatttattttgaaatttgtttctgttttgtttttaaatcaaactgtaaaacttaaaactgaaaaattttattggtakgatttatatctaagtttggttagccttagtttctcagacttgttgtctattatctgtaggtggaagaaatttaggaagcgaaatattacagtagtgcattggtgggtctcaatccttaacatatttgcacaattttatagcacaaactttaaattcaagctgctttggacaactgacaatatgattttaaatttgaagatgggatgtgtacatgttgggtatcctactactttgtgttttcatctcctaaaagtgntttttatttccttgtatctgtagtcttttattttttaaatgactgctgaatgacatattttatcttgttctttaaaatcacaacacagagctgctattaaattaatattgatatattcagtattctcttcaactttgtcacgaggaagaatttcctgtagttaattttaactttccttcattacattgttgcataaaactagtcccttagtgccagtttggaagttacttgcaattgtttggaagatttgcaggtcgctgacctcatcatttcactctaagtatatgtggtaggctaagctcagaaaaaggtatgtatgctttacactgataggcaccaaatttagtattgtatcctaagtatttttcmtcttctgtattttctgtgctctacccctgaaatatatttaggaataaagaagatataaataaagtgatattggggtatgttcagcttgtaagtgtcagaaatggaagttgacaatttggattaaaatatttaaagtagaatgttattatttgatacccccaaaattgtgagtaataatttcttaatggagcttttctggccagatcttcagggctataggagagtgtgtttgtttttggtgaagtccttctttttcaaaggtttttacttttaaattgtgaagataagctatttagcacaattatttaagtaagctgttttttcctttcttttctttcttttcttgttttaacttctgggtgaggttaagattttctaatagttattgttgttgccagagaagcatagaattctgcttgtgtcttagggttagagaaagatttgttatattttgaggtaatttggaaggactttcatacatggtgactagaaacctgatctttttaagaataaaatagggtcactatttacattatatataatatatggctattatagctatattaatctactttaattgtttctaagattattttgtgtaagtcagctagcgtgtgtatagtgtcatttcttatgttttgtatattaacgttttacaaacacaatttgtgtgggtttgtagcatttcttatagtttaaagtatgattcagcattctaagttaaaactaatatgtgaagtcagtcattagtctgcataatctctgtctccctctgtgtgtgtctttctataaagcacatgtgtacacacacacacacaaatatactgaaagctagggtaagttctaaactgaatatcaaaaaccaaaatcaagaacaaagaagtgatattttccaaacaaacatggattctctgccgggtgcagtggctcagcctgtaataccagcctccactttgggagtctgaggtgggagtattgcttgagctcaagagttggagaacatgctgggattacaggcatgagtcaccgtgtcctgcccagacatatcaaatttgacaggtattgtataccctttggatctttaggaattaatttttgcctctgtcactcagctttgyatattttgaaatggagataagtatagggaggtcttggaaggaaaattgccagaattcccaaaccatgtaacactcattgagaattccagatccattatatctaaagggcaagtgaaggaaacagtattgtgaactgggtataactccttggttcttaactagtacattcttaatctgtgagacccaaaggttgataaacaataatttaagattgtacagtactctaaacgtctgcaaaggtctagatgttatcagtatcactagtttttatttctgccagtagctcccttttaggttacattgttgtcctctttccagtgtsgcatctgtcattggtttttcactatggcaagttcattaaaaagcttgctccattgttatcttcaagtaatgcccataaggagatggaagatatctgagacaattaaggctttagcttctaggcaagagaaataacgttgcattaaatttcaagtttctttctgctagacttgaatgtgtctagccactctaatttatgggggcttttggttttttcctattgtactttgtatgtagaattgttttgaaatatcaagcatatttactttgaatttgaactctttcttaattttgtatttatcctttgaataaaatgta

SEQ ID NO: 805 - DNA, 1021 bp, Homo sapiens
cctggcctcgcgggccgtgtctccggcatcatgtgtggtatatttgcttacttaaactaccatgttcctcgaacgagacgagaaattcctggagaccctaatcaaaggcctcagagactggagtacagaggtatttcttttaatccagatttatctcccaagctgtattctaggcctcctacaagtttcttcctagatagaccatgatattttaaactttgcatgttcaaaaattgaactgaggccgggcgtggtgactcacgcctgtaatcccagcactttgggaggctgaggtggatggatcacttgaggtgtgggatttgatggaggcaatgataaagaytgggaagccaatgcctgcaaaatccagcttattaagaagaaaggaaaagttaaggcactggatgaagaagttcacaagcaacaagatatggatttggatatagaatttgatgtacaccttggaatagctcatacccgttgggcaacacatggagaacccagtcctgtcaatagccacccccagcgctctgataaaaataatgaatttatcgttattcacaatggaatcatcaccaactacaaagacttgaaaaagtttttggaaagcaaaggctatgacttcgaatctgaaacagacacagagacaattgccaagctcgttaagtatatgtatgacaatcgggaaagtcaagataccagctttactaccttggtggagagagttatccaacaattggaaggtgcttttgcacttgtgtttaaaagtgttcattttcccgggcaagcagttggcacaaggcgaggtagccctctgttgattggtgtacggagtgaacataaactttctactgatcacattcctatactctacagaacagctaggactcagattggatcaaaattcacacggtggggatcacagggagaaagaggcaaagacaagaaaggaagctgcaatctctctcgtgtggacagcacaacctgccttttcccggtggaagaaaaagcagtggagtat

SEQ ID NO: 806 - DNA, 1746 bp, Homo sapiens
cttcaatggatccttttgtggtccttgtgctctgtctctcatgtttgcttctcctttcaatctggagacagagctctgggagaggaaaactccctcctggccctactcctctcccagtgattggaaatatcctacagatagatattaaggatgtcagcaaatccttaaccaatctctcaaaaatctatggccctgtgttcactctgtattttggcctggaacgcatggtggtgctgcatggatatgaagtggtgaaggaagccctgattgatcttggagasgagttttctggaagaggccatttcccactggctgaaagagctaacagaggatttggaatcgttttcagcaatggaaagagatggaaggagatccggcgtttctccctcatgacgctgcrgaattttgggatggggaagaggagcattgaggaccrtgttcaagaggaagcccgctgccttgtggaggagttgagaaaaaccaaggcttcaccctgtgatcccactttcatcctgggctgtgctccctgcartgtgatctgctccattattttccagaaacgtttcgattataaagatcagcaatttcttaacttgatggaaaaattgaatgaaaacatcaggattgtaagcaccccctgratccagatatgcaataattttcccactatcattgattatttcccrggaacccataacaaattacttaaaaaccttgcttttatggaaagtgatattttggagaaagtaaaagaacaccaagaatcgatggacatcaacaaccctcgggactttattgattgcttcctgatcaaaatggagaaggaaaagcaaaaccaacagtctgaattcactattgaaaacttggtaatcactgcagctgacttacttggagctgggacagagacaacaagcacaaccctgagatatgctctccttctcctgctgaagcacccagaggtcacagctaaagtccaggaagagattgaacgtgtygttggcagaaaccggagcccctgcatgcaggacaggggccacatgccctacacagatgctgtggtgcacgaggtccagagatacatcgacctcatccccaccagcctgccccatgcagtgacctgtgacgttaaattcagaaactacctcattcccaagggcacaaccatattaacttccctcacttctgtgctacatgacaacaaagaatttcccaacccagagatgtttgaccctcgtcactttctggatgaaggtggaaattttaagaaaagtaactacttcatgcctttctcagcaggaaaayggatttgtgtgggagagggcctggcccgcatggagctgtttttattcctgaccttcattttacagaactttaacctgaaatctctgattgacccaaaggaccttgacacaactcctgttgtcaatggatttgcttctgtcccgcccttctatcagctgtgcttcattcctgtctgaagaagcacagatggtctggctgctcctgtgctgtccctgcagctctctttcctctggtccaaatttcactatctgtgatgcttcttctgacccgtcatctcacattttcccttcccccaagatctagtgaacattcagcctccattaaaaaagtttcactgtgcaaatatatctgctattccccatactctataatagttacattgagtgccacataatgctgatacttgtctaatgttgagttattaacatattattattaaataga

SEQ ID NO: 807 - DNA, 3311 bp, Homo sapiens
  misc_feature (1)...(3311): n = A,T,C or G
cggaagcgcccgcagcccggtaccggctcctcctgggctccctctagcgccttccccccggcccgactscgctggtcagcgccaagtgacttacgcccccgaccctgagcccggaccgctaggcgaggaggatcagatctccgctcgagaatctgaaggtgccctggtcctggaggagttccgtcccagcccgcggtctcccggtactgtcgggccccggccctctggagcttcaggaggcggccgtcagggtcggggagtatttgggtccggggtctcagggaagggcggcgcctgggtctgcggtatcggaaagagcctgctggagccaagtagccctccctctcttgggacagacccctcggtcccatgtccatgggggcaccgcggtccctcctcctggccctggctgctggcctggccgttgcccgtccgcccaacatcgtgctgatctttgccgacgacctcrgctatggggacctgggctgctatgggcaccccagctctaccactcccaacctggaccagctggcggcgggagggctgcggttcacagacttctacgtgcctgtgtctcygtgcacaccctctagggccgccctcctgaccggccggctcccggttcggatgggcatgtaccctggcgtcctggtgsccarctyccggggggdcctgcccctggaggaggtgaccgtggccgaagtcctggctgcccgaggctacctcacargaatggccrgcaagtggcaccttggggtggggcctgagggggccttccygyycccccatcagggcttccatcgatttctaggcatccygtactcccackaccasgrccsctgccagaacctgacctgcttcccgccggccactcsttgcracggtggctrtgaccagggcctggtccccakcccactgttggccaacctgtccgtggaggcgcasmccccctgdctgccyggactagaggcccgctrcatggctttcrcccatgacctcatggccgacgyccagcgccaggatcgccccttcttcctgtactatgyctctcacyacacccactacmctcagttcagtgggcagagctttgcagagcgttcaggcyrcrggccatttggggactmcctgatggagctgsatgcagctgtggggaccctgatgacagccataggggacctggggctgcttgaagagacgctggtcatcttcactgcakacaatggacctgagmccatgyrtatgtcccgaggcggctgctccggtctctygcggtktggaaagggaacgacctacgaggdcrgtgtccragagcctgccttggccttctgrccaggtcatatcgctcccggcgtgayccacgagctggccagctccctggacctgctgcctaccctggcagccctggctggggccccactgcccantgtcaccttggatggctttgacctcagccccctgctgctgggcacaggcaasagccctyrgcagtctctcttcttctacccgtcctacccagacraggtcygtggggtttttgctgtgcggastggaaagtacaaggctyacttcttcacccagggctctgcccacagtgataycaytgcagaccctgcctgccacgcctccagctctctgactgctcatgagmcccygctgcyctatgacctgtccaaggaccctggtgagaactacaacctgctggggggtgtggccggggccaccccagaggtgctgcaagccctgaaacagcttcagctgctcaaggyccagttagacgcagctgtgaccttcggccccagccaggtggcccggggcgaggaccccgccctgyagatctgctgtcatcctggctgcaccccccgcccagcttgctgccattgcccagatccccatgcctgagggcccctcggctggcctgggcatgtgatggctcctcactgggagcctgtgggggaggctcaggtgtctggagggggtttgtgcctgataacgtaataacaccagtggagacttgcagatgtgacaattcgtccaatcctggggtaatgctgtgtgctggtgccggtcccctgtggtacgaatgaggaaactgaggtgcagagaggttcaggacttgtacaagatcacccagccagaaagaggttgggctgggatttgaaccctggtgtcgtggctctggaagctgccctggcgccttggtgatctgcgtggaaacctgtctgaagctgggtgatgagttgcacactccaggtggggctaaggggcctggagcccctgctggctcctaggaaggcacagcagcaggccctgagacggctcctctggggcccctccaccctcccaggcctctgcatttcacctgtgcccacacttctgtctcctgccttcaccttttgacccactactaacgattctccacccagcagacaaagtgatctcttaaaaatatctgttgtgctgggattacaggkgtgaaccaccacamctggccaacaatatttgttttaattagccaggcgtggtagcatttgtcctagcaatttgggaggttgaggtgggagaatcacttcagcccactaggtcgaggctgtagtgagctataattgtaccactgcactccagcctcggggacagagtgagaccctgtctgcaaataaacaaataaaacatcaggctgggcttgagcatctattcctgctcaaaatttcgcaggcttctcagaagaaaatccaaaccccttacagtgacccagtttgcccttgaggcctccacccacacccccttccccccagtcttagggggtggcctggctgttcccttcaacggcaacgctctgcctccattgttggcctcctctgcagggagggactgtctgagcacctgcccgtgtctgtgcagcatggcacactgacgtcaggcccacgtgcatgcccaggtggccagtcacacgccaggtgctccctcagtgttggccaagtgagaggagcacaccttccgggcgttcagacacctccccgtggcagacaccgttcgttgctaccaaacagccacctccttcctaatgggctcccatttttcagtgctgggcaaaggtcccttgatcttggagttgcagcctctttctctccaaggagggcggtgaccagcctgagccagtcaatccagtgattggttcaggagtagcctgtgaccaggagtcctggtagtgaacgactggggcagccctgggggtgaggaccttgcgcagccgtcacaggccctgattggacactgggcagctgctaacccagtgtctccagctgcctacctgg

SEQ ID NO: 808 - DNA, 3124 bp, Homo sapiens
  misc_feature (1)...(3124): n = A,T,C or G
cggggccgaggcggaagcgcccgcagcccggtaccggctcctcctgggctccctctagcgccttccccccggcccgactscgctggtcagcgccaagtgacttacgcccccgaccctgagcccggaccgctaggcgaggaggatcagatctccgctcgagaatctgaagacccctcggtcccatgtccatgggggcaccgcggtccctcctcctggccctggctgctggcctggccgttgcccgtccgcccaacatcgtgctgatctttgccgacgacctcrgctatggggacctgggctgctatgggcaccccagctctaccactcccaacctggaccagctggcggcgggagggctgcggttcacagacttctacgtgcctgtgtctcygtgcacaccctctagggccgccctcctgaccggccggctcccggttcggatgggcatgtaccctggcgtcctggtgsccarctyccggggggdcctgcccctggaggaggtgaccgtggccgaagtcctggctgcccgaggctacctcacargaatggccrgcaagtggcaccttggggtggggcctgagggggccttccygyycccccatcagggcttccatcgatttctaggcatccygtactcccackaccasgrccsctgccagaacctgacctgcttcccgccggccactcsttgcracggtggctrtgaccagggcctggtccccakcccactgttggccaacctgtccgtggaggcgcasmccccctgdctgccyggactagaggcccgctrcatggctttcrcccatgacctcatggccgacgyccagcgccaggatcgccccttcttcctgtactatgyctctcacyacacccactacmctcagttcagtgggcagagctttgcagagcgttcaggcyrcrggccatttggggactmcctgatggagctgsatgcagctgtggggaccctgatgacagccataggggacctggggctgcttgaagagacgctggtcatcttcactgcakacaatggacctgagmccatgyrtatgtcccgaggcggctgctccggtctctygcggtktggaaagggaacgacctacgaggdcrgtgtccragagcctgccttggccttctgrccaggtcatatcgctcccggcgtgayccacgagctggccagctccctggacctgctgcctaccctggcagccctggctggggccccactgcccantgtcaccttggatggctttgacctcagccccctgctgctgggcacaggcaasagccctyrgcagtctctcttcttctacccgtcctacccagacraggtcygtggggtttttgctgtgcggastggaaagtacaaggctyacttcttcacccagggctctgcccacagtgataycaytgcagaccctgcctgccacgcctccagctctctgactgctcatgagmcccygctgcyctatgacctgtccaaggaccctggtgagaactacaacctgctggggggtgtggccggggccaccccagaggtgctgcaagccctgaaacagcttcagctgctcaaggyccagttagacgcagctgtgaccttcggccccagccaggtggcccggggcgaggaccccgccctgyagatctgctgtcatcctggctgcaccccccgcccagcttgctgccattgcccagatccccatgcctgagggcccctcggctggcctgggcatgtgatggctcctcactgggagcctgtgggggaggctcaggtgtctggagggggtttgtgcctgataacgtaataacaccagtggagacttgcagatgtgacaattcgtccaatcctggggtaatgctgtgtgctggtgccggtcccctgtggtacgaatgaggaaactgaggtgcagagaggttcaggacttgtacaagatcacccagccagaaagaggttgggctgggatttgaaccctggtgtcgtggctctggaagctgccctggcgccttggtgatctgcgtggaaacctgtctgaagctgggtgatgagttgcacactccaggtggggctaaggggcctggagcccctgctggctcctaggaaggcacagcagcaggccctgagacggctcctctggggcccctccaccctcccaggcctctgcatttcacctgtgcccacacttctgtctcctgccttcaccttttgacccactactaacgattctccacccagcagacaaagtgatctcttaaaaatatctgttgtgctgggattacaggkgtgaaccaccacamctggccaacaatatttgttttaattagccaggcgtggtagcatttgtcctagcaatttgggaggttgaggtgggagaatcacttcagcccactaggtcgaggctgtagtgagctataattgtaccactgcactccagcctcggggacagagtgagaccctgtctgcaaataaacaaataaaacatcaggctgggcttgagcatctattcctgctcaaaatttcgcaggcttctcagaagaaaatccaaaccccttacagtgacccagtttgcccttgaggcctccacccacacccccttccccccagtcttagggggtggcctggctgttcccttcaacggcaacgctctgcctccattgttggcctcctctgcagggagggactgtctgagcacctgcccgtgtctgtgcagcatggcacactgacgtcaggcccacgtgcatgcccaggtggccagtcacacgccaggtgctccctcagtgttggccaagtgagaggagcacaccttccgggcgttcagacacctccccgtggcagacaccgttcgttgctaccaaacagccacctccttcctaatgggctcccatttttcagtgctgggcaaaggtcccttgatcttggagttgcagcctctttctctccaaggagggcggtgaccagcctgagccagtcaatccagtgattggttcaggagtagcctgtgaccaggagtcctggtagtgaacgactggggcagccctgggggtgaggaccttgcgcagccgtcacaggccctgattggacactgggcagctgctaacccagtgtctccagctgcctacctgg

SEQ ID NO: 809 - DNA, 2211 bp, Homo sapiens
  misc_feature (1)...(2211): n = A,T,C or G
cggaagcgcccgcagcccggtaccggctcctcctgggctccctctagcgccttccccccggcccgactscgctggtcagcgccaagtgacttacgcccccgaccctgagcccggaccgctaggcgaggaggatcagatctccgctcgagaatctgaaggtgccctggtcctggaggagttccgtcccagcccgcggtctcccggtactgtcgggccccggccctctggagcttcaggaggcggccgtcagggtcggggagtatttgggtccggggtctcagggaagggcggcgcctgggtctgcggtatcggaaagagcctgctggagccaagtagccctccctctcttgggacagacccctcggtcccatgtccatgggggcaccgcggtccctcctcctggccctggctgctggcctggccgttgcccgtccgcccaacatcgtgctgatctttgccgacgacctcrgctatggggacctgggctgctatgggcaccccagctctaccactcccaacctggaccagctggcggcgggagggctgcggttcacagacttctacgtgcctgtgtctcygtgcacaccctctagggccgccctcctgaccggccggctcccggttcggatgggcatgtaccctggcgtcctggtgsccarctyccggggggdcctgcccctggaggaggtgaccgtggccgaagtcctggctgcccgaggctacctcacargaatggccrgcaagtggcaccttggggtggggcctgagggggccttccygyycccccatcagggcttccatcgatttctaggcatccygtactcccackaccasgrccsctgccagaacctgacctgcttcccgccggccactcsttgcracggtggctrtgaccagggcctggtccccakcccactgttggccaacctgtccgtggaggcgcasmccccctgdctgccyggactagaggcccgctrcatggctttcrcccatgacctcatggccgacgyccagcgccaggatcgccccttcttcctgtactatgyctctcacyacacccactacmctcagttcagtgggcagagctttgcagagcgttcaggcyrcrggccatttggggactmcctgatggagctgsatgcagctgtggggaccctgatgacagccataggggacctggggctgcttgaagagacgctggtcatcttcactgcakacaatggacctgagmccatgyrtatgtcccgaggcggctgctccggtctctygcggtktggaaagggaacgacctacgaggdcrgtgtccragagcctgccttggccttctgrccaggtcatatcgctcccggcgtgayccacgagctggccagctccctggacctgctgcctaccctggcagccctggctggggccccactgcccantgtcaccttggatggctttgacctcagccccctgctgctgggcacaggcaasagccctyrgcagtctctcttcttctacccgtcctacccagacraggtcygtggggtttttgctgtgcggastggaaagtacaaggctyacttcttcacccagggctctgcccacagtgataycaytgcagaccctgcctgccacgcctccagctctctgactgctcatgagmcccygctgcyctatgacctgtccaaggaccctggtgagaactacaacctgctggggggtgtggccggggccaccccagaggtgctgcaagccctgaaacagcttcagctgctcaaggyccagttagacgcagctgtgaccttcggccccagccaggtggcccggggcgaggaccccgccctgyagatctgctgtcatcctggctgcaccccccgcccagcttgctgccattgcccagatccccatgcctgagggcccctcggctggcctgggcatgtgatggctcctcactgggagcctgtgggggaggctcaggtgtctggagggggtttgtgcctgataacgtaataacaccagtggagacttgcagatgtgacaattcgtccaatcctggggtaatgctgtgtgctggtgccggtcccctgtggtacgaatgaggaaactgaggtgcagagaggttcaggacttgtacaagatcacccagccagaaagaggttgggctgggatttgaaccctggtgtcgtggctctggaagctgccctggcgccttggtgatctgcgtgg

SEQ ID NO: 810 - DNA, 4554 bp, Homo sapiens
caggtaaagagattataaatcttccactgaatgaaaaaaattttcttaaagctgcatatactccaagaaaaaaaccacaaatgtttttctgttttgcctgaatacatgatttaaacaagagatttccacagaagggcgctttcatggaactatatgatcatatgggcaacattctgttgcagtctaccttctgtctgacggatatgccatcctgaaaaaggaaagaagctgaacttcaagttcctttcatttagccttgggcttccaccttctctgtggctagaaacaggaccgtccagaagtcacctgtaactgccctatcttgcaagttctgattttggcaaaaaaaaaaaaaaaagccttgacaaggttggattcacttctttccctggattgtgtgtcatccaactctgcggccgtcacgatgttctggaagtttgacttgaacaccacgtcccatgttgacaagctgctggacaaggagcatgtgacgctgcaggagttaatggatgaagatgacatcttgcaggagtgtaaggctcagaaccagaagctgctggacttcctgtgcaggcagcagtgcatggaggagctggtgagcctcatcacacaggatccgcccctggacatggaggagaaggtccgcttcaaatatccaaacacagcctgtgagcttctgacttgtgatgtgccgcagatcagcgaccgcctcggtggggacgagagcctgctgagcctcctgtacgacttcttggaccatgagccgcctctcaatcctctgctcgccagttttttcagcaagaccattggcaatctcattgcaagaaaaaccgaacaggtaggcagtcaaatgcttctcagactctctgtgacatagttaggctgggcagagaccagggcagtcagctgcaagaggctctggagccagacccgctcctcacagcgctggagtcgcaggactgtgtggagcagcttctgaagaacatgtttgatggagaccggacggagagctgcctcgtcagtgggactcaggtgttactcaccttgctggaaaccaggcgggttgggacagagggcttggtggactccttttctcagggactggaaaggtcatacgctgtcagcagcagcgtactacacggcatcgagcctcggctgaaggacttccaccagctcctgctcaacccgcccaagaagaaagcgatcctgaccaccattggtgtgctggaggagcccctggggaatgcccgtctgcatggcgcccgcctcatggcagcactgctgcacacaaacacacccagcatcaaccaggagctctgccggctcaacacgatggacttactgctggacttgttctttaagtacacctggaataactttttgcacttccaagtggaactatgcatagccgctattctctcccacgctgcccgtgagsagaggacagaagccagcggatccgagagcagggtggagcctccgcatgagaacgggaaccggagcctggagactccccagccgkccgccagcctccctgacaacacaatggtgacccacctgttccagaagtgctgcctggtgcagaggatcctggaggcctgggaagccaacgaccacacgcaggcagcgggtggcatgagacgtgggaacatgggccacctcacacggatcgccaacgcggtggtgcagaacctggagcggggccctgtgcagacgcacatcagcgaggtcatccgagggctccctgcggactgccgtggccgctgggagagcttcgtggaggagacgctgacggagacgaaccgcaggaacactgtggacctggccttctctgactaccagatccagcagatgacagccaacttcgtggatcagtttggcttcaatgatgaggagtttgccgaccaggacgacaacatcaatgccccgtttgacaggatcgcagagatcaacttcaacatcgacgctgacgaggacagtcccagcgcagctctgtttgaggcctgctgcagtgaccgcatccagccctttgatgatgakgaggacgaggacatctgggaggacagtgacactcgctgtgctgcccgggtgatggccagacccaggtttggagccccccatgcttcagagagttgctcaaagaatggcccagagcgtggaggccaggatgggaaggcgagcttggaagcacacagagatgcacctggggcaggtgccccacyggcccccgggaagaaggaagcsccccctgtggagggtgactcagaagcaggcgccatgtggacggcagtgtttgatgagccagcgaactcaacgcccacagccccaggagtggtgarggacgtgggttccagtgtgtgggcagctggcacctcagctccagaggagaaaggctgggccaagttcactgacttccaacctttctgctgctccgagtcagggcccaggtgcagctctccggtggacacagaatgcagccatgctgagggcagccggagccaaggccctgagaaagccttcagcccggcttctccatgtgcctggaacgtgtgtgtcaccaggaaggcccccctgctggcctctgacagtagctcctctgggggctcccacagcgaggatggcgaccagaaggcagcgagtgccatggatgcggtgagcaggggtcccggccgggaggcccccccgctgcccacagtggccaggacagaggaggckgtcggcagggtcgggtgtgctgacagccggctgttaagccctgcctgccccgcgccaaaggaagtgactgctgccccagccgtggctgtgccccccgaggctactgtggccatcaccacagcactgagcaaggctggccccgccatacccaccccagcagtctcttctgcactggccgtggcggtccccctagggcccatcatggcagtcacagcagccccagccatggtggccaccctggggacagtgacaaaggacggacagatgccccgccagaaggagctgccttaaatggcccagtgtgatgctgctgccgcccggccacggcccaccctggtcaggctgcctccttaatcgagaaaactacctggtgatgcaatctttttttttttaatttaatttaattttaaaataaatgctgcattggtaaagctggcagttgaaaccagttggacggcccagcttgcgtctcttctgcctgagtgggcctctcaggtcactcgtgccctgctggaggacagaggggcacctcagccgcccccaagcccagagcacagcaataaggtcggcctgcaggagccggggtgggggtgggggtggggggggcaggaccctgagatgccaccaggacctgatgggccaggaagggcgtggacatggaggctgtttttacagtttttttttkktgttgttttgtttttaaagaatacagaaggagccaagcttttttgcactttgtatccagctgcaagctcagggcagagtcaagggcctgggttggaaaaacctgactcacaggaatgcataattgacccttgcagctacccaatagcccttggagctggcactgaaccagkctgcaagatttgactgccttaaaaacacaaggccctctaggcctggcagggatgtccctgtgcccagcacagggtgcctggcagggggagaccacaggtatgcaggtggggggacatggtgtggcactrggggctcgaagactggtttctagcactaccggtcacggccatgtcgtcctagaagggtccagaagattattttacgttgagtccatttttaatgttctgatcacctgacagggcaccccaaacccccaactcccaataaaagccgtgacgttcggacaaaccgcgtactgtgaaccttccggccccaaagccccggcccggccaggggtgggagagtctcctccagcacctcttttgtgggcccgccaccccccagcgttatccccgtgtaatgggtggaggcggaacaggccacatcacggcatcaggtctctacagcttagcaaatactgacatttttccgtttgggggatggggggaaccacttcrcctaacgctcaaacacatcaaccccaggacttccttttgtgccagctccccctcccagaagcctgggccccaccttgtcctcagtggctgagtgggaggggcaggtggagaccagacccccaccccgccccagcgagcttgtctttccaccacggttgggggtggagggaacccgctcagctccccagaggccgagtctctgccccagctacacattgagtgccttgttctcrccgcctaccctgtgcctggcatttgtcctctccccccacagacgtggaacagggagggcagggtcctttctccccttactctgacctgtgggttttccaggtgccaggaacttyggtcaggcgccatctgtccggcctgagggaagacctggctggtttcagtggctcaagtgagcccaccctcacatctcgcccaggtgtcccaacaccacctgtggggtgggggaggtggcgggaccatgctgggcctg

SEQ ID NO: 811 - DNA, 4280 bp, Homo sapiens
caggtaaagagattataaatcttccactgaatgaaaaaaattttcttaaagctgcatatactccaagaaaaaaaccacaaatgtttttctgttttgcctgaatacatgatttaaacaagagatttccacagaagctctgcggccgtcacgatgttctggaagtttgacttgaacaccacgtcccatgttgacaagctgctggacaaggagcatgtgacgctgcaggagttaatggatgaagatgacatcttgcaggagtgtaaggctcagaaccagaagctgctggacttcctgtgcaggcagcagtgcatggaggagctggtgagcctcatcacacaggatccgcccctggacatggaggagaaggtccgcttcaaatatccaaacacagcctgtgagcttctgacttgtgatgtgccgcagatcagcgaccgcctcggtggggacgagagcctgctgagcctcctgtacgacttcttggaccatgagccgcctctcaatcctctgctcgccagttttttcagcaagaccattggcaatctcattgcaagaaaaaccgaacaggtaggcagtcaaatgcttctcagactctctgtgacatagttaggctgggcagagaccagggcagtcagctgcaagaggctctggagccagacccgctcctcacagcgctggagtcgcaggactgtgtggagcagcttctgaagaacatgtttgatggagaccggacggagagctgcctcgtcagtgggactcaggtgttactcaccttgctggaaaccaggcgggttgggacagagggcttggtggactccttttctcagggactggaaaggtcatacgctgtcagcagcagcgtactacacggcatcgagcctcggctgaaggacttccaccagctcctgctcaacccgcccaagaagaaagcgatcctgaccaccattggtgtgctggaggagcccctggggaatgcccgtctgcatggcgcccgcctcatggcagcactgctgcacacaaacacacccagcatcaaccaggagctctgccggctcaacacgatggacttactgctggacttgttctttaagtacacctggaataactttttgcacttccaagtggaactatgcatagccgctattctctcccacgctgcccgtgagsagaggacagaagccagcggatccgagagcagggtggagcctccgcatgagaacgggaaccggagcctggagactccccagccgkccgccagcctccctgacaacacaatggtgacccacctgttccagaagtgctgcctggtgcagaggatcctggaggcctgggaagccaacgaccacacgcaggcagcgggtggcatgagacgtgggaacatgggccacctcacacggatcgccaacgcggtggtgcagaacctggagcggggccctgtgcagacgcacatcagcgaggtcatccgagggctccctgcggactgccgtggccgctgggagagcttcgtggaggagacgctgacggagacgaaccgcaggaacactgtggacctggccttctctgactaccagatccagcagatgacagccaacttcgtggatcagtttggcttcaatgatgaggagtttgccgaccaggacgacaacatcaatgccccgtttgacaggatcgcagagatcaacttcaacatcgacgctgacgaggacagtcccagcgcagctctgtttgaggcctgctgcagtgaccgcatccagccctttgatgatgakgaggacgaggacatctgggaggacagtgacactcgctgtgctgcccgggtgatggccagacccaggtttggagccccccatgcttcagagagttgctcaaagaatggcccagagcgtggaggccaggatgggaaggcgagcttggaagcacacagagatgcacctggggcaggtgccccacyggcccccgggaagaaggaagcsccccctgtggagggtgactcagaagcaggcgccatgtggacggcagtgtttgatgagccagcgaactcaacgcccacagccccaggagtggtgarggacgtgggttccagtgtgtgggcagctggcacctcagctccagaggagaaaggctgggccaagttcactgacttccaacctttctgctgctccgagtcagggcccaggtgcagctctccggtggacacagaatgcagccatgctgagggcagccggagccaaggccctgagaaagccttcagcccggcttctccatgtgcctggaacgtgtgtgtcaccaggaaggcccccctgctggcctctgacagtagctcctctgggggctcccacagcgaggatggcgaccagaaggcagcgagtgccatggatgcggtgagcaggggtcccggccgggaggcccccccgctgcccacagtggccaggacagaggaggckgtcggcagggtcgggtgtgctgacagccggctgttaagccctgcctgccccgcgccaaaggaagtgactgctgccccagccgtggctgtgccccccgaggctactgtggccatcaccacagcactgagcaaggctggccccgccatacccaccccagcagtctcttctgcactggccgtggcggtccccctagggcccatcatggcagtcacagcagccccagccatggtggccaccctggggacagtgacaaaggacggacagatgccccgccagaaggagctgccttaaatggcccagtgtgatgctgctgccgcccggccacggcccaccctggtcaggctgcctccttaatcgagaaaactacctggtgatgcaatctttttttttttaatttaatttaattttaaaataaatgctgcattggtaaagctggcagttgaaaccagttggacggcccagcttgcgtctcttctgcctgagtgggcctctcaggtcactcgtgccctgctggaggacagaggggcacctcagccgcccccaagcccagagcacagcaataaggtcggcctgcaggagccggggtgggggtgggggtggggggggcaggaccctgagatgccaccaggacctgatgggccaggaagggcgtggacatggaggctgtttttacagtttttttttkktgttgttttgtttttaaagaatacagaaggagccaagcttttttgcactttgtatccagctgcaagctcagggcagagtcaagggcctgggttggaaaaacctgactcacaggaatgcataattgacccttgcagctacccaatagcccttggagctggcactgaaccagkctgcaagatttgactgccttaaaaacacaaggccctctaggcctggcagggatgtccctgtgcccagcacagggtgcctggcagggggagaccacaggtatgcaggtggggggacatggtgtggcactrggggctcgaagactggtttctagcactaccggtcacggccatgtcgtcctagaagggtccagaagattattttacgttgagtccatttttaatgttctgatcacctgacagggcaccccaaacccccaactcccaataaaagccgtgacgttcggacaaaccgcgtactgtgaaccttccggccccaaagccccggcccggccaggggtgggagagtctcctccagcacctcttttgtgggcccgccaccccccagcgttatccccgtgtaatgggtggaggcggaacaggccacatcacggcatcaggtctctacagcttagcaaatactgacatttttccgtttgggggatggggggaaccacttcrcctaacgctcaaacacatcaaccccaggacttccttttgtgccagctccccctcccagaagcctgggccccaccttgtcctcagtggctgagtgggaggggcaggtggagaccagacccccaccccgccccagcgagcttgtctttccaccacggttgggggtggagggaacccgctcagctccccagaggccgagtctctgccccagctacacattgagtgccttgttctcrccgcctaccctgtgcctggcatttgtcctctccccccacagacgtggaacagggagggcagggtcctttctccccttactctgacctgtgggttttccaggtgccaggaacttyggtcaggcgccatctgtccggcctgagggaagacctggctggtttcagtggctcaagtgagcccaccctcacatctcgcccaggtgtcccaacaccacctgtggggtgggggaggtggcgggaccatgctgggcctg

SEQ ID NO: 812 - DNA, 4498 bp, Homo sapiens
aaaaaaaaaagaaaagaaaaaaaaatgatttgtggccagacaggtaatagggcatttcagattctaattttctcttagcaacagtctctatcacagaatgttgttttttaaagggcgctttcatggaactatatgatcatatgggcaacattctgttgcagtctaccttctgtctgacggatatgccatcctgaaaaaggaaagaagctgaacttcaagttcctttcatttagccttggatggacttccaggacttgggtctagtgttgctgagggtggatctgcagarctctgcggccgtcacgatgttctggaagtttgacttgaacaccacgtcccatgttgacaagctgctggacaaggagcatgtgacgctgcaggagttaatggatgaagatgacatcttgcaggagtgtaaggctcagaaccagaagctgctggacttcctgtgcaggcagcagtgcatggaggagctggtgagcctcatcacacaggatccgcccctggacatggaggagaaggtccgcttcaaatatccaaacacagcctgtgagcttctgacttgtgatgtgccgcagatcagcgaccgcctcggtggggacgagagcctgctgagcctcctgtacgacttcttggaccatgagccgcctctcaatcctctgctcgccagttttttcagcaagaccattggcaatctcattgcaagaaaaaccgaacaggtaggcagtcaaatgcttctcagactctctgtgacatagttaggctgggcagagaccagggcagtcagctgcaagaggctctggagccagacccgctcctcacagcgctggagtcgcaggactgtgtggagcagcttctgaagaacatgtttgatggagaccggacggagagctgcctcgtcagtgggactcaggtgttactcaccttgctggaaaccaggcgggttgggacagagggcttggtggactccttttctcagggactggaaaggtcatacgctgtcagcagcagcgtactacacggcatcgagcctcggctgaaggacttccaccagctcctgctcaacccgcccaagaagaaagcgatcctgaccaccattggtgtgctggaggagcccctggggaatgcccgtctgcatggcgcccgcctcatggcagcactgctgcacacaaacacacccagcatcaaccaggagctctgccggctcaacacgatggacttactgctggacttgttctttaagtacacctggaataactttttgcacttccaagtggaactatgcatagccgctattctctcccacgctgcccgtgagsagaggacagaagccagcggatccgagagcagggtggagcctccgcatgagaacgggaaccggagcctggagactccccagccgkccgccagcctccctgacaacacaatggtgacccacctgttccagaagtgctgcctggtgcagaggatcctggaggcctgggaagccaacgaccacacgcaggcagcgggtggcatgagacgtgggaacatgggccacctcacacggatcgccaacgcggtggtgcagaacctggagcggggccctgtgcagacgcacatcagcgaggtcatccgagggctccctgcggactgccgtggccgctgggagagcttcgtggaggagacgctgacggagacgaaccgcaggaacactgtggacctggtgagcactcaccaccttcactcctcaagtgaggacgaggacattgagggtgctttccctaacgagctgtcccttcagcagatccagcagatgacagccaacttcgtggatcagtttggcttcaatgatgaggagtttgccgaccaggacgacaacatcaatgccccgtttgacaggatcgcagagatcaacttcaacatcgacgctgacgaggacagtcccagcgcagctctgtttgaggcctgctgcagtgaccgcatccagccctttgatgatgakgaggacgaggacatctgggaggacagtgacactcgctgtgctgcccgggtgatggccagacccaggtttggagccccccatgcttcagagagttgctcaaagaatggcccagagcgtggaggccaggatgggaaggcgagcttggaagcacacagagatgcacctggggcaggtgccccacyggcccccgggaagaaggaagcsccccctgtggagggtgactcagaagcaggcgccatgtggacggcagtgtttgatgagccagcgaactcaacgcccacagccccaggagtggtgarggacgtgggttccagtgtgtgggcagctggcacctcagctccagaggagaaaggctgggccaagttcactgacttccaacctttctgctgctccgagtcagggcccaggtgcagctctccggtggacacagaatgcagccatgctgagggcagccggagccaaggccctgagaaagccttcagcccggcttctccatgtgcctggaacgtgtgtgtcaccaggaaggcccccctgctggcctctgacagtagctcctctgggggctcccacagcgaggatggcgaccagaaggcagcgagtgccatggatgcggtgagcaggggtcccggccgggaggcccccccgctgcccacagtggccaggacagaggaggckgtcggcagggtcgggtgtgctgacagccggctgttaagccctgcctgccccgcgccaaaggaagtgactgctgccccagccgtggctgtgccccccgaggctactgtggccatcaccacagcactgagcaaggctggccccgccatacccaccccagcagtctcttctgcactggccgtggcggtccccctagggcccatcatggcagtcacagcagccccagccatggtggccaccctggggacagtgacaaaggacggacagatgccccgccagaaggagctgccttaaatggcccagtgtgatgctgctgccgcccggccacggcccaccctggtcaggctgcctccttaatcgagaaaactacctggtgatgcaatctttttttttttaatttaatttaattttaaaataaatgctgcattggtaaagctggcagttgaaaccagttggacggcccagcttgcgtctcttctgcctgagtgggcctctcaggtcactcgtgccctgctggaggacagaggggcacctcagccgcccccaagcccagagcacagcaataaggtcggcctgcaggagccggggtgggggtgggggtggggggggcaggaccctgagatgccaccaggacctgatgggccaggaagggcgtggacatggaggctgtttttacagtttttttttkktgttgttttgtttttaaagaatacagaaggagccaagcttttttgcactttgtatccagctgcaagctcagggcagagtcaagggcctgggttggaaaaacctgactcacaggaatgcataattgacccttgcagctacccaatagcccttggagctggcactgaaccagkctgcaagatttgactgccttaaaaacacaaggccctctaggcctggcagggatgtccctgtgcccagcacagggtgcctggcagggggagaccacaggtatgcaggtggggggacatggtgtggcactrggggctcgaagactggtttctagcactaccggtcacggccatgtcgtcctagaagggtccagaagattattttacgttgagtccatttttaatgttctgatcacctgacagggcaccccaaacccccaactcccaataaaagccgtgacgttcggacaaaccgcgtactgtgaaccttccggccccaaagccccggcccggccaggggtgggagagtctcctccagcacctcttttgtgggcccgccaccccccagcgttatccccgtgtaatgggtggaggcggaacaggccacatcacggcatcaggtctctacagcttagcaaatactgacatttttccgtttgggggatggggggaaccacttcrcctaacgctcaaacacatcaaccccaggacttccttttgtgccagctccccctcccagaagcctgggccccaccttgtcctcagtggctgagtgggaggggcaggtggagaccagacccccaccccgccccagcgagcttgtctttccaccacggttgggggtggagggaacccgctcagctccccagaggccgagtctctgccccagctacacattgagtgccttgttctcrccgcctaccctgtgcctggcatttgtcctctccccccacagacgtggaacagggagggcagggtcctttctccccttactctgacctgtgggttttccaggtgccaggaacttyggtcaggcgccatctgtccggcctgagggaagacctggctggtttcagtggctcaagtgagcccaccctcacatctcgcccaggtgtcccaacaccacctgtggggtgggggaggtggcgggaccatgctgggcctg

SEQ ID NO: 813 - DNA, 4214 bp, Homo sapiens
ttaatactcccaccacgttggagttgagctgccagggtgatgtcctgaaggtggaagagggaagagagctctgcggccgtcacgatgttctggaagtttgacttgaacaccacgtcccatgttgacaagctgctggacaaggagcatgtgacgctgcaggagttaatggatgaagatgacatcttgcaggagtgtaaggctcagaaccagaagctgctggacttcctgtgcaggcagcagtgcatggaggagctggtgagcctcatcacacaggatccgcccctggacatggaggagaaggtccgcttcaaatatccaaacacagcctgtgagcttctgacttgtgatgtgccgcagatcagcgaccgcctcggtggggacgagagcctgctgagcctcctgtacgacttcttggaccatgagccgcctctcaatcctctgctcgccagttttttcagcaagaccattggcaatctcattgcaagaaaaaccgaacaggtaggcagtcaaatgcttctcagactctctgtgacatagttaggctgggcagagaccagggcagtcagctgcaagaggctctggagccagacccgctcctcacagcgctggagtcgcaggactgtgtggagcagcttctgaagaacatgtttgatggagaccggacggagagctgcctcgtcagtgggactcaggtgttactcaccttgctggaaaccaggcgggttgggacagagggcttggtggactccttttctcagggactggaaaggtcatacgctgtcagcagcagcgtactacacggcatcgagcctcggctgaaggacttccaccagctcctgctcaacccgcccaagaagaaagcgatcctgaccaccattggtgtgctggaggagcccctggggaatgcccgtctgcatggcgcccgcctcatggcagcactgctgcacacaaacacacccagcatcaaccaggagctctgccggctcaacacgatggacttactgctggacttgttctttaagtacacctggaataactttttgcacttccaagtggaactatgcatagccgctattctctcccacgctgcccgtgagsagaggacagaagccagcggatccgagagcagggtggagcctccgcatgagaacgggaaccggagcctggagactccccagccgkccgccagcctccctgacaacacaatggtgacccacctgttccagaagtgctgcctggtgcagaggatcctggaggcctgggaagccaacgaccacacgcaggcagcgggtggcatgagacgtgggaacatgggccacctcacacggatcgccaacgcggtggtgcagaacctggagcggggccctgtgcagacgcacatcagcgaggtcatccgagggctccctgcggactgccgtggccgctgggagagcttcgtggaggagacgctgacggagacgaaccgcaggaacactgtggacctggccttctctgactaccagatccagcagatgacagccaacttcgtggatcagtttggcttcaatgatgaggagtttgccgaccaggacgacaacatcaatgccccgtttgacaggatcgcagagatcaacttcaacatcgacgctgacgaggacagtcccagcgcagctctgtttgaggcctgctgcagtgaccgcatccagccctttgatgatgakgaggacgaggacatctgggaggacagtgacactcgctgtgctgcccgggtgatggccagacccaggtttggagccccccatgcttcagagagttgctcaaagaatggcccagagcgtggaggccaggatgggaaggcgagcttggaagcacacagagatgcacctggggcaggtgccccacyggcccccgggaagaaggaagcsccccctgtggagggtgactcagaagcaggcgccatgtggacggcagtgtttgatgagccagcgaactcaacgcccacagccccaggagtggtgarggacgtgggttccagtgtgtgggcagctggcacctcagctccagaggagaaaggctgggccaagttcactgacttccaacctttctgctgctccgagtcagggcccaggtgcagctctccggtggacacagaatgcagccatgctgagggcagccggagccaaggccctgagaaagccttcagcccggcttctccatgtgcctggaacgtgtgtgtcaccaggaaggcccccctgctggcctctgacagtagctcctctgggggctcccacagcgaggatggcgaccagaaggcagcgagtgccatggatgcggtgagcaggggtcccggccgggaggcccccccgctgcccacagtggccaggacagaggaggckgtcggcagggtcgggtgtgctgacagccggctgttaagccctgcctgccccgcgccaaaggaagtgactgctgccccagccgtggctgtgccccccgaggctactgtggccatcaccacagcactgagcaaggctggccccgccatacccaccccagcagtctcttctgcactggccgtggcggtccccctagggcccatcatggcagtcacagcagccccagccatggtggccaccctggggacagtgacaaaggacggacagatgccccgccagaaggagctgccttaaatggcccagtgtgatgctgctgccgcccggccacggcccaccctggtcaggctgcctccttaatcgagaaaactacctggtgatgcaatctttttttttttaatttaatttaattttaaaataaatgctgcattggtaaagctggcagttgaaaccagttggacggcccagcttgcgtctcttctgcctgagtgggcctctcaggtcactcgtgccctgctggaggacagaggggcacctcagccgcccccaagcccagagcacagcaataaggtcggcctgcaggagccggggtgggggtgggggtggggggggcaggaccctgagatgccaccaggacctgatgggccaggaagggcgtggacatggaggctgtttttacagtttttttttkktgttgttttgtttttaaagaatacagaaggagccaagcttttttgcactttgtatccagctgcaagctcagggcagagtcaagggcctgggttggaaaaacctgactcacaggaatgcataattgacccttgcagctacccaatagcccttggagctggcactgaaccagkctgcaagatttgactgccttaaaaacacaaggccctctaggcctggcagggatgtccctgtgcccagcacagggtgcctggcagggggagaccacaggtatgcaggtggggggacatggtgtggcactrggggctcgaagactggtttctagcactaccggtcacggccatgtcgtcctagaagggtccagaagattattttacgttgagtccatttttaatgttctgatcacctgacagggcaccccaaacccccaactcccaataaaagccgtgacgttcggacaaaccgcgtactgtgaaccttccggccccaaagccccggcccggccaggggtgggagagtctcctccagcacctcttttgtgggcccgccaccccccagcgttatccccgtgtaatgggtggaggcggaacaggccacatcacggcatcaggtctctacagcttagcaaatactgacatttttccgtttgggggatggggggaaccacttcrcctaacgctcaaacacatcaaccccaggacttccttttgtgccagctccccctcccagaagcctgggccccaccttgtcctcagtggctgagtgggaggggcaggtggagaccagacccccaccccgccccagcgagcttgtctttccaccacggttgggggtggagggaacccgctcagctccccagaggccgagtctctgccccagctacacattgagtgccttgttctcrccgcctaccctgtgcctggcatttgtcctctccccccacagacgtggaacagggagggcagggtcctttctccccttactctgacctgtgggttttccaggtgccaggaacttyggtcaggcgccatctgtccggcctgagggaagacctggctggtttcagtggctcaagtgagcccaccctcacatctcgcccaggtgtcccaacaccacctgtggggtgggggaggtggcgggaccatgctgggcctg

SEQ ID NO: 814 - DNA, 4776 bp, Homo sapiens
  misc_feature (1)...(4776): n = A,T,C or G
caccagtatgaggagctgagagtaacytggtggtctttgcagattcaggctcagcagaggtatccttcctgcaaccagcaggagtgccctcgtggaagcgttcctacctgggaaacaggctctaatccagcagatcctaaggctctttcgctataaaatggctttcttggcctgaggcgatgtgattcgtgatcccatgttggtacacggagcatgcctgaagctcctggatagtgatgctggcctgggaccctgtgctccttctgcatgacgccgccactcacagtccactgttcaagcacaggggtagccaggggcacagctgactgacatcccatccatcctgctgttcaccaactcctcaatggtgccgggagtacttgggcggggcctggcgccgagtgcagcccgaggagctgagggtttaccccgtgaggtgggaggtcaggggtcagcctctccggtgcgcggatcggggtcaggggtcagccgcggggccctcaggatgctccatgttttcgcccccctcttgcgcccgcgcctggggcggggcggggccggcctggccgggagggggccggggccgcggcaggtagggccggccgcgggctgagcgcgcctggtgtgggtctgcagcggaggcctcagcaacctgctcttccgctgctcgctcccggaccacctgcccagcgttggcgaggagccccgggaggtgcttctgcggctgtacggagccatcttgcaggtgagggggktgtgagcgccgcagcaccagtggctttagggcctgtcgcttacgcgatgcgggtagtattgttcccgttgcgcagttgaggacaccgaggttcacggtctgagtaacacctcattacaccgaagcctgggcctgtattcccagagctttgggaggctgaggcgagaggatcacttgagcacaggagttcgagaccagcctggacaacatagtgagacccccatctctaaataaaaatagaccaacgctaaagcctgtgctccagagcctccaggcaattggatcagaagtcgcagctctggtgggaggaaggcgagccctcatgtgtgtccctgtgccactttgccttggcccctttgctgtccatcctttttcagggcgtggactccctggtgctagaaagcgtgatgttcgccatacttgcggagcggtcgctggggccccagctgtacggagtcttcccagagggccggctggaacagtacatcccaagtcggccattgaaaactcaagagcttcgagagccagtgttgtcagcagccattgccacgaagatggcgcaatttcatggcatggagatgcctttcaccaaggagccccactggctgtttgggaccatggagcggtacctaaaacagatccaggacctgcccccaactggcctccctgagatgaacctgctggagatgtacagcctgaaggatgagatgggcaacctcaggaagttactagagtctaccccatcgccagtcgtcttctgccacaatgacatccaggaagggamcatcttgctgctctcagagccagaaaatgctgacagcctcatgctggtggacttcgagtacagcagttataactataggggctttgacattgggaaccatttttgtgagtgggtttatgattatactcacgaggaatggcctttctacaaagcaaggcccacagactaccccactcaagaacagcagaggcaaagaaaggtgagaccctctcccaagaggagcagagaaaactggaagaagatttgctggtagaagtcagtcggtatgctctggcatcccatttcttctggggtctgtggtccatcctccaggcatccatgtccaccatagaatttggttacttggactatgcccagtctcggttccagttctacttccagcagaaggggcagctgaccagtgtccactcctcatcctgactccaccctcccactccttggatttctcctggagcctccagggcaggaccttggagggaggaacaacgagcagaaggccctggcgactgggctgagcccccaagtgaaactgaggttcaggagaccggcctgtycctgagtttgactctaawgccaccatcctcacgagactctggggccccccaggctcccagacctttgagcaaccttcaccgcacagaaacccagccgcgccctgcaattcccaccgcggaaggtgccgaccaacccccaggatggcggaagctcaccaggccgtggccttccagttcacggtgaccccagacggggtcgacttccggctcagtcgggaggccctgaaacacgtctacctgtctgggatcaactcctggaagaaacgcctgatccgcatcaagaatggcatcctcaggggcgtgtaccctggcagccccaccagctggctggtcgtcntcatggcaacagtgggttcctccttctgcaacgtggacatctccttggggctggtcagttgcatccagagatgcctccctcaggggtgtggcccctaccagaccccgcagacccgggcacttctcagcatggccatcttctccacgggcgtctgggtgacgggcatcttcttcttccgccaaaccctgaagctgcttctctgctaccatgggtggatgtttgagatgcatggcaagaccagcaacttgaccaggatctgggctatgtgtatccgccttctatccagccggcaccctatgctctacagcttccagacatctctgcccaagcttcctgtgcccagggtgtcagccacaattcagcggtacctagagtctgtgcgccccttgttggatgatgaggaatattaccgcatggagttgctggccaaagaattccaggacaagactgcccccaggctgcagaaatacctggtgctcaagtcatggtgggcaagtaactatgtgagtgactggtgggaagagtacatctaccttcgaggcaggagccctctcatggtgaacagcaactattatgtcatggaccttgtgctcatcaagaatacagacgtgcaggcagcccgcctgggaaacatcatccacgccatgatcatgtatcgccgtaaactggaccgtgaagaaatcaagcctgtgatggcactgggcatagtgcctatgtgctcctaccagatggagaggatgttcaacaccactcggatcccggncaaggacacagatgtgctacagcacctctcagacagccggcacgtggctgtctaccacaagggacgcttcttcaagctgtggctctatgagggcgcccgtctgctcaagcctcaggatctggagatgcagttccagaggatcctggacgacccctccccacctcagcctggggaggagaagctggcagccctcactgcaggaggaagggtggagtgggcgcaggcacgccaggccttctttagctctggaaagaataaggctgccttggaggccatcgagcgtgccgctttcttcgtggccctggatgaggaatcctactsctatgaccccgaagatgaggccagcctyagcctctatggcaaggccctgctacatggcaactgctacaacaggtggtttgacaaatccttcactctcatttccttcaagaatggccagttgggtctcaatgcagagcatgcgtgggcagatgctcccatcattgggcacctctgggagtttgtcctgggcacagacagcttccacctgggctacacggagaccgggcactgcctgggcaaaccgaaccctgcgctcgcacctcctacacggctgcagtgggacattccaaaacagtgccaggcggtcatcnagagttcctaccaggtggccaaggcgttggcagacgacgtggagttgtactgcttccagttcctgccctttggcaaaggcctcatcaagaagtgccggaccagccctgatgcctttgtgcagatcgcgctgcagctggctcacttccgggacaggggtaagttctgcctgacctatgaggcctcaatgaccagaatgttccgggagggacggactgagactgtgcgttcctgtaccagcgagtccacagcctttgtgcaggccatgatggaggggtcccacacaaaagcagacctgcgagatctcttccagaaggctgctaagaagcaccagaatatgtaccgcctggccatgaccggggcagggatcgacaggcacctcttctgcctttacttggtctmcaagtacctaggagtcagctctcctttccttgctgaggtgctctcggaaccctggcgtctctccaccagccagatcccccaatcccagatccgcatgttcgacccagagcagcaccccaatcacctgggcgctggaggtggctttggccctgtagcagatgatggctatggagtttcctacatgattgcaggcgagaacacgatcttcttccacatctccagcaagttctcaagctcagagacgaacgcccagcgctttggaaaccacatccgcaaagccctgctggacattgctgatcttttccaagttcccaaggcctacagctgaagcccttaggtacctgtgttttgtytgggaactcggaggccctccccctcccccakctcaraccacagaggtggcaagagaagggctgaagctggaagactgttcatgagggacttgtgtgacctgctttgaaatgtgtgactctgctgagtgacgtaggctctgagatagctgtccacgcccacgtgtttgcttggaataaatacttgcctcagaaccttcac

SEQ ID NO: 815 - DNA, 2627 bp, Homo sapiens
  misc_feature (1)...(2627): n = A,T,C or G
tgaaggacgtggggacacgggccagagtggctggccccacgcacggacaggagtgaacccgagctgtgccgaccaacccccaggatggcggaagctcaccaggccgtggccttccagttcacggtgaccccagacggggtcgacttccggctcagtcgggaggccctgaaacacgtctacctgtctgggatcaactcctggaagaaacgcctgatccgcatcaagaatggcatcctcaggggcgtgtaccctggcagccccaccagctggctggtcgtcntcatggcaacagtgggttcctccttctgcaacgtggacatctccttggggctggtcagttgcatccagagatgcctccctcaggggtgtggcccctaccagaccccgcagacccgggcacttctcagcatggccatcttctccacgggcgtctgggtgacgggcatcttcttcttccgccaaaccctgaagctgcttctctgctaccatgggtggatgtttgagatgcatggcaagaccagcaacttgaccaggatctgggctatgtgtatccgccttctatccagccggcaccctatgctctacagcttccagacatctctgcccaagcttcctgtgcccagggtgtcagccacaattcagcggtacctagagtctgtgcgccccttgttggatgatgaggaatattaccgcatggagttgctggccaaagaattccaggacaagactgcccccaggctgcagaaatacctggtgctcaagtcatggtgggcaagtaactatgtgagtgactggtgggaagagtacatctaccttcgaggcaggagccctctcatggtgaacagcaactattatgtcatggaccttgtgctcatcaagaatacagacgtgcaggcagcccgcctgggaaacatcatccacgccatgatcatgtatcgccgtaaactggaccgtgaagaaatcaagcctgtgatggcactgggcatagtgcctatgtgctcctaccagatggagaggatgttcaacaccactcggatcccggncaaggacacagatgtgctacagcacctctcagacagccggcacgtggctgtctaccacaagggacgcttcttcaagctgtggctctatgagggcgcccgtctgctcaagcctcaggatctggagatgcagttccagaggatcctggacgacccctccccacctcagcctggggaggagaagctggcagccctcactgcaggaggaagggtggagtgggcgcaggcacgccaggccttctttagctctggaaagaataaggctgccttggaggccatcgagcgtgccgctttcttcgtggccctggatgaggaatcctactsctatgaccccgaagatgaggccagcctyagcctctatggcaaggccctgctacatggcaactgctacaacaggtggtttgacaaatccttcactctcatttccttcaagaatggccagttgggtctcaatgcagagcatgcgtgggcagatgctcccatcattgggcacctctgggagtttgtcctgggcacagacagcttccacctgggctacacggagaccgggcactgcctgggcaaaccgaaccctgcgctcgcacctcctacacggctgcagtgggacattccaaaacagtgccaggcggtcatcnagagttcctaccaggtggccaaggcgttggcagacgacgtggagttgtactgcttccagttcctgccctttggcaaaggcctcatcaagaagtgccggaccagccctgatgcctttgtgcagatcgcgctgcagctggctcacttccgggacaggggtaagttctgcctgacctatgaggcctcaatgaccagaatgttccgggagggacggactgagactgtgcgttcctgtaccagcgagtccacagcctttgtgcaggccatgatggaggggtcccacacaaaagcagacctgcgagatctcttccagaaggctgctaagaagcaccagaatatgtaccgcctggccatgaccggggcagggatcgacaggcacctcttctgcctttacttggtctmcaagtacctaggagtcagctctcctttccttgctgaggtgctctcggaaccctggcgtctctccaccagccagatcccccaatcccagatccgcatgttcgacccagagcagcaccccaatcacctgggcgctggaggtggctttggccctgtagcagatgatggctatggagtttcctacatgattgcaggcgagaacacgatcttcttccacatctccagcaagttctcaagctcagagacgaacgcccagcgctttggaaaccacatccgcaaagccctgctggacattgctgatcttttccaagttcccaaggcctacagctgaagcccttaggtacctgtgttttgtytgggaactcggaggccctccccctcccccakctcaraccacagaggtggcaagagaagggctgaagctggaagactgttcatgagggacttgtgtgacctgctttgaaatgtgtgactctgctgagtgacgtaggctctgagatagctgtccacgcccacgtgtttgcttggaataaatacttgcctcagaaccttcac

SEQ ID NO: 816 - DNA, 2882 bp, Homo sapiens
  misc_feature (1)...(2882): n = A,T,C or G
tgaaggacgtggggacacgggccagagtggctggccccacgcacggacaggagtgaacccgagctgtgccgaccaacccccaggatggcggaagctcaccaggccgtggccttccagttcacggtgaccccagacggggtcgacttccggctcagtcgggaggccctgaaacacgtctacctgtctgggatcaactcctggaagaaacgcctgatccgcatcaagaatggcatcctcaggggcgtgtaccctggcagccccaccagctggctggtcgtcntcatggcaacagtgggttcctccttctgcaacgtggacatctccttggggctggtcagttgcatccagagatgcctccctcaggggtgtggcccctaccagaccccgcagacccgggcacttctcagcatggccatcttctccacgggcgtctgggtgacgggcatcttcttcttccgccaaaccctgaagctgcttctctgctaccatgggtggatgtttgagatgcatggcaagaccagcaacttgaccaggatctgggctatgtgtatccgccttctatccagccggcaccctatgctctacagcttccagacatctctgcccaagcttcctgtgcccagggtgtcagccacaattcagcggtacctagagtctgtgcgccccttgttggatgatgaggaatattaccgcatggagttgctggccaaagaattccaggacaagactgcccccaggctgcagaaatacctggtgctcaagtcatggtgggcaagtaactatgtgagtgactggtgggaagagtacatctaccttcgaggcaggagccctctcatggtgaacagcaactattatgtcatggaccttgtgctcatcaagaatacagacgtgcaggcagcccgcctgggaaacatcatccacgccatgatcatgtatcgccgtaaactggaccgtgaagaaatcaagcctgtgatggcactgggcatagtgcctatgtgctcctaccagatggagaggatgttcaacaccactcggatcccggncaaggacacagatgtgctacagcacctctcagacagccggcacgtggctgtctaccacaagggacgcttcttcaagctgtggctctatgagggcgcccgtctgctcaagcctcaggatctggagatgcagttccagaggatcctggacgacccctccccacctcagcctggggaggagaagctggcagccctcactgcaggaggaagggtggagtgggcgcaggcacgccaggccttctttagctctggaaagaataaggctgccttggaggccatcgagcgtgccgctttcttcgtggccctggatgaggaatcctactsctatgaccccgaagatgaggccagcctyagcctctatggcaaggccctgctacatggcaactgctacaacaggtggtttgacaaatccttcactctcatttccttcaagaatggccagttgggtctcaatgcagagcatgcgtgggcagatgctcccatcattgggcacctctgggagtttgtcctgggcacagacagcttccacctgggctacacggagaccgggcactgcctgggcaaaccgaaccctgcgctcgcacctcctacacggctgcagtgggacattccaaaacagtgccaggcggtcatcnagagttcctaccaggtggccaaggcgttggcagacgacgtggagttgtactgcttccagttcctgccctttggcaaaggcctcatcaagaagtgccggaccagccctgatgcctttgtgcagatcgcgctgcagctggctcacttccgggacaggggtaagttctgcctgacctatgaggcctcaatgaccagaatgttccgggagggacggactgagactgtgcgttcctgtaccagcgagtccacagcctttgtgcaggccatgatggaggggtcccacacaaaagcagacctgcgagatctcttccagaaggctgctaagaagcaccagaatatgtaccgcctggccatgaccggggcagggatcgacaggcacctcttctgcctttacttggtctmcaagtacctaggagtcagctctcctttccttgctgaggtgctctcggaaccctggcgtctctccaccagccagatcccccaatcccagatccgcatgttcgacccagagcagcaccccaatcacctgggcgctggaggtggctttggccctgtagcagatgatggctatggagtttcctacatgattgcaggcgagaacacgatcttcttccacatctccagcaagttctcaagctcagagacgaacgcccagcgctttggaaaccacatccgcaaagccctgctggacattgctgatcttttccaagttcccaaggcctacagctgaaggttggagaaatgccagctgccctttcgtccccacactgtggaggaagggacctgtggcagctcacaggcakgaggggtggccgtgcacaggtgcccaggctccaaggacagctccggcagcaggtcctcgctgggcagatgctgctccctgagggcccaggtggtggaggtggggttggagcaggaagggaattttgatttttttttttcttgatagatactaataaaaataaggctgtgtaattttctctcagcccttaggtacctgtgttttgtytgggaactcggaggccctccccctcccccakctcaraccacagaggtggcaagagaagggctgaagctggaagactgttcatgagggacttgtgtgacctgctttgaaatgtgtgactctgctgagtgacgtaggctctgagatagctgtccacgcccacgtgtttgcttggaataaatacttgcctcagaaccttcacc

SEQ ID NO: 817 - DNA, 4999 bp, Homo sapiens
  misc_feature (1)...(4999): n = A,T,C or G
caccagtatgaggagctgagagtaacytggtggtctttgcagattcaggctcagcagaggtatccttcctgcaaccagcaggagtgccctcgtggaagcgttcctacctgggaaacaggctctaatccagcagatcctaaggctctttcgctataaaatggctttcttggcctgaggcgatgtgattcgtgatcccatgttggtacacggagcatgcctgaagctcctggatagtgatgctggcctgggaccctgtgctccttctgcatgacgccgccactcacagtccactgttcaagcacaggggtagccaggggcacagctgactgacatcccatccatcctgctgttcaccaactcctcaatggtgccgggagtacttgggcggggcctggcgccgagtgcagcccgaggagctgagggtttaccccgtgaggtgggaggtcaggggtcagcctctccggtgcgcggatcggggtcaggggtcagccgcggggccctcaggatgctccatgttttcgcccccctcttgcgcccgcgcctggggcggggcggggccggcctggccgggagggggccggggccgcggcaggtagggccggccgcgggctgagcgcgcctggtgtgggtctgcagcggaggcctcagcaacctgctcttccgctgctcgctcccggaccacctgcccagcgttggcgaggagccccgggaggtgcttctgcggctgtacggagccatcttgcaggtgagggggktgtgagcgccgcagcaccagtggctttagggcctgtcgcttacgcgatgcgggtagtattgttcccgttgcgcagttgaggacaccgaggttcacggtctgagtaacacctcattacaccgaagcctgggcctgtattcccagagctttgggaggctgaggcgagaggatcacttgagcacaggagttcgagaccagcctggacaacatagtgagacccccatctctaaataaaaatagaccaacgctaaagcctgtgctccagagcctccaggcaattggatcagaagtcgcagctctggtgggaggaaggcgagccctcatgtgtgtccctgtgccactttgccttggcccctttgctgtccatcctttttcagggcgtggactccctggtgctagaaagcgtgatgttcgccatacttgcggagcggtcgctggggccccagctgtacggagtcttcccagagggccggctggaacagtacatcccagtacgggcccagtcctaccctctcctccccaaggcacctccaccccctaaccctaccccagtgcccaatgtctgcctccacatccctcaccccaagtagggaatttccsccaaaaccctgacttcccctcattgccccagcccttcccactcctgccccagccccatcaccaccctgatagcttcctgggtgcagagtcggccattgaaaactcaagagcttcgagagccagtgttgtcagcagccattgccacgaagatggcgcaatttcatggcatggagatgcctttcaccaaggagccccactggctgtttgggaccatggagcggtacctaaaacagatccaggacctgcccccaactggcctccctgagatgaacctgctggagatgtacagcctgaaggatgagatgggcaacctcaggaagttactagagtctaccccatcgccagtcgtcttctgccacaatgacatccaggaagggamcatcttgctgctctcagagccagaaaatgctgacagcctcatgctggtggacttcgagtacagcagttataactataggggctttgacattgggaaccatttttgtgagtgggtttatgattatactcacgaggaatggcctttctacaaagcaaggcccacagactaccccactcaagaacagcagttgcattttattcgtcattacctggcagaggcaaagaaaggtgagaccctctcccaagaggagcagagaaaactggaagaagatttgctggtagaagtcagtcggtatgctctggcatcccatttcttctggggtctgtggtccatcctccaggcatccatgtccaccatagaatttggttacttggactatgcccagtctcggttccagttctacttccagcagaaggggcagctgaccagtgtccactcctcatcctgactccaccctcccactccttggatttctcctggagcctccagggcaggaccttggagggaggaacaacgagcagaaggccctggcgactgggctgagcccccaagtgaaactgaggttcaggagaccggcctgtycctgagtttgagtgccgaccaacccccaggatggcggaagctcaccaggccgtggccttccagttcacggtgaccccagacggggtcgacttccggctcagtcgggaggccctgaaacacgtctacctgtctgggatcaactcctggaagaaacgcctgatccgcatcaagaatggcatcctcaggggcgtgtaccctggcagccccaccagctggctggtcgtcntcatggcaacagtgggttcctccttctgcaacgtggacatctccttggggctggtcagttgcatccagagatgcctccctcaggggtgtggcccctaccagaccccgcagacccgggcacttctcagcatggccatcttctccacgggcgtctgggtgacgggcatcttcttcttccgccaaaccctgaagctgcttctctgctaccatgggtggatgtttgagatgcatggcaagaccagcaacttgaccaggatctgggctatgtgtatccgccttctatccagccggcaccctatgctctacagcttccagacatctctgcccaagcttcctgtgcccagggtgtcagccacaattcagcggtacctagagtctgtgcgccccttgttggatgatgaggaatattaccgcatggagttgctggccaaagaattccaggacaagactgcccccaggctgcagaaatacctggtgctcaagtcatggtgggcaagtaactatgtgagtgactggtgggaagagtacatctaccttcgaggcaggagccctctcatggtgaacagcaactattatgtcatggaccttgtgctcatcaagaatacagacgtgcaggcagcccgcctgggaaacatcatccacgccatgatcatgtatcgccgtaaactggaccgtgaagaaatcaagcctgtgatggcactgggcatagtgcctatgtgctcctaccagatggagaggatgttcaacaccactcggatcccggncaaggacacagatgtgctacagcacctctcagacagccggcacgtggctgtctaccacaagggacgcttcttcaagctgtggctctatgagggcgcccgtctgctcaagcctcaggatctggagatgcagttccagaggatcctggacgacccctccccacctcagcctggggaggagaagctggcagccctcactgcaggaggaagggtggagtgggcgcaggcacgccaggccttctttagctctggaaagaataaggctgccttggaggccatcgagcgtgccgctttcttcgtggccctggatgaggaatcctactsctatgaccccgaagatgaggccagcctyagcctctatggcaaggccctgctacatggcaactgctacaacaggtggtttgacaaatccttcactctcatttccttcaagaatggccagttgggtctcaatgcagagcatgcgtgggcagatgctcccatcattgggcacctctgggagtttgtcctgggcacagacagcttccacctgggctacacggagaccgggcactgcctgggcaaaccgaaccctgcgctcgcacctcctacacggctgcagtgggacattccaaaacagtgccaggcggtcatcnagagttcctaccaggtggccaaggcgttggcagacgacgtggagttgtactgcttccagttcctgccctttggcaaaggcctcatcaagaagtgccggaccagccctgatgcctttgtgcagatcgcgctgcagctggctcacttccgggacaggggtaagttctgcctgacctatgaggcctcaatgaccagaatgttccgggagggacggactgagactgtgcgttcctgtaccagcgagtccacagcctttgtgcaggccatgatggaggggtcccacacaaaagcagacctgcgagatctcttccagaaggctgctaagaagcaccagaatatgtaccgcctggccatgaccggggcagggatcgacaggcacctcttctgcctttacttggtctmcaagtacctaggagtcagctctcctttccttgctgaggtgctctcggaaccctggcgtctctccaccagccagatcccccaatcccagatccgcatgttcgacccagagcagcaccccaatcacctgggcgctggaggtggctttggccctgtagcagatgatggctatggagtttcctacatgattgcaggcgagaacacgatcttcttccacatctccagcaagttctcaagctcagagacgaacgcccagcgctttggaaaccacatccgcaaagccctgctggacattgctgatcttttccaagttcccaaggcctacagctgaaggttggagaaatgccagctgccctttcgtccccacactgtggaggaagggacctgtggcagctcacaggcakgaggggtggccgtgcacaggtgcccaggctccaaggacagctccggcagcagcccttaggtacctgtgttttgtytgggaactcggaggccctccccctcccccakctcaraccacagaggtggcaagagaagggctgaagctggaagactgttcatgagggacttgtgtgacctgctttgaaatgtgtgactctgctgagtgacgtaggctctgagatagctgtccacgcccacgtgtttgcttggaataaatacttgcct

SEQ ID NO: 818 - DNA, 3350 bp, Homo sapiens
  misc_feature (1)...(3350): n = A,T,C or G
gctatttttagctctaawgccaccatcctcacgagactctggggccccccaggctcccagacctttgagcaaccttcaccgcacagaaacccagccgcgccctgcaattcccaccgcggaaggtgggtgggttctggttctcgccccacgtttttccccgaccccgatttgggagtaggtgtcaggttcctggtgagggcggggcgggggtggctaggcctgaaggacgtggggacacgggccagagtggctggccccacgcacggacaggagtgaacccgagctgtgagtaggggccggcacagggcggcccgcgggggtctgggccctcagccctgcacaggggcgaggacggcgctggggcccgcgcgctcgggtggggaagggcgggctcccgaaccctgcctctgtccaggccggctccacttccaggggcgcctctctcccctgcccgcgccctcgctgacgccccccaactccaggctgcccttcgccgtccttggggctcctggagctttcaaggcccaaatcccgtgccgaccaacccccaggatggcggaagctcaccaggccgtggccttccagttcacggtgaccccagacggggtcgacttccggctcagtcgggaggccctgaaacacgtctacctgtctgggatcaactcctggaagaaacgcctgatccgcatcaagaatggcatcctcaggggcgtgtaccctggcagccccaccagctggctggtcgtcntcatggcaacagtgggttcctccttctgcaacgtggacatctccttggggctggtcagttgcatccagagatgcctccctcaggggtgtggcccctaccagaccccgcagacccgggcacttctcagcatggccatcttctccacgggcgtctgggtgacgggcatcttcttcttccgccaaaccctgaagctgcttctctgctaccatgggtggatgtttgagatgcatggcaagaccagcaacttgaccaggatctgggctatgtgtatccgccttctatccagccggcaccctatgctctacagcttccagacatctctgcccaagcttcctgtgcccagggtgtcagccacaattcagcggtacctagagtctgtgcgccccttgttggatgatgaggaatattaccgcatggagttgctggccaaagaattccaggacaagactgcccccaggctgcagaaatacctggtgctcaagtcatggtgggcaagtaactatgtgagtgactggtgggaagagtacatctaccttcgaggcaggagccctctcatggtgaacagcaactattatgtcatggaccttgtgctcatcaagaatacagacgtgcaggcagcccgcctgggaaacatcatccacgccatgatcatgtatcgccgtaaactggaccgtgaagaaatcaagcctgtgatggcactgggcatagtgcctatgtgctcctaccagatggagaggatgttcaacaccactcggatcccggncaaggacacagatgtgctacagcacctctcagacagccggcacgtggctgtctaccacaagggacgcttcttcaagctgtggctctatgagggcgcccgtctgctcaagcctcaggatctggagatgcagttccagaggatcctggacgacccctccccacctcagcctggggaggagaagctggcagccctcactgcaggaggaagggtggagtgggcgcaggcacgccaggccttctttagctctggaaagaataaggctgccttggaggccatcgagcgtgccgctttcttcgtggccctggatgaggaatcctactsctatgaccccgaagatgaggccagcctyagcctctatggcaaggccctgctacatggcaactgctacaacaggtggtttgacaaatccttcactctcatttccttcaagaatggccagttgggtctcaatgcagagcatgcgtgggcagatgctcccatcattgggcacctctgggagtttgtcctgggcacagacagcttccacctgggctacacggagaccgggcactgcctgggcaaaccgaaccctgcgctcgcacctcctacacggctgcagtgggacattccaaaacagtgccaggcggtcatcnagagttcctaccaggtggccaaggcgttggcagacgacgtggagttgtactgcttccagttcctgccctttggcaaaggcctcatcaagaagtgccggaccagccctgatgcctttgtgcagatcgcgctgcagctggctcacttccgggacaggggtaagttctgcctgacctatgaggcctcaatgaccagaatgttccgggagggacggactgagactgtgcgttcctgtaccagcgagtccacagcctttgtgcaggccatgatggaggggtcccacacaaaagcagacctgcgagatctcttccagaaggctgctaagaagcaccagaatatgtaccgcctggccatgaccggggcagggatcgacaggcacctcttctgcctttacttggtctmcaagtacctaggagtcagctctcctttccttgctgaggtgctctcggaaccctggcgtctctccaccagccagatcccccaatcccagatccgcatgttcgacccagagcagcaccccaatcacctgggcgctggaggtggctttggccctgtagcagatgatggctatggagtttcctacatgattgcaggcgagaacacgatcttcttccacatctccagcaagttctcaagctcagagacgaacgcccagcgctttggaaaccacatccgcaaagccctgctggacattgctgatcttttccaagttcccaaggcctacagctgaaggttggagaaatgccagctgccctttcgtccccacactgtggaggaagggacctgtggcagctcacaggcakgaggggtggccgtgcacaggtgcccaggctccaaggacagctccggcagcaggtcctcgctgggcagatgctgctccctgagggcccaggtggtggaggtggggttggagcaggaagggaattttgatttttttttttcttgatagatactaataaaaataaggctgtgtaattttctctcagcccttaggtacctgtgttttgtytgggaactcggaggccctccccctcccccakctcaraccacagaggtggcaagagaagggctgaagctggaagactgttcatgagggacttgtgtgacctgctttgaaatgtgtgactctgctgagtgacgtaggctctgagatagctgtccacgcccacgtgtttgcttggaataaatacttgcctcagaaccttcacc

SEQ ID NO: 819 - DNA, 1634 bp, Homo sapiens
ccggcagagatctgcggaattcggccttcggaaagagcccccgggccggggcacggagagagccgagcgccgcagccgtgagccgaatagagccggagagacccgagtatgaccggagaagcccaggccggccggaagaggagccgagcgcggccggaaggaaccgagcccgtccgaagggagcggagcgcagcctggcctggggcccggtcgagcccgcgccatggcggccgaggcgacagctgtggccggaagcggggctgttggcggctgcctggccaaagacggcttgcagcagtctaagtgcccggacactaccccaaaacggcggcgcgcctcgtcgctgtcgcgtgacgccgagcgccgagcctaccaatggtgccgggagtacttgggcggggcctggcgccgagtgcagcccgaggagctgagggtttaccccgtgagcggaggcctcagcaacctgctcttccgctgctcgctcccggaccacctgcccagcgttggcgaggagccccgggaggtgcttctgcggctgtacggagccatcttgcagggcgtggactccctggtgctagaaagcgtgatgttcgccatacttgcggagcggtcgctggggccccagctgtacggagtcttcccagagggccggctggaacagtacatcccaagtcggccattgaaaactcaagagcttcgagagccagtgttgtcagcagccattgccacgaagatggcgcaatttcatggcatggagatgcctttcaccaaggagccccactggctgtttgggaccatggagcggtacctaaaacagatccaggacctgcccccaactggcctccctgagatgaacctgctggagatgtacagcctgaaggatgagatgggcaacctcaggaagttactagagtctaccccatcgccagtcgtcttctgccacaatgacatccaggaagggamcatcttgctgctctcagagccagaaaatgctgacagcctcatgctggtggacttcgagtacagcagttataactataggggctttgacattgggaaccatttttgtgagtgggtttatgattatactcacgaggaatggcctttctacaaagcaaggcccacagactaccccactcaagaacagcagttgcattttattcgtcattacctggcagaggcaaagaaaggtgagaccctctcccaagaggagcagagaaaactggaagaagatttgctggtagaagtcagtcggtatgctctggcatcccatttcttctggggtctgtggtccatcctccaggcatccatgtccaccatagaatttggttacttggactatgcccagtctcggttccagttctacttccagcagaaggggcagctgaccagtgtccactcctcatcctgactccaccctcccactccttggatttctcctggagcctccagggcaggaccttggagggaggaacaacgagcagaaggccctggcgactgggctgagcccccaagtgaaactgaggttcaggagaccggcctgtycctgagtttgagtaggtccccatggctggcaggccaragccccgtgctgtgtatgtaacmcaataaacaagcttcttcttcsmaccctg

SEQ ID NO: 820 - DNA, 4340 bp, Homo sapiens
  misc_feature (1)...(4340): n = A,T,C or G
ccggcagagatctgcggaattcggccttcggaaagagcccccgggccggggcacggagagagccgagcgccgcagccgtgagccgaatagagccggagagacccgagtatgaccggagaagcccaggccggccggaagaggagccgagcgcggccggaaggaaccgagcccgtccgaagggagcggagcgcagcctggcctggggcccggtcgagcccgcgccatggcggccgaggcgacagctgtggccggaagcggggctgttggcggctgcctggccaaagacggcttgcagcagtctaagtgcccggacactaccccaaaacggcggcgcgcctcgtcgctgtcgcgtgacgccgagcgccgagcctaccaatggtgccgggagtacttgggcggggcctggcgccgagtgcagcccgaggagctgagggtttaccccgtgagcggaggcctcagcaacctgctcttccgctgctcgctcccggaccacctgcccagcgttggcgaggagccccgggaggtgcttctgcggctgtacggagccatcttgcagggcgtggactccctggtgctagaaagcgtgatgttcgccatacttgcggagcggtcgctggggccccagctgtacggagtcttcccagagggccggctggaacagtacatcccaagtcggccattgaaaactcaagagcttcgagagccagtgttgtcagcagccattgccacgaagatggcgcaatttcatggcatggagatgcctttcaccaaggagccccactggctgtttgggaccatggagcggtacctaaaacagatccaggacctgcccccaactggcctccctgagatgaacctgctggagatgtacagcctgaaggatgagatgggcaacctcaggaagttactagagtctaccccatcgccagtcgtcttctgccacaatgacatccaggaagggamcatcttgctgctctcagagccagaaaatgctgacagcctcatgctggtggacttcgagtacagcagttataactataggggctttgacattgggaaccatttttgtgagtgggtttatgattatactcacgaggaatggcctttctacaaagcaaggcccacagactaccccactcaagaacagcagttgcattttattcgtcattacctggcagaggcaaagaaaggtgagaccctctcccaagaggagcagagaaaactggaagaagatttgctggtagaagtcagtcggtatgctctggcatcccatttcttctggggtctgtggtccatcctccaggcatccatgtccaccatagaatttggttacttggactatgcccagtctcggttccagttctacttccagcagaaggggcagctgaccagtgtccactcctcatcctgactccaccctcccactccttggatttctcctggagcctccagggcaggaccttggagggaggaacaacgagcagaaggccctggcgactgggctgagcccccaagtgaaactgaggttcaggagaccggcctgtycctgagtttgactctaawgccaccatcctcacgagactctggggccccccaggctcccagacctttgagcaaccttcaccgcacagaaacccagccgcgccctgcaattcccaccgcggaaggtgccgaccaacccccaggatggcggaagctcaccaggccgtggccttccagttcacggtgaccccagacggggtcgacttccggctcagtcgggaggccctgaaacacgtctacctgtctgggatcaactcctggaagaaacgcctgatccgcatcaagaatggcatcctcaggggcgtgtaccctggcagccccaccagctggctggtcgtcntcatggcaacagtgggttcctccttctgcaacgtggacatctccttggggctggtcagttgcatccagagatgcctccctcaggggtgtggcccctaccagaccccgcagacccgggcacttctcagcatggccatcttctccacgggcgtctgggtgacgggcatcttcttcttccgccaaaccctgaagctgcttctctgctaccatgggtggatgtttgagatgcatggcaagaccagcaacttgaccaggatctgggctatgtgtatccgccttctatccagccggcaccctatgctctacagcttccagacatctctgcccaagcttcctgtgcccagggtgtcagccacaattcagcggtacctagagtctgtgcgccccttgttggatgatgaggaatattaccgcatggagttgctggccaaagaattccaggacaagactgcccccaggctgcagaaatacctggtgctcaagtcatggtgggcaagtaactatgtgagtgactggtgggaagagtacatctaccttcgaggcaggagccctctcatggtgaacagcaactattatgtcatggaccttgtgctcatcaagaatacagacgtgcaggcagcccgcctgggaaacatcatccacgccatgatcatgtatcgccgtaaactggaccgtgaagaaatcaagcctgtgatggcactgggcatagtgcctatgtgctcctaccagatggagaggatgttcaacaccactcggatcccggncaaggacacagatgtgctacagcacctctcagacagccggcacgtggctgtctaccacaagggacgcttcttcaagctgtggctctatgagggcgcccgtctgctcaagcctcaggatctggagatgcagttccagaggatcctggacgacccctccccacctcagcctggggaggagaagctggcagccctcactgcaggaggaagggtggagtgggcgcaggcacgccaggccttctttagctctggaaagaataaggctgccttggaggccatcgagcgtgccgctttcttcgtggccctggatgaggaatcctactsctatgaccccgaagatgaggccagcctyagcctctatggcaaggccctgctacatggcaactgctacaacaggtggtttgacaaatccttcactctcatttccttcaagaatggccagttgggtctcaatgcagagcatgcgtgggcagatgctcccatcattgggcacctctgggagtttgtcctgggcacagacagcttccacctgggctacacggagaccgggcactgcctgggcaaaccgaaccctgcgctcgcacctcctacacggctgcagtgggacattccaaaacagtgccaggcggtcatcnagagttcctaccaggtggccaaggcgttggcagacgacgtggagttgtactgcttccagttcctgccctttggcaaaggcctcatcaagaagtgccggaccagccctgatgcctttgtgcagatcgcgctgcagctggctcacttccgggacaggggtaagttctgcctgacctatgaggcctcaatgaccagaatgttccgggagggacggactgagactgtgcgttcctgtaccagcgagtccacagcctttgtgcaggccatgatggaggggtcccacacaaaagcagacctgcgagatctcttccagaaggctgctaagaagcaccagaatatgtaccgcctggccatgaccggggcagggatcgacaggcacctcttctgcctttacttggtctmcaagtacctaggagtcagctctcctttccttgctgaggtgctctcggaaccctggcgtctctccaccagccagatcccccaatcccagatccgcatgttcgacccagagcagcaccccaatcacctgggcgctggaggtggctttggccctgtagcagatgatggctatggagtttcctacatgattgcaggcgagaacacgatcttcttccacatctccagcaagttctcaagctcagagacgaacgcccagcgctttggaaaccacatccgcaaagccctgctggacattgctgatcttttccaagttcccaaggcctacagctgaaggttggagaaatgccagctgccctttcgtccccacactgtggaggaagggacctgtggcagctcacaggcakgaggggtggccgtgcacaggtgcccaggctccaaggacagctccggcagcagcccttaggtacctgtgttttgtytgggaactcggaggccctccccctcccccakctcaraccacagaggtggcaagagaagggctgaagctggaagactgttcatgagggacttgtgtgacctgctttgaaatgtgtgactctgctgagtgacgtaggctctgagatagctgtccacgcccacgtgtttgcttggaataaatacttgcct

SEQ ID NO: 821 - DNA, 5082 bp, Homo sapiens
  misc_feature (1)...(5082): n = A,T,C or G
caccagtatgaggagctgagagtaacytggtggtctttgcagattcaggctcagcagaggtatccttcctgcaaccagcaggagtgccctcgtggaagcgttcctacctgggaaacaggctctaatccagcagatcctaaggctctttcgctataaaatggctttcttggcctgaggcgatgtgattcgtgatcccatgttggtacacggagcatgcctgaagctcctggatagtgatgctggcctgggaccctgtgctccttctgcatgacgccgccactcacagtccactgttcaagcacaggggtagccaggggcacagctgactgacatcccatccatcctgctgttcaccaactcctcaatggtgccgggagtacttgggcggggcctggcgccgagtgcagcccgaggagctgagggtttaccccgtgaggtgggaggtcaggggtcagcctctccggtgcgcggatcggggtcaggggtcagccgcggggccctcaggatgctccatgttttcgcccccctcttgcgcccgcgcctggggcggggcggggccggcctggccgggagggggccggggccgcggcaggtagggccggccgcgggctgagcgcgcctggtgtgggtctgcagcggaggcctcagcaacctgctcttccgctgctcgctcccggaccacctgcccagcgttggcgaggagccccgggaggtgcttctgcggctgtacggagccatcttgcaggtgagggggktgtgagcgccgcagcaccagtggctttagggcctgtcgcttacgcgatgcgggtagtattgttcccgttgcgcagttgaggacaccgaggttcacggtctgagtaacacctcattacaccgaagcctgggcctgtattcccagagctttgggaggctgaggcgagaggatcacttgagcacaggagttcgagaccagcctggacaacatagtgagacccccatctctaaataaaaatagaccaacgctaaagcctgtgctccagagcctccaggcaattggatcagaagtcgcagctctggtgggaggaaggcgagccctcatgtgtgtccctgtgccactttgccttggcccctttgctgtccatcctttttcagggcgtggactccctggtgctagaaagcgtgatgttcgccatacttgcggagcggtcgctggggccccagctgtacggagtcttcccagagggccggctggaacagtacatcccagtacgggcccagtcctaccctctcctccccaaggcacctccaccccctaaccctaccccagtgcccaatgtctgcctccacatccctcaccccaagtagggaatttccsccaaaaccctgacttcccctcattgccccagcccttcccactcctgccccagccccatcaccaccctgatagcttcctgggtgcagagtcggccattgaaaactcaagagcttcgagagccagtgttgtcagcagccattgccacgaagatggcgcaatttcatggcatggagatgcctttcaccaaggagccccactggctgtttgggaccatggagcggtacctaaaacagatccaggacctgcccccaactggcctccctgagatgaacctgctggagatgtacagcctgaaggatgagatgggcaacctcaggaagttactagagtctaccccatcgccagtcgtcttctgccacaatgacatccaggaagggamcatcttgctgctctcagagccagaaaatgctgacagcctcatgctggtggacttcgagtacagcagttataactataggggctttgacattgggaaccatttttgtgagtgggtttatgattatactcacgaggaatggcctttctacaaagcaaggcccacagactaccccactcaagaacagcagaggcaaagaaaggtgagaccctctcccaagaggagcagagaaaactggaagaagatttgctggtagaagtcagtcggtatgctctggcatcccatttcttctggggtctgtggtccatcctccaggcatccatgtccaccatagaatttggttacttggactatgcccagtctcggttccagttctacttccagcagaaggggcagctgaccagtgtccactcctcatcctgactccaccctcccactccttggatttctcctggagcctccagggcaggaccttggagggaggaacaacgagcagaaggccctggcgactgggctgagcccccaagtgaaactgaggttcaggagaccggcctgtycctgagtttgactctaawgccaccatcctcacgagactctggggccccccaggctcccagacctttgagcaaccttcaccgcacagaaacccagccgcgccctgcaattcccaccgcggaaggtgccgaccaacccccaggatggcggaagctcaccaggccgtggccttccagttcacggtgaccccagacggggtcgacttccggctcagtcgggaggccctgaaacacgtctacctgtctgggatcaactcctggaagaaacgcctgatccgcatcaagaatggcatcctcaggggcgtgtaccctggcagccccaccagctggctggtcgtcntcatggcaacagtgggttcctccttctgcaacgtggacatctccttggggctggtcagttgcatccagagatgcctccctcaggggtgtggcccctaccagaccccgcagacccgggcacttctcagcatggccatcttctccacgggcgtctgggtgacgggcatcttcttcttccgccaaaccctgaagctgcttctctgctaccatgggtggatgtttgagatgcatggcaagaccagcaacttgaccaggatctgggctatgtgtatccgccttctatccagccggcaccctatgctctacagcttccagacatctctgcccaagcttcctgtgcccagggtgtcagccacaattcagcggtacctagagtctgtgcgccccttgttggatgatgaggaatattaccgcatggagttgctggccaaagaattccaggacaagactgcccccaggctgcagaaatacctggtgctcaagtcatggtgggcaagtaactatgtgagtgactggtgggaagagtacatctaccttcgaggcaggagccctctcatggtgaacagcaactattatgtcatggaccttgtgctcatcaagaatacagacgtgcaggcagcccgcctgggaaacatcatccacgccatgatcatgtatcgccgtaaactggaccgtgaagaaatcaagcctgtgatggcactgggcatagtgcctatgtgctcctaccagatggagaggatgttcaacaccactcggatcccggncaaggacacagatgtgctacagcacctctcagacagccggcacgtggctgtctaccacaagggacgcttcttcaagctgtggctctatgagggcgcccgtctgctcaagcctcaggatctggagatgcagttccagaggatcctggacgacccctccccacctcagcctggggaggagaagctggcagccctcactgcaggaggaagggtggagtgggcgcaggcacgccaggccttctttagctctggaaagaataaggctgccttggaggccatcgagcgtgccgctttcttcgtggccctggatgaggaatcctactsctatgaccccgaagatgaggccagcctyagcctctatggcaaggccctgctacatggcaactgctacaacaggtggtttgacaaatccttcactctcatttccttcaagaatggccagttgggtctcaatgcagagcatgcgtgggcagatgctcccatcattgggcacctctgggagtttgtcctgggcacagacagcttccacctgggctacacggagaccgggcactgcctgggcaaaccgaaccctgcgctcgcacctcctacacggctgcagtgggacattccaaaacagtgccaggcggtcatcnagagttcctaccaggtggccaaggcgttggcagacgacgtggagttgtactgcttccagttcctgccctttggcaaaggcctcatcaagaagtgccggaccagccctgatgcctttgtgcagatcgcgctgcagctggctcacttccgggacaggggtaagttctgcctgacctatgaggcctcaatgaccagaatgttccgggagggacggactgagactgtgcgttcctgtaccagcgagtccacagcctttgtgcaggccatgatggaggggtcccacacaaaagcagacctgcgagatctcttccagaaggctgctaagaagcaccagaatatgtaccgcctggccatgaccggggcagggatcgacaggcacctcttctgcctttacttggtctmcaagtacctaggagtcagctctcctttccttgctgaggtgctctcggaaccctggcgtctctccaccagccagatcccccaatcccagatccgcatgttcgacccagagcagcaccccaatcacctgggcgctggaggtggctttggccctgtagcagatgatggctatggagtttcctacatgattgcaggcgagaacacgatcttcttccacatctccagcaagttctcaagctcagagacgaacgcccagcgctttggaaaccacatccgcaaagccctgctggacattgctgatcttttccaagttcccaaggcctacagctgaaggttggagaaatgccagctgccctttcgtccccacactgtggaggaagggacctgtggcagctcacaggcakgaggggtggccgtgcacaggtgcccaggctccaaggacagctccggcagcagcccttaggtacctgtgttttgtytgggaactcggaggccctccccctcccccakctcaraccacagaggtggcaagagaagggctgaagctggaagactgttcatgagggacttgtgtgacctgctttgaaatgtgtgactctgctgagtgacgtaggctctgagatagctgtccacgcccacgtgtttgcttggaataaatacttgcct

SEQ ID NO: 822 - DNA, 6218 bp, Homo sapiens
  misc_feature (1)...(6218): n = A,T,C or G
cgcgcccgggcgggccggctggctgggaagatggcggcgggaacctgggccgccgccgccgccgccgccgccgccgcggagcgaaccaggggtgtccggggtgcgcggtccagggccggggccgggccatgagcgcgccgtcctcgagtccccgagccgcggagcccgcccgcgcccctcgggccgccccgcgtccctcgccatggcgcggctcgcggactacttcgtgctggtggcgttcgggccgcacccgcgcgggagtggggaaggccagggccagattctgcagcgcttcccagagaaggactgggaggacaacccattcccccagggcatcgagctgttttgccagcccagcgggtggcagctgtgtcccgagaggaatccaccgaccttctttgttgctgtcctcaccgacatcaactccgagcgccactactgcgcctgcttgaccttctgggagccagcggagccttcacagcaggaaacgacgcgcgtggaggatgccacagagagggaggaagagggggatgagggaggccagacccacctgtctcccacagcacctgccccatctgcccagctgtttgcaccgaagacgctggtactggtgtcgcgactcgaccacacggaggtgttcaggaacagccttggcctcatctatgccatccacgtggagggcctgaatgtgtgcctggagaacgtgattgggaacctgctgacgtgcactgtgcccctggctgggggctcgcagaggacgatctctttgggggctggtgaccggcaggtcatccagactccactggccgactcgctgcccgtcagccgctgcagcgtggccctgctcttccgccagctaggcatcaccaacgtgctgtctttgttctgtgccgccctcacggagcacaaggttctcttcctgtcccggagctaccagcggctcgccgatgcctgtaggggcctcctggcactgctgtttcctctcagatacagcttcacctatgtgcccatcctgccggctcagctgctggaggtcctcagcacacccacgcccttcatcattggggtcaacgcggccttccaggcagagacccaggagctgctcgatgtgattgttgctgatctggatggagggacggtcaccattcctgagtgtgtgcacattccacccttgccagagccactgcagagtcagacgcacagtgtgctgagcatggtcctggacccggagctggagttggctgacctcgccttccctccrcccacgacatccacctcctccctgaagatgcaggacaaggagctgcgcgcggtcttcctgcggctgttcgctcagctgctgcagggctatcgctggtgcctgcacgtcgtgcgcatccacccggagcctgtcatccgcttccataaggcagccttcctgggccagcgtgggctggtagaggacgatttcctgatgaaggtgctggagggcatggcctttgctggctttgtgtcagagcgtggggtcccataccgccctacggacctgttcgatgagctggtggcccacgaggtggcaaggatgcgggcggatgagaaccacccccagcgtgtcctgcgtcacgtccaggaactggcagagcagctctacaagaacgagaacccgtacccagccgtggcgatgcacaaggtacagaggcccggtgagagcagccacctgcgacgggtgccccgacccttcccccggctggatgagggcaccgtgcagtggatcgtggaccaggctgcagccaagatgcagggtgcacccccagctgtgaaggccgagaggaggaccaccgtgccctcagggccccccatgactgccatactggagcggtgcagtgggctgcaygtcaacagcgcccggcggctggaggttgtgcgcaactgcatctcctacgtgtttgaggggaaaatgcttgaggccaagaagctgctcccagccgtgttgagggccctgaaggggcgagctgcccgccgctgcctcgcccaggagctgcacctgcatgtgcagcagaaccgtgcggtcctggaccaccagcagtttgactttgtygtccgtatgatgaactgctgcctgcaggactgcacttctctggacgagcatggcattgcggcggctctgctgccwctggtcacagccttctgccggaagctgagcccrggggtgacgcagtttgcatacagctgtgtgcaggagcacgtggtgtgragcacgccacagttctgggaggccatgttctatggggatgtgcagactcacatccgggccctctacctggagcccacggaggacctggcccccgcccaggaggttggggaggcaccttcccaggaggacgagcgctctgccctagacgtggcttctgagcagcggcgcttgtggccaactctgagtcgtgagaagcagcaggagctggtgcagaaggaggagagcacggtgttcagccaggccatccactatgccaaccgcatgagctacctcctcctgcccctggacagcagcaagagccgcctacttcgggagcgtgccgggctgggcgacctggagagcgccagcaacagcctggtcaccaacagcatggctggcagtgtggccgagagctatgacacggagagcggcttcgaggatgcagagacctgcgacgtagctggggctgtggtccgcttcatcaaccgctttgtggacaaggtctgcacggagagtggggtcaccagcgaccacctcaaggggctgcatgtcatggtgccagacattgtccagatgcacatcgagaccctggaggccrtgcagcgggagagccggaggctgccgcccatccagaagcccaagctgctgcggccgcrcctgctgccgggtgaggagtgtgtgctggacggcctgcgcgtctacctgctgccggatgggcgtgargagggcgcggggggcagtgctgggggaccagcattgctcccagctgagggcgccgtcttcctcaccacgtaccgggtcatcttcacggggatgcccacggaccccctggttggggagcaggtggtggtccgctccttcccggtggctgcgctgaccaaggagaagcgcatcagcgtccagacccctgtggaccagctcctgcaggacgggctccagctgcgctcctgcacattccagctgctgaaaatggcctttgacgaggaggtggggtctgacagcgccgagctcttccgtaagcagctgcataagctgcggtacccgccggacatcagggccacctttgcgttcaccttgggctctgcccacacacctggccggccaccgcgagtcaccaaggacaagggtccttccctcagaaccctgtcccggaacctggtcaagaacgccaagaagaccatcgggcggcagcatgtcactcgcaagaagtacaacccccccagctgggagcaccggggccagccgccccctgaggaccaggaggacgagatctcagtgtcggaggagctggagcccagcacgctgaccccgtcctcagccctgaagccctccgaccgcatgaccatgagcagcctggtggaaagggcttgctgtcgcgactaccagcgcctcggtytgggcaccctgagcagcagcctgagccgggccaagtctgagcccttccgcatttctccggtcaaccgcatgtatgccatctgccgcagctacccagggctgctgatygtgccccagagtgtccaggacaacgccctgcagcgcgtgtcccgctgctaycgccagaaccgcttccccgtggtctgctggcgcagcgggcggtccaaggcggtgctgctgcgctctggaggcctgcatggcaaaggtgtcgtcggcctcttcaaggcccagaacgcaccttctccaggccagtcccaggcggactcgagtagcctggagcaggagaagtacctgcaggctgtggtcagctccatgccccgctacgccgacgcgtcgggacgcaacacgcttagcggcttctcctcagcccacatgggcagtcacggtaagtggggcagtgtccggaccagtggacgcagcagtggccttggcaccgatgtgggctcccggctagctggcagagacgcrctggccccaccccaggccaacgggggccctcccgacccgggcttcctgcgtccgcagcgagcagccctctatatccttggggacaaagcccagctcaagggtgtgcggtcagaccccctgcagcagtgggagctggtgcccattgaggtattcgaggcacggcaggtgaaggctagcttcaagaagctgctgaaagcatgtgtcccaggctgccccgctgctgagcccagcccagcctccttcctgcgctcactggaggactcagagtggctgatccagatccacaagctgctgcaggtgtctgtgctggtggtggagctcctggattcaggctcctccgtgctggtgggcctggaggatggctgggacatcaccacccaggtggtatccttggtgcagctgctctcagaccccttctaccgcacgctggagggctttcgcctgctggtggagaaggagtggctgtccttcggccatcgcttcagccaccgtggagctcacaccctggccgggcagagcagcggcttcacacccgtcttcctgcagttcctggactgcgtacaccaggtccacctgcagttccccatggagtttgagttcagccagttctacctcaagttcctcggctaccaccatgtgtcccgccgtttccggaccttcctgctcgactctgactatgagcgcattgagctggggctgctgtatgaggagaagggggaacgcaggggccaggtgccgtgcaggtctgtgtgggagtatgtggaccggctgagcaagaggacgcctgtgttccacaattacatgtatgcgcccgaggacgcagaggtcctgcggccctacagcaacgtgtccaacctgaaggtgtgggacttctacactgaggagacgctggccgagggccctccctatgactgggaactggcccaggggccccctgaacccccagaggaagaacggtctgatggaggcgctccccagagcaggcgccgcgtggtgtggccctgttacgacagctgcccgcgggcccagcctgacgccatctcacgcctgctggaggagctgcagaggctggagacagagttgggccaacccgctgagcgctggaaggacacctgggaccgggtgaaggctgcacagcgcctcgagggccggccagacggccgtggcacccctagctccctccttgtgtccaccgcaccccaccaccgtcgctcgctgggtgtgtacctgcaggaggggcccgtgggctccaccctgagcctcagcctggacagcgaccagagtagtggctcaaccacatccggctcccgtcaggctgccygccgcagcaccagcaccctgtacagccagttccagacagcagagagtgagaacaggtcctacgagggcactctgtacaagaagggggccttcatgaagccttggaaggcccgctggttcgtgctggacaagaccaagcaccagctgcgctactacgaccaccgtgtggacacagagtgcaagggtgtcatcgacttggcggaggtggaggctgtggcacctggcacgcccactatgggtgcccctaagacngtggacgagaaggccttctttgacgtgaagacaacgcgtcgcgtttacaacttctgtgcccaggacgtgccctcggcccagcagtgggtggaccggatccagagctgcctgtcggacgcctgagcctcccagccctgcccggctgctctgcttccggtcgttaccgaccactaggggtgggcagggccgccccggccaygtttacagccccggccctcgacagtattgaggccccgagcccccagcacttgtgtgtacagcccccgtccccgccccgccccgcccggccggccctaacttattttggcgtcacagctgagcaccgtgccgggaggtggccaaggtacagcccgcaatgggcctgtaaatagtccggccccgtcagcgtgtgctggtccagccagcggctgcaggcgagtttctagaaccagagtctatataaagagagaactaacgccacgctcctgtgcctgccttccccactccccggctgcctgctctcrgcctacccagagggtcccatctgccccta

SEQ ID NO: 823 - DNA, 6183 bp, Homo sapiens
  misc_feature (1)...(6183): n = A,T,C or G
cgcgcccgggcgggccggctggctgggaagatggcggcgggaacctgggccgccgccgccgccgccgccgccgccgcggagcgaaccaggggtgtccggggtgcgcggtccagggccggggccgggccatgagcgcgccgtcctcgagtccccgagccgcggagcccgcccgcgcccctcgggccgccccgcgtccctcgccatggcgcggctcgcggactacttcgtgctggtggcgttcgggccgcacccgcgcgggagtggggaaggccagggccagattctgcagcgcttcccagagaaggactgggaggacaacccattcccccagggcatcgagctgttttgccagcccagcgggtggcagctgtgtcccgagaggaatccaccgaccttctttgttgctgtcctcaccgacatcaactccgagcgccactactgcgcctgcttgaccttctgggagccagcggagccttcacaggaaacgacgcgcgtggaggatgccacagagagggaggaagagggggatgagggaggccagacccacctgtctcccacagcacctgccccatctgcccagctgtttgcaccgaagacgctggtactggtgtcgcgactcgaccacacggaggtgttcaggaacagccttggcctcatctatgccatccacgtggagggcctgaatgtgtgcctggagaacgtgattgggaacctgctgacgtgcactgtgcccctggctgggggctcgcagaggacgatctctttgggggctggtgaccggcaggtcatccagactccactggccgactcgctgcccgtcagccgctgcagcgtggccctgctcttccgccagctaggcatcaccaacgtgctgtctttgttctgtgccgccctcacggagcacaaggttctcttcctgtcccggagctaccagcggctcgccgatgcctgtaggggcctcctggcactgctgtttcctctcagatacagcttcacctatgtgcccatcctgccggctcagctgctggaggtcctcagcacacccacgcccttcatcattggggtcaacgcggccttccaggcagagacccaggagctgctcgatgtgattgttgctgatctggatggagggacggtcaccattcctgagtgtgtgcacattccacccttgccagagccactgcagagtcagacgcacagtgtgctgagcatggtcctggacccggagctggagttggctgacctcgccttccctccrcccacgacatccacctcctccctgaagatgcaggacaaggagctgcgcgcggtcttcctgcggctgttcgctcagctgctgcagggctatcgctggtgcctgcacgtcgtgcgcatccacccggagcctgtcatccgcttccataaggcagccttcctgggccagcgtgggctggtagaggacgatttcctgatgaaggtgctggagggcatggcctttgctggctttgtgtcagagcgtggggtcccataccgccctacggacctgttcgatgagctggtggcccacgaggtggcaaggatgcgggcggatgagaaccacccccagcgtgtcctgcgtcacgtccaggaactggcagagcagctctacaagaacgagaacccgtacccagccgtggcgatgcacaaggtacagaggcccggtgagagcagccacctgcgacgggtgccccgacccttcccccggctggatgagggcaccgtgcagtggatcgtggaccaggctgcagccaagatgcagggtgcacccccagctgtgaaggccgagaggaggaccaccgtgccctcagggccccccatgactgccatactggagcggtgcagtgggctgcaygtcaacagcgcccggcggctggaggttgtgcgcaactgcatctcctacgtgtttgaggggaaaatgcttgaggccaagaagctgctcccagccgtgttgagggccctgaaggggcgagctgcccgccgctgcctcgcccaggagctgcacctgcatgtgcagcagaaccgtgcggtcctggaccaccagcagtttgactttgtygtccgtatgatgaactgctgcctgcaggactgcacttctctggacgagcatggcattgcggcggctctgctgccwctggtcacagccttctgccggaagctgagcccrggggtgacgcagtttgcatacagctgtgtgcaggagcacgtggtgtgragcacgccacagttctgggaggccatgttctatggggatgtgcagactcacatccgggccctctacctggagcccacggaggacctggcccccgcccaggaggttggggaggcaccttcccaggaggacgagcgctctgccctagacgtggcttctgagcagcggcgcttgtggccaactctgagtcgtgagaagcagcaggagctggtgcagaaggaggagagcacggtgttcagccaggccatccactatgccaaccgcatgagctacctcctcctgcccctggacagcagcaagagccgcctacttcgggagcgtgccgggctgggcgacctggagagcgccagcaacagcctggtcaccaacagcatggctggcagtgtggccgagagctatgacacggagagcggcttcgaggatgcagagacctgcgacgtagctggggctgtggtccgcttcatcaaccgctttgtggacaaggtctgcacggagagtggggtcaccagcgaccacctcaaggggctgcatgtcatggtgccagacattgtccagatgcacatcgagaccctggaggccrtgcagcgggagagccggaggctgccgcccatccagaagcccaagctgctgcggccgcrcctgctgccgggtgaggagtgtgtgctggacggcctgcgcgtctacctgctgccggatgggcgtgargagggcgcggggggcagtgctgggggaccagcattgctcccagctgagggcgccgtcttcctcaccacgtaccgggtcatcttcacggggatgcccacggaccccctggttggggagcaggtggtggtccgctccttcccggtggctgcgctgaccaaggagaagcgcatcagcgtccagacccctgtggaccagctcctgcaggacgggctccagctgcgctcctgcacattccagctgctgaaaatggcctttgacgaggaggtggggtctgacagcgccgagctcttccgtaagcagctgcataagctgcggtacccgccggacatcagggccacctttgcgttcaccttgggctctgcccacacacctggccggccaccgcgagtcaccaaggacaagggtccttccctcagaaccctgtcccggaacctggtcaagaacgccaagaagaccatcgggcggcagcatgtcactcgcaagaagtacaacccccccagctgggagcaccggggccagccgccccctgaggaccaggaggacgagatctcagtgtcggaggagctggagcccagcacgctgaccccgtcctcagccctgaagccctccgaccgcatgaccatgagcagcctggtggaaagggcttgctgtcgcgactaccagcgcctcggtytgggcaccctgagcagcagcctgagccgggccaagtctgagcccttccgcatttctccggtcaaccgcatgtatgccatctgccgcagctacccagggctgctgatygtgccccagagtgtccaggacaacgccctgcagcgcgtgtcccgctgctaycgccagaaccgcttccccgtggtctgctggcgcagcgggcggtccaaggcggtgctgctgcgctctggaggcctgcatggcaaaggtgtcgtcggcctcttcaaggcccagaacgcaccttctccaggccagtcccaggcggactcgagtagcctggagcaggagaagtacctgcaggctgtggtcagctccatgccccgctacgccgacgcgtcgggacgcaacacgcttagcggcttctcctcagcccacatgggcagtcacgttcccagccccagagccagggtcaccacgctgtccaaccccatggcggcctcggcctccagacggaccgcaccccgaggtaagtggggcagtgtccggaccagtggacgcagcagtggccttggcaccgatgtgggctcccggctagctggcagagacgcrctggccccaccccaggccaacgggggccctcccgacccgggcttcctgcgtccgcagcgagcagccctctatatccttggggacaaagcccagctcaagggtgtgcggtcagaccccctgcagcagtgggagctggtgcccattgaggtattcgaggcacggcaggtgaaggctagcttcaagaagctgctgaaagcatgtgtcccaggctgccccgctgctgagcccagcccagcctccttcctgcgctcactggaggactcagagtggctgatccagatccacaagctgctgcaggtgtctgtgctggtggtggagctcctggattcaggctcctccgtgctggtgggcctggaggatggctgggacatcaccacccaggtggtatccttggtgcagctgctctcagaccccttctaccgcacgctggagggctttcgcctgctggtggagaaggagtggctgtccttcggccatcgcttcagccaccgtggagctcacaccctggccgggcagagcagcggcttcacacccgtcttcctgcagttcctggactgcgtacaccaggtccacctgcagttccccatggagtttgagttcagccagttctacctcaagttcctcggctaccaccatgtgtcccgccgtttccggaccttcctgctcgactctgactatgagcgcattgagctggggctgctgtatgaggagaagggggaacgcaggggccaggtgccgtgcaggtctgtgtgggagtatgtggaccggctgagcaagaggacgcctgtgttccacaattacatgtatgcgcccgaggacgcagaggtcctgcggccctacagcaacgtgtccaacctgaaggtgtgggacttctacactgaggagacgctggccgagggccctccctatgactgggaactggcccaggggccccctgaacccccagaggaagaacggtctgatggaggcgctccccagagcaggcgccgcgtggtgtggccctgttacgacagctgcccgcgggcccagcctgacgccatctcacgcctgctggaggagctgcagaggctggagacagagttgggccaacccgctgagcgctggaaggacacctgggaccgggtgaaggctgcacagcgcctcgagggccggccagacggccgtggcacccctagctccctccttgtgtccaccgcaccccaccaccgtcgctcgctgggtgtgtacctgcaggaggggcccgtgggctccaccctgagcctcagcctggacagcgaccagagtagtggctcaaccacatccggctcccgtcaggctgccygccgcagcaccagcaccctgtacagccagttccagacagcagagagtgagaacaggtcctacgagggcactctgtacaagaagggggccttcatgaagccttggaaggcccgctggttcgtgctggacaagaccaagcaccagctgcgctactacgaccaccgtgtggacacagagtgcaagggtgtcatcgacttggcggaggtggaggctgtggcacctggcacgcccactatgggtgcccctaagacngtggacgagaaggccttctttgacgtgaagacaacgcgtcgcgtttacaacttctgtgcccaggacgtgccctcggcccagcagtgggtggaccggatccagagctgcctgtcggacgcctgagcctcccagccctgcccggctgctctgcttccggtcgttaccgaccactaggggtggtgttgggacacctgggcgagatgtgagggtgggctcacttgagccactgaaaccagccaggtcttccctcaggccggacagatggcgcctgaccraagttcctggcacctggaaaacccacagcagggcacgagtgacctgagaggcccactcaggcagaagagacgcaagctgggccgtccaactggtttcaactgccagctttaccaatgcagcatttattttaaaattaaattaaatta

SEQ ID NO: 824 - DNA, 6332 bp, Homo sapiens
  misc_feature (1)...(6332): n = A,T,C or G
cgcgcccgggcgggccggctggctgggaagatggcggcgggaacctgggccgccgccgccgccgccgccgccgccgcggagcgaaccaggggtgtccggggtgcgcggtccagggccggggccgggccatgagcgcgccgtcctcgagtccccgagccgcggagcccgcccgcgcccctcgggccgccccgcgtccctcgccatggcgcggctcgcggactacttcgtgctggtggcgttcgggccgcacccgcgcgggagtggggaaggccagggccagattctgcagcgcttcccagagaaggactgggaggacaacccattcccccagggcatcgagctgttttgccagcccagcgggtggcagctgtgtcccgagaggaatccaccgaccttctttgttgctgtcctcaccgacatcaactccgagcgccactactgcgcctgcttgaccttctgggagccagcggagccttcacaggaaacgacgcgcgtggaggatgccacagagagggaggaagagggggatgagggaggccagacccacctgtctcccacagcacctgccccatctgcccagctgtttgcaccgaagacgctggtactggtgtcgcgactcgaccacacggaggtgttcaggaacagccttggcctcatctatgccatccacgtggagggcctgaatgtgtgcctggagaacgtgattgggaacctgctgacgtgcactgtgcccctggctgggggctcgcagaggacgatctctttgggggctggtgaccggcaggtcatccagactccactggccgactcgctgcccgtcagccgctgcagcgtggccctgctcttccgccagctaggcatcaccaacgtgctgtctttgttctgtgccgccctcacggagcacaaggttctcttcctgtcccggagctaccagcggctcgccgatgcctccccttctcctggcccctttgcccagccgcgtcccctggctcactgcatcctctggggcctgcacagcttcacctatgtgcccatcctgccggctcagctgctggaggtcctcagcacacccacgcccttcatcattggggtcaacgcggccttccaggcagagacccaggagctgctcgatgtgattgttgctgatctggatggagggacggtcaccattcctgagtgtgtgcacattccacccttgccagagccactgcagagtcagacgcacagtgtgctgagcatggtcctggacccggagctggagttggctgacctcgccttccctccrcccacgacatccacctcctccctgaagatgcaggacaaggagctgcgcgcggtcttcctgcggctgttcgctcagctgctgcagggctatcgctggtgcctgcacgtcgtgcgcatccacccggagcctgtcatccgcttccataaggcagccttcctgggccagcgtgggctggtagaggacgatttcctgatgaaggtgctggagggcatggcctttgctggctttgtgtcagagcgtggggtcccataccgccctacggacctgttcgatgagctggtggcccacgaggtggcaaggatgcgggcggatgagaaccacccccagcgtgtcctgcgtcacgtccaggaactggcagagcagctctacaagaacgagaacccgtacccagccgtggcgatgcacaaggtacagaggcccggtgagagcagccacctgcgacgggtgccccgacccttcccccggctggatgagggcaccgtgcagtggatcgtggaccaggctgcagccaagatgcagggtgcacccccagctgtgaaggccgagaggaggaccaccgtgccctcagggccccccatgactgccatactggagcggtgcagtgggctgcaygtcaacagcgcccggcggctggaggttgtgcgcaactgcatctcctacgtgtttgaggggaaaatgcttgaggccaagaagctgctcccagccgtgttgagggccctgaaggggcgagctgcccgccgctgcctcgcccaggagctgcacctgcatgtgcagcagaaccgtgcggtcctggaccaccagcagtttgactttgtygtccgtatgatgaactgctgcctgcaggactgcacttctctggacgagcatggcattgcggcggctctgctgccwctggtcacagccttctgccggaagctgagcccrggggtgacgcagtttgcatacagctgtgtgcaggagcacgtggtgtgragcacgccacagttctgggaggccatgttctatggggatgtgcagactcacatccgggccctctacctggagcccacggaggacctggcccccgcccaggaggttggggaggcaccttcccaggaggacgagcgctctgccctagacgtggcttctgagcagcggcgcttgtggccaactctgagtcgtgagaagcagcaggagctggtgcagaaggaggagagcacggtgttcagccaggccatccactatgccaaccgcatgagctacctcctcctgcccctggacagcagcaagagccgcctacttcgggagcgtgccgggctgggcgacctggagagcgccagcaacagcctggtcaccaacagcatggctggcagtgtggccgagagctatgacacggagagcggcttcgaggatgcagagacctgcgacgtagctggggctgtggtccgcttcatcaaccgctttgtggacaaggtctgcacggagagtggggtcaccagcgaccacctcaaggggctgcatgtcatggtgccagacattgtccagatgcacatcgagaccctggaggccrtgcagcgggagagccggaggctgccgcccatccagaagcccaagctgctgcggccgcrcctgctgccgggtgaggagtgtgtgctggacggcctgcgcgtctacctgctgccggatgggcgtgargagggcgcggggggcagtgctgggggaccagcattgctcccagctgagggcgccgtcttcctcaccacgtaccgggtcatcttcacggggatgcccacggaccccctggttggggagcaggtggtggtccgctccttcccggtggctgcgctgaccaaggagaagcgcatcagcgtccagacccctgtggaccagctcctgcaggacgggctccagctgcgctcctgcacattccagctgctgaaaatggcctttgacgaggaggtggggtctgacagcgccgagctcttccgtaagcagctgcataagctgcggtacccgccggacatcagggccacctttgcgttcaccttgggctctgcccacacacctggccggccaccgcgagtcaccaaggacaagggtccttccctcagaaccctgtcccggaacctggtcaagaacgccaagaagaccatcgggcggcagcatgtcactcgcaagaagtacaacccccccagctgggagcaccggggccagccgccccctgaggaccaggaggacgagatctcagtgtcggaggagctggagcccagcacgctgaccccgtcctcagccctgaagccctccgaccgcatgaccatgagcagcctggtggaaagggcttgctgtcgcgactaccagcgcctcggtytgggcaccctgagcagcagcctgagccgggccaagtctgagcccttccgcatttctccggtcaaccgcatgtatgccatctgccgcagctacccagggctgctgatygtgccccagagtgtccaggacaacgccctgcagcgcgtgtcccgctgctaycgccagaaccgcttccccgtggtctgctggcgcagcgggcggtccaaggcggtgctgctgcgctctggaggcctgcatggcaaaggtgtcgtcggcctcttcaaggcccagaacgcaccttctccaggccagtcccaggcggactcgagtagcctggagcaggagaagtacctgcaggctgtggtcagctccatgccccgctacgccgacgcgtcgggacgcaacacgcttagcggcttctcctcagcccacatgggcagtcacgttcccagccccagagccagggtcaccacgctgtccaaccccatggcggcctcggcctccagacggaccgcaccccgaggtaagtggggcagtgtccggaccagtggacgcagcagtggccttggcaccgatgtgggctcccggctagctggcagagacgcrctggccccaccccaggccaacgggggccctcccgacccgggcttcctgcgtccgcagcgagcagccctctatatccttggggacaaagcccagctcaagggtgtgcggtcagaccccctgcagcagtgggagctggtgcccattgaggtattcgaggcacggcaggtgaaggctagcttcaagaagctgctgaaagcatgtgtcccaggctgccccgctgctgagcccagcccagcctccttcctgcgctcactggaggactcagagtggctgatccagatccacaagctgctgcaggtgtctgtgctggtggtggagctcctggattcaggctcctccgtgctggtgggcctggaggatggctgggacatcaccacccaggtggtatccttggtgcagctgctctcagaccccttctaccgcacgctggagggctttcgcctgctggtggagaaggagtggctgtccttcggccatcgcttcagccaccgtggagctcacaccctggccgggcagagcagcggcttcacacccgtcttcctgcagttcctggactgcgtacaccaggtccacctgcagttccccatggagtttgagttcagccagttctacctcaagttcctcggctaccaccatgtgtcccgccgtttccggaccttcctgctcgactctgactatgagcgcattgagctggggctgctgtatgaggagaagggggaacgcaggggccaggtgccgtgcaggtctgtgtgggagtatgtggaccggctgagcaagaggacgcctgtgttccacaattacatgtatgcgcccgaggacgcagaggcccaccctcaggtcctgcggccctacagcaacgtgtccaacctgaaggtgtgggacttctacactgaggagacgctggccgagggccctccctatgactgggaactggcccaggggccccctgaacccccagaggaagaacggtctgatggaggcgctccccagagcaggcgccgcgtggtgtggccctgttacgacagctgcccgcgggcccagcctgacgccatctcacgcctgctggaggagctgcagaggctggagacagagttgggccaacccgctgagcgctggaaggacacctgggaccgggtgaaggctgcacagcgcctcgagggccggccagacggccgtggcacccctagctccctccttgtgtccaccgcaccccaccaccgtcgctcgctgggtgtgtacctgcaggaggggcccgtgggctccaccctgagcctcagcctggacagcgaccagagtagtggctcaaccacatccggctcccgtcaggctgccygccgcagcaccagcaccctgtacagccagttccagacagcagagagtgagaacaggtcctacgagggcactctgtacaagaagggggccttcatgaagccttggaaggcccgctggttcgtgctggacaagaccaagcaccagctgcgctactacgaccaccgtgtggacacagagtgcaagggtgtcatcgacttggcggaggtggaggctgtggcacctggcacgcccactatgggtgcccctaagacngtggacgagaaggccttctttgacgtgaagacaacgcgtcgcgtttacaacttctgtgcccaggacgtgccctcggcccagcagtgggtggaccggatccagagctgcctgtcggacgcctgagcctcccagccctgcccggctgctctgcttccggtcgttaccgaccactaggggtgggcagggccgccccggccaygtttacagccccggccctcgacagtattgaggccccgagcccccagcacttgtgtgtacagcccccgtccccgccccgccccgcccggccggccctaacttattttggcgtcacagctgagcaccgtgccgggaggtggccaaggtacagcccgcaatgggcctgtaaatagtccggccccgtcagcgtgtgctggtccagccagcggctgcaggcgagtttctagaaccagagtctatataaagagagaactaacgccacgctcctgtgcctgccttccccactccccggctgcctgctctcrgcctacccagagggtcccatctgccccta

SEQ ID NO: 825 - DNA, 2496 bp, Homo sapiens
agcaaaatggcgccagaactagtggygggctgaggacgccgtacccctcggaaggcagccctgcggtccctttgccgcccgttccctcccggacatggaggacgtggaggcgcgcttcgcccacctcttgcagcccatccgcgacctcaccaagaactgggaggtggacgtggcggcccagctggctggatcagatctgcatttcttttgacgaaggcaagaccacaatgaacttcaytgaggcagcgttgttgatccagggctctgcctgcgtctacagtaagaaggtggaatacctctactcactcgtctaccaggcccttgatttcatctctggaaagaggcgggccaagcagctctcttcggtgcaggaggacagggccaatggggttgccagctccggggtcccccaggaggcagagaatgagttcctgtcgctggatgacttccctgactcccggactaacgtggatctcaagaatgatcagacgcccagtgaggtcctcatcatccccctcctgcccatggccctggtggcccctgatgaaatggagaagaacaacaatcccctgtacagaggggccttcatgttggagccagarggcatgtcccccatggaaccagcgggcgtttcccccatgccagggacccagaakgacaccgggaggactgaggagcagccaatggaagtttcygtgtgcaggagccctgtcccagcactcggcttctcccaggagccaggcccctstccagaasgcccgatgcccctgggtgggggcgaggacgaggatgcagaggaggcagtagagcttcctgaggcctcggcccccaaggccgctctggagcccaaggagtycaggagcccgcagcagagtgctgccctgcccaggaggtacatgctgcgggagcgggagggggccccagagcctgcatcctgcgtgaaggagactccagaccyctggcagagcctggacccctttgactccttggagtctaagcccttcaagaaaggtaggccttactctgtgcccccctgtgtggaggaggctctgggacagaagcgcaagaggaagggcgctgccaagctgcaggacttccaccagtggtacctggctgcctatgcagaccatgccgacagcaggcggcttcggcgaaagggtccgtcctttgcagacatggaggtcctgtactggacacacgtgaaggagcagttggaaactctccggaagctgcagaggagggaggyaaatgctttctctggacaggtggctgagcagtggctgcggcctgcagaggaggaccacctggaggattccctggaagacctgggggcagcagatgactttctagagcctgaggagtacatggagcccgagggagcagaccccagggaagccgctgaccttgacgcagtgccgatgtccctgagctacgaggagctggttcgaaggaatgtggagctcttcatcgccacctcccagaagtttgtccaggagacagagctgagccagcgcatcagggactgggaggacacagtgcagcctctgctccaggagcaggagcagcatgtgccctttgacatccacacctatggggaccagctggtctcacggttcccccagctcaatgagtggtgtccctttgcggagctggtggctggccagccggccttcgaggtgtgtcgttccatgctggcctccctgcagctggccaatgactacacagtggagataacccagcagcccgggctggagatggccgtggacaccatgtccctgagactgctcacgcaccagcgagcgcacaagcgcttccagacctacgctgccccctccatggcccagccctgagtggggagcaccgaggcaggggtgggggaatgtgtactgaggagccgtgygtctgctcctggctggcccggcctaataaagcagtgttgccatctcatcttccccctaaaaacccttttatgtacacctgcgcagagaagagggctgcctggcctccctgggccgctggtacagatcacacacacacacagattaaacgcagcccgtttaatgatggggcccagactgcagtggctcaagacaggacactgcggaaagccgccatgtgccgccgcacactgtctgagatctgctcagccgatctgctccggccgtagtaatccgtgaagaggccgtcagggttgagcaggtagatggcaatgragtggtccacgatgtagtcctggtcctcatccttggggcckgcattgtagtacacgcggtaactgtgactagcctgggcaacctgtttggtrgagccggtcagacccaacagtcttgggtggaagtcctggacgtagcgggccatggcttcaacgtcgtcccrctcggggtccacagtgatgaagacaggctgcactggaggcaaaccaggctctgcttccagctgccgcaccacctgcaccagcttctccagctygtctgggcagatgtcagggcagtgagt

SEQ ID NO: 826 - DNA, 2659 bp, Homo sapiens
gctgcgcggcgccggggttcgcctctctggcttttgcccacgttacgtcatagacatgcgcgcgacgccgcgcctacgcattttcctgggcgggaacagcaaaatggcgccagaactagtggygggctgaggacgccgtacccctcggaaggcagccctgcggtccctttgccgcccgttccctcccggacatggaggacgtggaggcgcgcttcgcccacctcttgcagcccatccgcgacctcaccaagaactgggaggtggacgtggcggcccagctgggcgagtatctggaggagctggatcagatctgcatttcttttgacgaaggcaagaccacaatgaacttcaytgaggcagcgttgttgatccagggctctgcctgcgtctacagtaagaaggtggaatacctctactcactcgtctaccaggcccttgatttcatctctggaaagaggcgggccaagcagctctcttcggtgcaggaggacagggccaatggggttgccagctccggggtcccccaggaggcagagaatgagttcctgtcgctggatgacttccctgactcccggactaacgtggatctcaagaatgatcagacgcccagtgaggtcctcatcatccccctcctgcccatggccctggtggcccctgatgaaatggagaagaacaacaatcccctgtacagccgtcagggtgaggtcctggccagccggaaggatttcaggatgaacacgtgcgttccccaccccagaggggccttcatgttggagccagarggcatgtcccccatggaaccagcgggcgtttcccccatgccagggacccagaakgacaccgggaggactgaggagcagccaatggaagtttcygtgtgcaggagccctgtcccagcactcggcttctcccaggagccaggcccctstccagaasgcccgatgcccctgggtgggggcgaggacgaggatgcagaggaggcagtagagcttcctgaggcctcggcccccaaggccgctctggagcccaaggagtycaggagcccgcagcagagtgctgccctgcccaggaggtacatgctgcgggagcgggagggggccccagagcctgcatcctgcgtgaaggagactccagaccyctggcagagcctggacccctttgactccttggagtctaagcccttcaagaaaggtaggccttactctgtgcccccctgtgtggaggaggctctgggacagaagcgcaagaggaagggcgctgccaagctgcaggacttccaccagtggtacctggctgcctatgcagaccatgccgacagcaggcggcttcggcgaaagggtccgtcctttgcagacatggaggtcctgtactggacacacgtgaaggagcagttggaaactctccggaagctgcagaggagggaggyaagtggctgagcagtggctgcggcctgcagaggaggaccacctggaggattccctggaagacctgggggcagcagatgactttctagagcctgaggagtacatggagcccgagggagcagaccccagggaagccgctgaccttgacgcagtgccgatgtccctgagctacgaggagctggttcgaaggaatgtggagctcttcatcgccacctcccagaagtttgtccaggagacagagctgagccagcgcatcagggactgggaggacacagtgcagcctctgctccaggagcaggagcagcatgtgccctttgacatccacacctatggggaccagctggtctcacggttcccccagctcaatgagtggtgtccctttgcggagctggtggctggccagccggccttcgaggtgtgtcgttccatgctggcctccctgcagctggccaatgactacacagtggagataacccagcagcccgggctggagatggccgtggacaccatgtccctgagactgctcacgcaccagcgagcgcacaagcgcttccagacctacgctgccccctccatggcccagccctgagtggggagcaccgaggcaggggtgggggaatgtgtactgaggagccgtgygtctgctcctggctggcccggcctaataaagcagtgttgccatctcatcttccccctaaaaacccttttatgtacacctgcgcagagaagagggctgcctggcctccctgggccgctggtacagatcacacacacacacagattaaacgcagcccgtttaatgatggggcccagactgcagtggctcaagacaggacactgcggaaagccgccatgtgccgccgcacactgtctgagatctgctcagccgatctgctccggccgtagtaatccgtgaagaggccgtcagggttgagcaggtagatggcaatgragtggtccacgatgtagtcctggtcctcatccttggggcckgcattgtagtacacgcggtaactgtgactagcctgggcaacctgtttggtrgagccggtcagacccaacagtcttgggtggaagtcctggacgtagcgggccatggcttcaacgtcgtcccrctcggggtccacagtgatgaagacaggctgcactggaggcaaaccaggctctgcttccagctgccgcaccacctgcaccagcttctccagctygtctgggcagatgtcagggcagtgagt

SEQ ID NO: 827 - DNA, 2655 bp, Homo sapiens
gctgcgcggcgccggggttcgcctctctggcttttgcccacgttacgtcatagacatgcgcgcgacgccgcgcctacgcattttcctgggcgggaacagcaaaatggcgccagaactagtggygggctgaggacgccgtacccctcggaaggcagccctgcggtccctttgccgcccgttccctcccggacatggaggacgtggaggcgcgcttcgcccacctcttgcagcccatccgcgacctcaccaagaactgggaggtggacgtggcggcccagctgggcgagtatctggaggagctggatcagatctgcatttcttttgacgaaggcaagaccacaatgaacttcaytgaggcagcgttgttgatccagggctctgcctgcgtctacagtaagaaggtggaatacctctactcactcgtctaccaggcccttgatttcatctctggaaagaggcgggccaagcagctctcttcggtgcaggaggacagggccaatggggttgccagctccggggtcccccaggaggcagagaatgagttcctgtcgctggatgacttccctgactcccggactaacgtggatctcaagaatgatcagacgcccagtgaggtcctcatcatccccctcctgcccatggccctggtggcccctgatgaaatggagaagaacaacaatcccctgtacagccgtcagggtgaggtcctggccagccggaaggatttcaggatgaacacgtgcgttccccaccccagaggggccttcatgttggagccagarggcatgtcccccatggaaccagcgggcgtttcccccatgccagggacccagaakgacaccgggaggactgaggagcagccaatggaagtttcygtgtgcaggagccctgtcccagcactcggcttctcccaggagccaggcccctstccagaasgcccgatgcccctgggtgggggcgaggacgaggatgcagaggaggcagtagagcttcctgaggcctcggcccccaaggccgctctggagcccaaggagtycaggagcccgcagcagagtgctgccctgcccaggaggtacatgctgcgggagcgggagggggccccagagcctgcatcctgcgtgaaggagactccagaccyctggcagagcctggacccctttgactccttggagtctaagcccttcaagaaaggtaggccttactctgtgcccccctgtgtggaggaggctctgggacagaagcgcaagaggaagggcgctgccaagctgcaggacttccaccagtggtacctggctgcctatgcagaccatgccgacagcaggcggcttcggcgaaagggtccgtcctttgcagacatggaggtcctgtactggacacacgtgaaggagcagttggaaactctccggaagctgcagaggagggaygtggctgagcagtggctgcggcctgcagaggaggaccacctggaggattccctggaagacctgggggcagcagatgactttctagagcctgaggagtacatggagcccgagggagcagaccccagggaagccgctgaccttgacgcagtgccgatgtccctgagctacgaggagctggttcgaaggaatgtggagctcttcatcgccacctcccagaagtttgtccaggagacagagctgagccagcgcatcagggactgggaggacacagtgcagcctctgctccaggagcaggagcagcatgtgccctttgacatccacacctatggggaccagctggtctcacggttcccccagctcaatgagtggtgtccctttgcggagctggtggctggccagccggccttcgaggtgtgtcgttccatgctggcctccctgcagctggccaatgactacacagtggagataacccagcagcccgggctggagatggccgtggacaccatgtccctgagactgctcacgcaccagcgagcgcacaagcgcttccagacctacgctgccccctccatggcccagccctgagtggggagcaccgaggcaggggtgggggaatgtgtactgaggagccgtgygtctgctcctggctggcccggcctaataaagcagtgttgccatctcatcttccccctaaaaacccttttatgtacacctgcgcagagaagagggctgcctggcctccctgggccgctggtacagatcacacacacacacagattaaacgcagcccgtttaatgatggggcccagactgcagtggctcaagacaggacactgcggaaagccgccatgtgccgccgcacactgtctgagatctgctcagccgatctgctccggccgtagtaatccgtgaagaggccgtcagggttgagcaggtagatggcaatgragtggtccacgatgtagtcctggtcctcatccttggggcckgcattgtagtacacgcggtaactgtgactagcctgggcaacctgtttggtrgagccggtcagacccaacagtcttgggtggaagtcctggacgtagcgggccatggcttcaacgtcgtcccrctcggggtccacagtgatgaagacaggctgcactggaggcaaaccaggctctgcttccagctgccgcaccacctgcaccagcttctccagctygtctgggcagatgtcagggcagtgagt

SEQ ID NO: 828 - DNA, 2562 bp, Homo sapiens
agcaaaatggcgccagaactagtggygggctgaggacgccgtacccctcggaaggcagccctgcggtccctttgccgcccgttccctcccggacatggaggacgtggaggcgcgcttcgcccacctcttgcagcccatccgcgacctcaccaagaactgggaggtggacgtggcggcccagctggctggatcagatctgcatttcttttgacgaaggcaagaccacaatgaacttcaytgaggcagcgttgttgatccagggctctgcctgcgtctacagtaagaaggtggaatacctctactcactcgtctaccaggcccttgatttcatctctggaaagaggcgggccaagcagctctcttcggtgcaggaggacagggccaatggggttgccagctccggggtcccccaggaggcagagaatgagttcctgtcgctggatgacttccctgactcccggactaacgtggatctcaagaatgatcagacgcccagtgaggtcctcatcatccccctcctgcccatggccctggtggcccctgatgaaatggagaagaacaacaatcccctgtacagccgtcagggtgaggtcctggccagccggaaggatttcaggatgaacacgtgcgttccccaccccagaggggccttcatgttggagccagarggcatgtcccccatggaaccagcgggcgtttcccccatgccagggacccagaakgacaccgggaggactgaggagcagccaatggaagtttcygtgtgcaggagccctgtcccagcactcggcttctcccaggagccaggcccctstccagaasgcccgatgcccctgggtgggggcgaggacgaggatgcagaggaggcagtagagcttcctgaggcctcggcccccaaggccgctctggagcccaaggagtycaggagcccgcagcagagtgctgccctgcccaggaggtacatgctgcgggagcgggagggggccccagagcctgcatcctgcgtgaaggagactccagaccyctggcagagcctggacccctttgactccttggagtctaagcccttcaagaaaggtaggccttactctgtgcccccctgtgtggaggaggctctgggacagaagcgcaagaggaagggcgctgccaagctgcaggacttccaccagtggtacctggctgcctatgcagaccatgccgacagcaggcggcttcggcgaaagggtccgtcctttgcagacatggaggtcctgtactggacacacgtgaaggagcagttggaaactctccggaagctgcagaggagggaggyaaatgctttctctggacaggtggctgagcagtggctgcggcctgcagaggaggaccacctggaggattccctggaagacctgggggcagcagatgactttctagagcctgaggagtacatggagcccgagggagcagaccccagggaagccgctgaccttgacgcagtgccgatgtccctgagctacgaggagctggttcgaaggaatgtggagctcttcatcgccacctcccagaagtttgtccaggagacagagctgagccagcgcatcagggactgggaggacacagtgcagcctctgctccaggagcaggagcagcatgtgccctttgacatccacacctatggggaccagctggtctcacggttcccccagctcaatgagtggtgtccctttgcggagctggtggctggccagccggccttcgaggtgtgtcgttccatgctggcctccctgcagctggccaatgactacacagtggagataacccagcagcccgggctggagatggccgtggacaccatgtccctgagactgctcacgcaccagcgagcgcacaagcgcttccagacctacgctgccccctccatggcccagccctgagtggggagcaccgaggcaggggtgggggaatgtgtactgaggagccgtgygtctgctcctggctggcccggcctaataaagcagtgttgccatctcatcttccccctaaaaacccttttatgtacacctgcgcagagaagagggctgcctggcctccctgggccgctggtacagatcacacacacacacagattaaacgcagcccgtttaatgatggggcccagactgcagtggctcaagacaggacactgcggaaagccgccatgtgccgccgcacactgtctgagatctgctcagccgatctgctccggccgtagtaatccgtgaagaggccgtcagggttgagcaggtagatggcaatgragtggtccacgatgtagtcctggtcctcatccttggggcckgcattgtagtacacgcggtaactgtgactagcctgggcaacctgtttggtrgagccggtcagacccaacagtcttgggtggaagtcctggacgtagcgggccatggcttcaacgtcgtcccrctcggggtccacagtgatgaagacaggctgcactggaggcaaaccaggctctgcttccagctgccgcaccacctgcaccagcttctccagctygtctgggcagatgtcagggcagtgagt

SEQ ID NO: 829 - DNA, 2630 bp, Homo sapiens
agcaaaatggcgccagaactagtggygggctgaggacgccgtacccctcggaaggcagccctgcggtccctttgccgcccgttccctcccggacatggaggacgtggaggcgcgcttcgcccacctcttgcagcccatccgcgacctcaccaagaactgggaggtggacgtggcggcccagctggctggatcagatctgcatttcttttgacgaaggcaagaccacaatgaacttcaytgaggcagcgttgttgatccagggctctgcctgcgtctacagtaagaaggtggaatacctctactcactcgtctaccaggcccttgatttcatctctggaaagaggcgggccaagcagctctcttcggtgcaggaggacagggccaatggggttgccagctccggggtcccccaggaggcagagaatgagttcctgtcgctggatgacttccctgactcccggactaacgtggatctcaagaatgatcagacgcccagtgaggtcctcatcatccccctcctgcccatggccctggtggcccctgatgaaatggagaagaacaacaatcccctgtacagccgtcagggtgaggtcctggccagccggaaggatttcaggatgaacacgtgcgttccccaccccagaggggccttcatgttggagccagarggcatgtcccccatggaaccagcgggcgtttcccccatgccagggacccagaakgacaccgggaggactgaggagcagccaatggaagtttcygtgtgcaggagccctgtcccagcactcggcttctcccaggagccaggcccctstccagaasgcccgatgcccctgggtgggggcgaggacgaggatgcagaggaggcagtagagcttcctgaggcctcggcccccaaggccgctctggagcccaaggagtycaggagcccgcagcagagtgctgccctgcccaggaggtacatgctgcgggagcgggagggggccccagagcctgcatcctgcgtgaaggagactccagaccyctggcagagcctggacccctttgactccttggagtctaagcccttcaagaaaggtaggccttactctgtgcccccctgtgtggaggaggctctgggacagaagcgcaagaggaagggcgctgccaagctgcaggacttccaccagtggtacctggctgcctatgcagaccatgccgacagcaggcggcttcggcgaaagggtccgtcctttgcagacatggaggtcctgtactggacacacgtgaaggagcagttggaaactctccggaagctgcagaggagggaggyaaatgctttctctggacaggtggctgagcagtggctgcggcctgcagaggaggaccacctggaggattccctggaagacctgggggcagcagatgactttctagagcctgaggagtacatggagcccgagggagcagaccccagggaagccgctgaccttgacgcagtgccgatgtccctgagctacgaggagctggttcgaaggaatgtggagctcttcatcgccacctcccagaagtttgtccaggagacagagctgagccagcgcatcagggactgggaggacacagtgcagcctctgctccaggagcaggagcagcatgtgccctttgacatccacacctatggggaccagctggtctcacggttcccccagctcaatgagtggtgtccctttgcggagctggtggctggccagccggccttcgaggtgtgtcgttccatgctggcctccctgcagctggtgagtagcctgggatacgtgggagggggagacggtccccagaccctgctgatgtgccacccctgcaggccaatgactacacagtggagataacccagcagcccgggctggagatggccgtggacaccatgtccctgagactgctcacgcaccagcgagcgcacaagcgcttccagacctacgctgccccctccatggcccagccctgagtggggagcaccgaggcaggggtgggggaatgtgtactgaggagccgtgygtctgctcctggctggcccggcctaataaagcagtgttgccatctcatcttccccctaaaaacccttttatgtacacctgcgcagagaagagggctgcctggcctccctgggccgctggtacagatcacacacacacacagattaaacgcagcccgtttaatgatggggcccagactgcagtggctcaagacaggacactgcggaaagccgccatgtgccgccgcacactgtctgagatctgctcagccgatctgctccggccgtagtaatccgtgaagaggccgtcagggttgagcaggtagatggcaatgragtggtccacgatgtagtcctggtcctcatccttggggcckgcattgtagtacacgcggtaactgtgactagcctgggcaacctgtttggtrgagccggtcagacccaacagtcttgggtggaagtcctggacgtagcgggccatggcttcaacgtcgtcccrctcggggtccacagtgatgaagacaggctgcactggaggcaaaccaggctctgcttccagctgccgcaccacctgcaccagcttctccagctygtctgggcagatgtcagggcagtgagt

SEQ ID NO: 830 - DNA, 2040 bp, Homo sapiens
tgggattagtggattaaatccgggaaggttggacaagcacctaggacggtgcctggtgccgtgttcagcagacgtcgattccctgtccaccccttctttaggagctgtgggaaacacttcataactccccaggrtctggtgaacccttcctcccttttctgttccctgttttggcattggagatcataaaaaggctcttccatgtctcttgcttccttcctttcatcttctccaagagaaggaagtggccgcctttgttagcttgggttcagaagcttgtgtctgtcacccagggccgccyagccccggggtttgcgaaggtccggggtaggagggctgcagcctgcgcgacgcggcgggaggctacccggaggcgatgggaaggcgggcgcagtcgacccaagggtggagaagagggaaggcgaaggacgcgcgttcccgggctcgtgaccgccagcggcccggggaacccgctcccagacagactcggagagatggcaggcggaagacaccggcgcgtcgtgggcaccctccacctgctgctgctggtggccgccctgccctgggcatccaggggggtcagtccgagtgcctcagcctggccagaggagaagaattaycaccagccagccattttgaattcatcggctcttyggcaaattgcagaaggcaccagtatctctgaaatgtggcaaaatgacttacagccattgctgatagagcgatacccgggatcccctggaagctatgctgctcgtcagcacatcatgcagcgaattcagaggcttcaggctgactgggtcttggaaatagacaccttcttgagtcagacaccctatgggtaccggtctttctcaaatatcatcagcaccctcaatcccactgctaaacgacatttggtcctcgcctgccactatgactccaagtatttttcccactggaacaacasagtgtttgtaggagccactgattcagccgtgccatgtgcaatgatgttggaacttgctcgtgccttagacaagaaactcctttccttaaagactgtttcagactccaagccagatttgtcactccagctgatcttctttgatggtgaagaggcttttcttcactggtctcctcaagattctctctatgggtctcgacacttagctgcaaagatggcatcgaccccgcacccacctggagcgagaggcaccagccaactgcatggcatggatttattggtcttattggatttgattggagctccaaacccaacgtttcccaatttttttccaaactcagccaggtggttcgaaagacttcaagcaattgaacatgaacttcatgaattgggtttgctcaaggatcactctttggaggggcggtatttccagaattacagttatggaggtgtgattcaggatgaccatattccatttttaagaagaggtgttccagttctgcatctgataccgtctcctttccctraagtctggcacaccatggatgacaatgaagaaaatttggatgaatcaaccattgacaatctaaacaaaatcctacaagtctttgtgttggaatatcttcmtttgtaatactctgatttagtttakgataattggttctagaattgaattcaaaagtcaaggcatcatttaaaataatctgatttcagacaaatgctgtgtggaaacatctatcctatagatcatcctattcttatgtgtctttggttatcagatcaattacagaataattgtgttgtgatattgtgtcctaaattgctcattaatttttatttacagattgaaaaagagggaccgtgtaaagaaaatggaaaataaatatctttcaaagttcattcattcaacgatagtttctmaacagtacttaaatagcggttggaaaacgtagccttcattttatgattttttcatatgtggaaatctattacatgtaatacaaaacaaacatgtagtttgaaggcggtcagatttctttgagaaatctttgtagagttaattttatggaaattaaaatcagaattaaatgcta

SEQ ID NO: 831 - DNA, 2148 bp, Homo sapiens
tgggattagtggattaaatccgggaaggttggacaagcacctaggacggtgcctggtgccgtgttcagcagacgtcgattccctgtccaccccttctttaggagctgtgggaaacacttcataactccccaggrtctggtgaacccttcctcccttttctgttccctgttttggcattggagatcataaaaaggctcttccatgtctcttgcttccttcctttcatcttctccaagagaaggaagtggccgcctttgttagcttgggttcagaagcttgtgtctgtcacccagggccgccyagccccggggtttgcgaaggtccggggtaggagggctgcagcctgcgcgacgcggcgggaggctacccggaggcgatgggaaggcgggcgcagtcgacccaagggtggagaagagggaaggcgaaggacgcgcgttcccgggctcgtgaccgccagcggcccggggaacccgctcccagacagactcggagagatggcaggcggaagacaccggcgcgtcgtgggcaccctccacctgctgctgctggtggccgccctgccctgggcatccaggggggtcagtccgagtgcctcagcctggccagaggagaagaattaycaccagccagccattttgaattcatcggctcttyggcaaattgcagaaggcaccagtatctctgaaatgtggcaaaatgacttacagccattgctgatagagcgatacccgggatcccctggaagctatgctgctcgtcagtgagcggaggtctgaaataacctgaaccaccccctagctatgggagctttctacgttatccttagcagcacatcatgcagcgaattcagaggcttcaggctgactgggtcttggaaatagacaccttcttgagtcagacaccctatgggtaccggtctttctcaaatatcatcagcaccctcaatcccactgctaaacgacatttggtcctcgcctgccactatgactccaagtatttttcccactggaacaacasagtgtttgtaggagccactgattcagccgtgccatgtgcaatgatgttggaacttgctcgtgccttagacaagaaactcctttccttaaagactgtttcagactccaagccagatttgtcactccagctgatcttctttgatggtgaagaggcttttcttcactggtctcctcaagattctctctatgggtctcgacacttagctgcaaagatggcatcgaccccgcacccacctggagcgagaggcaccagccaactgcatggcatggatttattggtcttattggatttgattggagctccaaacccaacgtttcccaatttttttccaaactcagccaggtggttcgaaagacttcaagcaattgaacatgaacttcatgaattgggtttgctcaaggatcactctttggaggggcggtatttccagaattacagttatggaggtgtgattcaggatgaccatattccatttttaagaagaggtgttccagttctgcatctgataccgtctcctttccctraagtctggcacaccatggatgacaatgaagaaaatttggatgaatcaaccattgacaatctaaacaaaatcctacaagtctttgtgttggaatatcttcmtttgtaatactctgatttagtttakgataattggttctagaattgaattcaaaagtcaaggcatcatttaaaataatctgatttcagacaaatgctgtgtggaaacatctatcctatagatcatcctattcttatgtgtctttggttatcagatcaattacagaataattgtgttgtgatattgtgtcctaaattgctcattaatttttatttacagattgaaaaagagggaccgtgtaaagaaaatggaaaataaatatctttcaaagactcttttagataaacacgatgaggcaaaatcaggttcattcattcaacgatagtttctmaacagtacttaaatagcggttggaaaacgtagccttcattttatgattttttcatatgtggaaatctattacatgtaatacaaaacaaacatgtagtttgaaggcggtcagatttctttgagaaatctttgtagagttaattttatggaaattaaaatcagaattaaatgctatgttg

SEQ ID NO: 832 - DNA, 2080 bp, Homo sapiens
tgggattagtggattaaatccgggaaggttggacaagcacctaggacggtgcctggtgccgtgttcagcagacgtcgattccctgtccaccccttctttaggagctgtgggaaacacttcataactccccaggrtctggtgaacccttcctcccttttctgttccctgttttggcattggagatcataaaaaggctcttccatgtctcttgcttccttcctttcatcttctccaagagaaggaagtggccgcctttgttagcttgggttcagaagcttgtgtctgtcacccagggccgccyagccccggggtttgcgaaggtccggggtaggagggctgcagcctgcgcgacgcggcgggaggctacccggaggcgatgggaaggcgggcgcagtcgacccaagggtggagaagagggaaggcgaaggacgcgcgttcccgggctcgtgaccgccagcggcccggggaacccgctcccagacagactcggagagatggcaggcggaagacaccggcgcgtcgtgggcaccctccacctgctgctgctggtggccgccctgccctgggcatccaggggggtcagtccgagtgcctcagcctggccagaggagaagaattaycaccagccagccattttgaattcatcggctcttyggcaaattgcagaaggcaccagtatctctgaaatgtggcaaaatgacttacagccattgctgatagagcgatacccgggatcccctggaagctatgctgctcgtcagcacatcatgcagcgaattcagaggcttcaggctgactgggtcttggaaatagacaccttcttgagtcagacaccctatgggtaccggtctttctcaaatatcatcagcaccctcaatcccactgctaaacgacatttggtcctcgcctgccactatgactccaagtatttttcccactggaacaacasagtgtttgtaggagccactgattcagccgtgccatgtgcaatgatgttggaacttgctcgtgccttagacaagaaactcctttccttaaagactgtttcagactccaagccagatttgtcactccagctgatcttctttgatggtgaagaggcttttcttcactggtctcctcaagattctctctatgggtctcgacacttagctgcaaagatggcatcgaccccgcacccacctggagcgagaggcaccagccaactgcatggcatggatttattggtcttattggatttgattggagctccaaacccaacgtttcccaatttttttccaaactcagccaggtggttcgaaagacttcaagcaattgaacatgaacttcatgaattgggtttgctcaaggatcactctttggaggggcggtatttccagaattacagttatggaggtgtgattcaggatgaccatattccatttttaagaagaggtgttccagttctgcatctgataccgtctcctttccctraagtctggcacaccatggatgacaatgaagaaaatttggatgaatcaaccattgacaatctaaacaaaatcctacaagtctttgtgttggaatatcttcmtttgtaatactctgatttagtttakgataattggttctagaattgaattcaaaagtcaaggcatcatttaaaataatctgatttcagacaaatgctgtgtggaaacatctatcctatagatcatcctattcttatgtgtctttggttatcagatcaattacagaataattgtgttgtgatattgtgtcctaaattgctcattaatttttatttacagattgaaaaagagggaccgtgtaaagaaaatggaaaataaatatctttcaaagactcttttagataaacacgatgaggcaaaatcaggttcattcattcaacgatagtttctmaacagtacttaaatagcggttggaaaacgtagccttcattttatgattttttcatatgtggaaatctattacatgtaatacaaaacaaacatgtagtttgaaggcggtcagatttctttgagaaatctttgtagagttaattttatggaaattaaaatcagaattaaatgctatgttg

SEQ ID NO: 833 - DNA, 1672 bp, Homo sapiens
cttgggttcagaagcttgtgtctgtcacccagggccgccyagccccggggtttgcgaaggtccggggtaggagggctgcagcctgcgcgacgcggcgggaggctacccggaggcgatgggaaggcgggcgcagtcgacccaagggtggagaagagggaaggcgaaggacgcgcgttcccgggctcgtgaccgccagcggcccggggaacccgctcccagacagactcggagagatggcaggcggaagacaccggcgcgtcgtgggcaccctccacctgctgctgctggtggccgccctgccctgggcatccaggggggtcagtccgagtgcctcagcctggccagaggagaagcacatcatgcagcgaattcagaggcttcaggctgactgggtcttggaaatagacaccttcttgagtcagacaccctatgggtaccggtctttctcaaatatcatcagcaccctcaatcccactgctaaacgacatttggtcctcgcctgccactatgactccaagtatttttcccactggaacaacasagtgtttgtaggagccactgattcagccgtgccatgtgcaatgatgttggaacttgctcgtgccttagacaagaaactcctttccttaaagactgtttcagactccaagccagatttgtcactccagctgatcttctttgatggtgaagaggcttttcttcactggtctcctcaagattctctctatgggtctcgacacttagctgcaaagatggcatcgaccccgcacccacctggagcgagaggcaccagccaactgcatggcatggatttattggtcttattggatttgattggagctccaaacccaacgtttcccaatttttttccaaactcagccaggtggttcgaaagacttcaagcaattgaacatgaacttcatgaattgggtttgctcaaggatcactctttggaggggcggtatttccagaattacagttatggaggtgtgattcaggatgaccatattccatttttaagaagaggtgttccagttctgcatctgataccgtctcctttccctraagtctggcacaccatggatgacaatgaagaaaatttggatgaatcaaccattgacaatctaaacaaaatcctacaagtctttgtgttggaatatcttcmtttgtaatactctgatttagtttakgataattggttctagaattgaattcaaaagtcaaggcatcatttaaaataatctgatttcagacaaatgctgtgtggaaacatctatcctatagatcatcctattcttatgtgtctttggttatcagatcaattacagaataattgtgttgtgatattgtgtcctaaattgctcattaatttttatttacagattgaaaaagagggaccgtgtaaagaaaatggaaaataaatatctttcaaagactcttttagataaacacgatgaggcaaaatcaggttcattcattcaacgatagtttctmaacagtacttaaatagcggttggaaaacgtagccttcattttatgattttttcatatgtggaaatctattacatgtaatacaaaacaaacatgtagtttgaaggcggtcagatttctttgagaaatctttgtagagttaattttatggaaattaaaatcagaattaaatgctatgttg

SEQ ID NO: 834 - DNA, 1564 bp, Homo sapiens
cactccatggaggtgcagagataaggccccagacattttggcccagtatgggacaactttgaycgtctttttcagcttcaggactcccatggagttggaattaycaccagccagccattttgaattcatcggctcttyggcaaattgcagaaggcaccagtatctctgaaatgtggcaaaatgacttacagccattgctgatagagcgatacccgggatcccctggaagctatgctgctcgtcagcacatcatgcagcgaattcagaggcttcaggctgactgggtcttggaaatagacaccttcttgagtcagacaccctatgggtaccggtctttctcaaatatcatcagcaccctcaatcccactgctaaacgacatttggtcctcgcctgccactatgactccaagtatttttcccactggaacaacasagtgtttgtaggagccactgattcagccgtgccatgtgcaatgatgttggaacttgctcgtgccttagacaagaaactcctttccttaaagactgtttcagactccaagccagatttgtcactccagctgatcttctttgatggtgaagaggcttttcttcactggtctcctcaagattctctctatgggtctcgacacttagctgcaaagatggcatcgaccccgcacccacctggagcgagaggcaccagccaactgcatggcatggatttattggtcttattggatttgattggagctccaaacccaacgtttcccaatttttttccaaactcagccaggtggttcgaaagacttcaagcaattgaacatgaacttcatgaattgggtttgctcaaggatcactctttggaggggcggtatttccagaattacagttatggaggtgtgattcaggatgaccatattccatttttaagaagaggtgttccagttctgcatctgataccgtctcctttccctraagtctggcacaccatggatgacaatgaagaaaatttggatgaatcaaccattgacaatctaaacaaaatcctacaagtctttgtgttggaatatcttcmtttgtaatactctgatttagtttakgataattggttctagaattgaattcaaaagtcaaggcatcatttaaaataatctgatttcagacaaatgctgtgtggaaacatctatcctatagatcatcctattcttatgtgtctttggttatcagatcaattacagaataattgtgttgtgatattgtgtcctaaattgctcattaatttttatttacagattgaaaaagagggaccgtgtaaagaaaatggaaaataaatatctttcaaagactcttttagataaacacgatgaggcaaaatcaggttcattcattcaacgatagtttctmaacagtacttaaatagcggttggaaaacgtagccttcattttatgattttttcatatgtggaaatctattacatgtaatacaaaacaaacatgtagtttgaaggcggtcagatttctttgagaaatctttgtagagttaattttatggaaattaaaatcagaattaaatgctatgttg

SEQ ID NO: 835 - DNA, 2041 bp, Homo sapiens
tgggattagtggattaaatccgggaaggttggacaagcacctaggacggtgcctggtgccgtgttcagcagacgtcgattccctgtccaccccttctttaggagctgtgggaaacacttcataactccccaggrtctggtgaacccttcctcccttttctgttccctgttttggcattggagatcataaaaaggctcttccatgtctcttgcttccttcctttcatcttctccaagagaaggaagtggccgcctttgttagcttgggttcagaagcttgtgtctgtcacccagggccgccyagccccggggtttgcgaaggtccggggtaggagggctgcagcctgcgcgacgcggcgggaggctacccggaggcgatgggaaggcgggcgcagtcgacccaagggtggagaagagggaaggcgaaggacgcgcgttcccgggctcgtgaccgccagcggcccggggaacccgctcccagacagactcggagagatggcaggcggaagacaccggcgcgtcgtgggcaccctccacctgctgctgctggtggccgccctgccctgggcatccaggggggtcagtccgagtgcctcagcctggccagaggagaagaattaycaccagccagccattttgaattcatcggctcttyggcaaattgcagaaggcaccagtatctctgaaatgtggcaaaatgacttacagccattgctgatagagcgatacccgggatcccctggaagctatgctgctcgtcagcacatcatgcagcgaattcagaggcttcaggctgactgggtcttggaaatagacaccttcttgagtcagacaccctatgggtaccggtctttctcaaatatcatcagcaccctcaatcccactgctaaacgacatttggtcctcgcctgccactatgactccaagtatttttcccactggaacaacasagtgtttgtaggagccactgattcagccgtgccatgtgcaatgatgttggaacttgctcgtgccttagacaagaaactcctttccttaaagactgtttcagactccaagccagatttgtcactccagctgatcttctttgatggtgaagaggcttttcttcactggtctcctcaagattctctctatgggtctcgacacttagctgcaaagatggcatcgaccccgcacccacctggagcgagaggcaccagccaactgcatggcatggatttattggtcttattggatttgattggagctccaaacccaacgtttcccaatttttttccaaactcagccaggtggttcgaaagacttcaagcaattgaacatgaacttcatgaattgggtttgctcaaggatcactctttggaggggcggtatttccagaattacagttatggaggtgtgattcaggatgaccatattccatttttaagaagaggtgttccagttctgcatctgataccgtctcctttccctraagtctggcacaccatggatgacaatgaagaaaatttggatgaatcaaccattgacaatctaaacaaaatcctacaagtctttgtgttggaatatcttcmtttgtaatactctgatttagtttakgataattggttctagaattgaattcaaaagtcaaggcatcatttaaaataatctgatttcagacaaatgctgtgtggaaacatctatcctatagatcatcctattcttatgtgtctttggttatcagatcaattacagaataattgtgttgtgatattgtgtcctaaattgctcattaatttttatttacagattgaaaaagagggaccgtgtaaagaaaatggaaaataaatatctttcaaagagttcattcattcaacgatagtttctmaacagtacttaaatagcggttggaaaacgtagccttcattttatgattttttcatatgtggaaatctattacatgtaatacaaaacaaacatgtagtttgaaggcggtcagatttctttgagaaatctttgtagagttaattttatggaaattaaaatcagaattaaatgct

SEQ ID NO: 836 - DNA, 6529 bp, Homo sapiens
cgcagtcgggagccggccgtggtggctccgtgcgtccgagcgtccgtccgcgccgtcggccatggccaagcgctccaggggccccgggcgccgctgcctgttggcgctcgtgctgttctgcgcctgggggacgctggccgtggtggcccagaagccgggcgcagggtgtccgagccgctgcctgtgcttccgcaccaccgtgcgctgcatgcatctgctgctggaggccgtgcccgccgtggcgccgcagacctccatcctagatcttcgctttaacagaatcagagagatccaacctggggcattcaggcggctgaggaacttgaacacattgcttctcaataataatcagatcaagaggatacctagtggagcatttgaagacttggaaaatttaaaatatctctatctgtacaagaatgagatccagtcaattgacaggcaagcatttaagggacttgcctctctagagcaactatacctgcactttaatcagatagaaactttggacccagattcgttccagcatctcccgaagctcgagaggctatttttgcataacaaccggattacacatttagttccagggacatttaatcacttgraatctatgaagagattgcgactggactcaaacacacttcactgcgactgtgaaatcctgtggttggcggatttgctgaaaacctacgcggagtcggggaacgcgcaggcagcggccatctgtgaatatcccagacgcatccagggacgctcagtggcaaccatcaccccggaagagctgaactgtgaaaggccccggatcacctccgagccccaggacgcagatgtgacctcggggaacaccgtgtacttcacctgcagagccgaaggcaaccccaagcctgagatcatctggctgcgaaacaataatgagctgagcatgaagacagattcccgcctaaacttgctggacgatgggaccctgatgatccagaacacacaggagacagaccagggtatctaccagtgcatggcaaagaacgtggcyggagaggtgaagacgcaagaggtgaccctcaggtacttcgggtctccagctcgacccacttttgtaatccagccacagaatacagaggtgctggttggggagagcgtcacgctggagtgcagcgccacaggccaccccccgccgcggatctcctggacgagaggtgaccgcacacccttgccagttgacccgcgggtgaacatcacgccttctggcgggctttacatacagaacgtcgtacagggggacagcggagagtatgcgtgctctgcgaccaacaacattgacagcgtccatgccaccgctttcatcatcgtccaggctcttcctcagttcactgtgacgcctcaggacagagtcgttattgagggccagaccgtggatttccagtgtgaagccaagggcaacccgccgcccgtcatygcctggaccaagggagggagccagctctccgtggaccggcggcacctggtcctgtcatcgggaacacttagaatctctggtgttgccctccacgaccagggccagtacgaatgccaggctgtcaacatcatcggctcccagaaggtcgtggcccacctgactgtgcagcccagagtcaccccagtgtttgccagcattcccagcgacacaacagtggaggtgggcgccaatgtgcagctcccgtgcagctcccagggcgagcccgagccagccatcacctggaacaaggatggggttcaggtgacagaaagtggaaaatttcacatcagccctgaaggattcttgaccatcaatgacgttggccctgcagacgcaggtcgctatgagtgtgtggcccggaacaccattgggtcggcctcggtgagcatggtgctcagtgtgaaygttcctgacgtcagtcgaaatggagatccgtttgtagctacctccatcgtggaagcgattgcgactgttgacagagctataaactcaacccgaacacatttgtttgacagccgtcctcgttctccaaatgatttgctggccttgttccggtatccgagggatccttacacagttgaacaggcacgggcgggagaaatctttgaacggacattgcagctcattcaggagcatgtacagcatggcttgatggtcgacctcaacggaacaagttaccactacaacgacctggtgtctccacagtacctgaacctcatcgcaaacctgtcgggctgtaccgcccaccggcgcgtgaacaactgctcggacatgtgcttccaccagaagtaccggacgcacgacggcacctgtaacaacctgcagcaccccatgtggggcgcctcgctgaccgccttcgagcgcctgctgaaatccgtgtacgagaatggcttcaacacccctcggggcatcaacccccaccgactgtacaacgggcacgcccttcccatgccgcgcctggtgtccaccaccctgatcgggacggagaccgtcacacccgacgagcagttcacccacatgctgatgcagtggggccagttcctggaccacgacctcgactccacggtggtggccctgagccaggcacgcttctccgacggacagcactgcagcaacgtgtgcagcaacgaccccccctgcttctctgtcatgatcccccccaatgactcccgggccaggagcggggcccgctgcatgttcttcgtgcgctccagccctgtgtgcggcagyggcatgacttcgctgctcatgaactccgtgtacccgcgggagcagatcaaccagctcacctcctacatmgacgcatccaacgtgtacgggagcacggagcatgaggcccgcagcatccgcgacctggccagccaccgcggcctgctgcggcagggcatcgtgcagcggtccgggaagccgctgctccccttcgccaccgggccgcccacggagtgcatgcgggacgagaaygagagccccatcccctgcttcctggccggggaccaccgcgccaacgagcagctgggcctgaccagcatgcacacgctgtggttccgcgagcacaaccgcattgccacggagctgctcaagctgaacccgcactgggacggcgacaccatctactatgagaccaggaagatcgtgggtgcggagatccagcacatcacctaycagcactggctcccgaagatcctgggggaggtgggcatgaggacgctgrgagagtaccacggctacgaccccggcatcaatgctggcatcttcaacgccttcgccaccgcggccttcaggtttggccacacgcttgtcaacccactgctttaccggctggacgagaacttccagcccattgcacaagatcacctcccccttcacaaagctttcttctctcccttccggattgtgaatgagggcggcatcgatccgcttctcagggggctgttcggggtggcggggaaaatgcgtgtgccctcgcagctgctgaacacggagctcacggagcggctgttctccatggcacacacggtggctctggacctggcggccatcaacatccagcggggccgggaccacgggatcccaccctaccacgactacagggtctactgcaatctatcggcggcacacacgttcgaggacctgaaaaatgagattaaaaaccctgagatccgggagaaactgaaaaggttgtatggctckacactcaacatcgacctgtttccggcgctcgtggtggaggacctggtgcctggcagccggctgggccccaccctgatgtgtcttctcagcacacagttcaagcgcctgcgagatggggacaggttgtggtatgagaaccctggggtgttctccccggcccagctgactcagatcaagcagacgtcgctggccaggatcctatgcgacaacgcggacaacatcacccgggtgcagagcgacgtgttcagggtggcggagttccctcacggctacggcagctgtgacgagatccccagggtggacctccgggtgtggcaggactgctgtgaagactgtaggaccagggggcagttcaatgccttttcctatcatttccgaggcagacggtctcttgagttcagctaccaggaggacaagccgaccaagaaaacaagaccacggaaaatacccagtgttgggagacaggrggaacatctcagcaacagcacctcagccttcagcayacgctcagatgcatctgggacaaatgacttcagagagtttgttctggaaatgcagaagaccatcacagacctcagaacacagataaagaaacttgaatcacggctcagtaccacagagtgcgtggatgccgggggcgaatctcacgccaacaacaccaagtggaaaaargatgcatgcaccatttgtgaatgcaaagacgggcaggtcacctgcttcgtggaagcttgcccccctgccacctgtgctgtccccgtgaacatcccaggggcctgctgtccagtctgcttacagaagagggcggaggaaaagccctaggctcctgggaggctcckcagagtttgtctgctgtgccatcgtgagatcgggtggccgatggcagggagctgcggactgcagaccaggaaacacccagaactcgtgacatttcatgacaacgtccagctggtgctgttacagaaggcagtgcaggaggcttccaaccagagcatctgcggagaaggaggcacagcaggtgcctgaagggaagcaggcaggagtcctagcttcacgttagacttctcaggtttttatttaattcttttaaaatgaaaaattggtgctactattaaattgcacagttgaatcatttaggcgcctaaattgrttttgcctcccaacaccatttctttttaaataaagcaggatacctctatatgtcagccttgccttgttcagatgccaggagccggcagacctgtcacccgcaggtggggtgagtctyggagctgccagaggggctcaccgaaatcggggttccatcacaagctatgtttaaaaagaaaattggtgtttggcaaacggaacagaacctttgatgagagcgttcacagggacactgtctgggggtgcagtgcaagcccccggcctcttccctgggaacctctgaactcctccttcctctgggctctctgtaacatttcaccacacgtcagcatctaatcccaagacaaacattcccgctgctcgaagcagctgtatagcctgtgactctccgtgtgtcagctccttccacacytgattagaacattcataagccacatttagaaacagrtttgctttcagctgtcacttgcacacatactgcctagttgtgaaccaaatsgtgtgtgttgacaacgccgctcccagccggccctggttgcgtccacgtcctgaacaagagccgcttccggatggctcttcccaagggaggaggagctcaagtgtcgggaactgtctaacttcaggttgtgtgagtgcgttaaaaaaaaaaaaaaaaaaagaatccctatacctcatttgtatttttaaaatgcgtgatgttttatgaaattgtgtccattttttaggtattagatatggcagaaaaaccatttccactatgcaaagttcttttagacgtcagtgaaaatcaactctcatacctcatggtctctctttaattgaccaaaaccttccatttttctctaaatacaaagcgatctgtgttctgagcaacctttccccgaacacacagcttcagtgcagcacgctgacctgagtatccaccatgtgccaggcacagtgctgggcacacgaggcaccaaggtccgggccacctgcccgcagcaaggcccagctgaggtggtggagggagcccctgaggtcaggggccgtttcggttcagggtggcaggtgtccagcactggggtatggcgtcgaggcttccatggggtgggggaggccagcttccttctgacaggatgggcgcatacagtgcctggtgtgatttgtgcacaacccgtgttccaggtgcacatcctcccaaggagacacccagacccttccagcacgggccggccaagttgctgcggcggaggcagcatttcagctgtgaggaaggtcattggattcatgtgttttatctgtaaaaatggttgtcttaacttcttaacctcatattggtaagtgattgataaaaattggttggtgtttcatgacatgtggacttcttttgaaatagcaagtcaaatgtagtgaccaaattgtggaagagatttcaaaaaaaattctgtaattcaaaccaaaatgtctgcggaatcaccagtttratactctctgtaatcagaacagtgggcagtgcctgggtgaacgtgtctagcagccactgtgcgggatcgctgtaacaggagtggaatgtacatatttatttacttttctaactgctccaacagccaaatgccttttttatgaccattgtattcagttcattaccaaagaaatgtttgcactttgtaatgatgcctttcagttcaaataaatgggtcacattttcaaatggagaat

SEQ ID NO: 837 - DNA, 6823 bp, Homo sapiens
cgcagtcgggagccggccgtggtggctccgtgcgtccgagcgtccgtccgcgccgtcggccatggccaagcgctccaggggccccgggcgccgctgcctgttggcgctcgtgctgttctgcgcctgggggacgctggccgtggtggcccagaagccgggcgcagggtgtccgagccgctgcctgtgcttccgcaccaccgtgcgctgcatgcatctgctgctggaggccgtgcccgccgtggcgccgcagacctccatcctagatcttcgctttaacagaatcagagagatccaacctggggcattcaggcggctgaggaacttgaacacattgcttctcaataataatcagatcaagaggatacctagtggagcatttgaagacttggaaaatttaaaatatctctatctgtacaagaatgagatccagtcaattgacaggcaagcatttaagggacttgcctctctagagcaactatacctgcactttaatcagatagaaactttggacccagattcgttccagcatctcccgaagctcgagaggctatttttgcataacaaccggattacacatttagttccagggacatttaatcacttgraatctatgaagagattgcgactggactcaaacacacttcactgcgactgtgaaatcctgtggttggcggatttgctgaaaacctacgcggagtcggggaacgcgcaggcagcggccatctgtgaatatcccagacgcatccagggacgctcagtggcaaccatcaccccggaagagctgaactgtgaaaggccccggatcacctccgagccccaggacgcagatgtgacctcggggaacaccgtgtacttcacctgcagagccgaaggcaaccccaagcctgagatcatctggctgcgaaacaataatgagctgagcatgaagacagattcccgcctaaacttgctggacgatgggaccctgatgatccagaacacacaggagacagaccagggtatctaccagtgcatggcaaagaacgtggcyggagaggtgaagacgcaagaggtgaccctcaggtacttcgggtctccagctcgacccacttttgtaatccagccacagaatacagaggtgctggttggggagagcgtcacgctggagtgcagcgccacaggccaccccccgccgcggatctcctggacgagaggtgaccgcacacccttgccagttgacccgcgggtgaacatcacgccttctggcgggctttacatacagaacgtcgtacagggggacagcggagagtatgcgtgctctgcgaccaacaacattgacagcgtccatgccaccgctttcatcatcgtccaggctcttcctcagttcactgtgacgcctcaggacagagtcgttattgagggccagaccgtggatttccagtgtgaagccaagggcaacccgccgcccgtcatygcctggaccaagggagggagccagctctccgtggaccggcggcacctggtcctgtcatcgggaacacttagaatctctggtgttgccctccacgaccagggccagtacgaatgccaggctgtcaacatcatcggctcccagaaggtcgtggcccacctgactgtgcagcccagagtcaccccagtgtttgccagcattcccagcgacacaacagtggaggtgggcgccaatgtgcagctcccgtgcagctcccagggcgagcccgagccagccatcacctggaacaaggatggggttcaggtgacagaaagtggaaaatttcacatcagccctgaaggattcttgaccatcaatgacgttggccctgcagacgcaggtcgctatgagtgtgtggcccggaacaccattgggtcggcctcggtgagcatggtgctcagtgtgaaygttcctgacgtcagtcgaaatggagatccgtttgtagctacctccatcgtggaagcgattgcgactgttgacagagctataaactcaacccgaacacatttgtttgacagccgtcctcgttctccaaatgatttgctggccttgttccggtatccgagggatccttacacagttgaacaggcacgggcgggagaaatctttgaacggacattgcagctcattcaggagcatgtacagcatggcttgatggtcgacctcaacggaacaagttaccactacaacgacctggtgtctccacagtacctgaacctcatcgcaaacctgtcgggctgtaccgcccaccggcgcgtgaacaactgctcggacatgtgcttccaccagaagtaccggacgcacgacggcacctgtaacaacctgcagcaccccatgtggggcgcctcgctgaccgccttcgagcgcctgctgaaatccgtgtacgagaatggcttcaacacccctcggggcatcaacccccaccgactgtacaacgggcacgcccttcccatgccgcgcctggtgtccaccaccctgatcgggacggagaccgtcacacccgacgagcagttcacccacatgctgatgcagtggggccagttcctggaccacgacctcgactccacggtggtggccctgagccaggcacgcttctccgacggacagcactgcagcaacgtgtgcagcaacgaccccccctgcttctctgtcatgatcccccccaatgactcccgggccaggagcggggcccgctgcatgttcttcgtgcgctccagccctgtgtgcggcagyggcatgacttcgctgctcatgaactccgtgtacccgcgggagcagatcaaccagctcacctcctacatmgacgcatccaacgtgtacgggagcacggagcatgaggcccgcagcatccgcgacctggccagccaccgcggcctgctgcggcagggcatcgtgcagcggtccgggaagccgctgctccccttcgccaccgggccgcccacggagtgcatgcgggacgagaaygagagccccatcccctgcttcctggccggggaccaccgcgccaacgagcagctgggcctgaccagcatgcacacgctgtggttccgcgagcacaaccgcattgccacggagctgctcaagctgaacccgcactgggacggcgacaccatctactatgagaccaggaagatcgtgggtgcggagatccagcacatcacctaycagcactggctcccgaagatcctgggggaggtgggcatgaggacgctgrgagagtaccacggctacgaccccggcatcaatgctggcatcttcaacgccttcgccaccgcggccttcaggtttggccacacgcttgtcaacccactgctttaccggctggacgagaacttccagcccattgcacaagatcacctcccccttcacaaagctttcttctctcccttccggattgtgaatgagggcggcatcgatccgcttctcagggggctgttcggggtggcggggaaaatgcgtgtgccctcgcagctgctgaacacggagctcacggagcggctgttctccatggcacacacggtggctctggacctggcggccatcaacatccagcggggccgggaccacgggatcccaccctaccacgactacagggtctactgcaatctatcggcggcacacacgttcgaggacctgaaaaatgagattaaaaaccctgagatccgggagaaactgaaaaggttgtatggctckacactcaacatcgacctgtttccggcgctcgtggtggaggacctggtgcctggcagccggctgggccccaccctgatgtgtcttctcagcacacagttcaagcgcctgcgagatggggacaggttgtggtatgagaaccctggggtgttctccccggcccagctgactcagatcaagcagacgtcgctggccaggatcctatgcgacaacgcggacaacatcacccgggtgcagagcgacgtgttcagggtggcggagttccctcacggctacggcagctgtgacgagatccccagggtggacctccgggtgtggcaggactgctgtgaagactgtaggaccagggggcagttcaatgccttttcctatcatttccgaggcagacggtctcttgagttcagctaccaggaggacaagccgaccaagaaaacaagaccacggaaaatacccagtgttgggagacaggrggaacatctcagcaacagcacctcagccttcagcayacgctcagatgcatctgggacaaatgacttcagagagtttgttctggaaatgcagaagaccatcacagacctcagaacacagataaagaaacttgaatcacggctcagtaccacagagtgcgtggatgccgggggcgaatctcacgccaacaacaccaagtggaaaaargatgcatgcaccatttgtgaatgcaaagacgggcaggtcacctgcttcgtggaagcttgcccccctgccacctgtgctgtccccgtgaacatcccaggggcctgctgtccagtctgcttacagaagagggcggaggaaaagccctaggctcctgggaggctcckcagagtttgtctgctgtgccatcgtgagatcgggtggccgatggcagggagctgcggactgcagaccaggaaacacccagaactcgtgacatttcatgacaacgtccagctggtgctgttacagaaggcagtgcaggaggcttccaaccagagcatctgcggagaaggaggcacagcaggtgcctgaagggaagcaggcaggagtcctagcttcacgttagacttctcaggtttttatttaattcttttaaaatgaaaaattggtgctactattaaattgcacagttgaatcatttaggcgcctaaattgrttttgcctcccaacaccatttctttttaaataaagcaggatacctctatatgtcagccttgccttgttcagatgccaggagccggcagacctgtcacccgcaggtggggtgagtctyggagctgccagaggggctcaccgaaatcggggttccatcacaagctatgtttaaaaagaaaattggtgtttggcaaacggaacagaacctttgatgagagcgttcacagggacactgtctgggggtgcagtgcaagcccccggcctcttccctgggaacctctgaactcctccttcctctgggctctctgtaacatttcaccacacgtcagcatctaatcccaagacaaacattcccgctgctcgaagcagctgtatagcctgtgactctccgtgtgtcagctccttccacacytgattagaacattcataagccacatttagaaacagrtttgctttcagctgtcacttgcacacatactgcctagttgtgaaccaaatgtgaaaaaacctccttcatcccattgtgtatctgatacctgccgagggccaagsgtgtgtgttgacaacgccgctcccagccggccctggttgcgtccacgtcctgaacaagagccgcttccggatggctcttcccaagggaggaggagctcaagtgtcgggaactgtctaacttcaggttgtgtgagtgcgttaaaaaaaaaaaaaaaaaaagaatccctatacctcatttgtatttttaaaatgcgtgatgttttatgaaattgtgtccattttttaggtattagatatggcagaaaaaccatttccactatgcaaagttcttttagacgtcagtgaaaatcaactctcatacctcatggtctctctttaattgaccaaaaccttccatttttctctaaatacaaagcgatctgtgttctgagcaacctttccccgaacacacagcttcagtgcagcacgctgacctgagtatccaccatgtgccaggcacagtgctgggcacacgaggcaccaaggtccgggccacctgcccgcagcaaggcccagctgaggtggtggagggagcccctgaggtcaggggccgtttcggttcagggtggcaggtgtccagcactggggtatggcgtcgaggcttccatggggtgggggaggccagcttccttctgacaggatgggcgcatacagtgcctggtgtgatttgtgcacaacccgtgttccaggtgcacatcctcccaaggagacacccagacccttccagcacgggccggccaagttgctgcggcggaggcagcatttcagctgtgaggaaggtcattggattcatgtgttttatctgtaaaaatggttgtcttaacttcttaacctcatattggtaagtgattgataaaaattggttggtgtttcatgacatgtggacttcttttgaaatagcaagtcaaatgtagtgaccaaattgtggaagagatttctgtcaaataggaaatgtgtaagttcgtctaaaagctgatggttatgtaagttgctcaggcactcagatgacagcagattctgggttctgggagtgttctgtgcctcttacatgccctggaggcctcatggtctcagtgctgaggcggcacacctgtagcacacctgcgtaatgtgcggtctgggccagtcacaaggaattgtgttgtctaagccaaagggggaagctgactgtgatttaccaaaaaaaattctgtaattcaaaccaaaatgtctgcggaatcaccagtttratactctctgtaatcagaacagtgggcagtgcctgggtgaacgtgtctagcagccactgtgcgggatcgctgtaacaggagtggaatgtacatatttatttacttttctaactgctccaacagccaaatgccttttttatgaccattgtattcagttcattaccaaagaaatgtttgcactttgtaatgatgcctttcagttcaaataaatgggtcacattttcaaatggagaat

SEQ ID NO: 838 - DNA, 5410 bp, Homo sapiens
cactgggtaggtttgaatttgttttgttttcaaaaattaaacaaatgatccttcagcatcatcgcctccgctgctttatcaggtcgcatagggcatggagctggagaactataaacagcccgtggtgctgagagaggacaactgycgaaggcgccggaggatgaagccgcgcagtgctgcggccagcctgtcctccatggagctcatccccatcgagttcgtgctgcccaccagccagcgcaaatgcaagagccccgaaacggcgctgctgcacgtggccggccacggcaacgtggagcagatgaaggcccaggtgtggctgcgagcgctggagaccagcgtggcggcggacttctaccaccggctgggaccgcatcacttcctcctgctctatcagaagaaggggcagtggtacgagatctacgacaagtaccaggtggtgcagactctggactgcctgcgctactggaaggccacgcaccggagcccgggccagatccacctggtgcagcggcacccgccctccgaggagtcccaagccttccagcggcagctcacggcgctgattggctatgacgtcactgacgtcagcaacgtgcacgacgatgagctggagttcacgcgccgtggcttggtgaccccgcgcatggcggaggtggccagccgcgaccccaagctctacgccatgcacccgtgggtgacgtccaagcccctcccggagtacctgtggaagaagattgccaacaactgcatcttcatcgtcattcaccgcagcaccaccagccagaccattaaggtctcacccgacgacacccccggcgccatcctgcagagcttcttcaccaagatggccaagaagaaatctctgatggatattcccgaaagccaaagcgaacaggattttgtgctgcgcgtctgtggccgggatgagtacctggtgggcgaaacgcccatcaaaaacttccagtgggtgaggcactgcctcaagaacggagaagagattcacgtggtactggacacgcctccagacccggccctagacgaggtgaggaaggaagagtggccrctggtggaygactgcaygggagtcaccggctaccatgagcagcttaccatccacggcaaggaccacgagagtgtgttcaccgtgtccctgtgggactgckaccgcaagttcagggtcaagatcagaggcattgatatccccgtcctgcctcggaacaccgacctcacagtttttgtagaggcaaacatccagcatgggcaacaagtcctttgccaaaggagaaccagccccaaacccttcacagaggaggtgctgtggaatgtgtggcttgagttcagtatcaaaatcaaagacttgcccaaaggggctctactgaacctccagatctactgcggtaaagctccagcactgtmcagcaaggcctctgcagagtcccccagttctgagtccaagggcaaagttcagcttctctattatgtgaacctgctgctgatagaccaccgtttcctcctgcgccgtggagaatacgtcctccacatgtggcagatatctgggaagggagaagaccaaggaagcttcaatgctgacaaactcacgtctgcaactaacccagacaaggagaactcaatgtccatctccattcttctggacarttactgccacccgatagccctgcctaagcatcagcccacccctgacccggaaggggaccgggttcgagcagaaatgcccaaccagcttcgcaagcaattggaggcgatcatagccactgatccacttaaccctctcacagcagaggacaaagaattgctctggcattttagatacgaaagccttaagcacccaaaagcatatcctaagctatttagttcagtgaaatggggacagcaagaaattgtggccaaaacataccaattgttggccagaagggaagtctgggatcaaagtgctttggatgttgggttaacaatgcagctcctggactgcaacttctcagatgaaaatgtaagagccrttgcagttcagaaactggagagcttggaggacgatgatgttctgcattaccttctacaattggtccaggctgtgaaatttgaaccataccatgatagygcccttgccagatttctgctgaagcgtggtttaagaaacaaaagaattggtcactttttgttttggttcttgagaagtgagatagcccagtccagacactatcagcagaggttcgctgtgattctggaagcctatctgaggggctgtggcacagccatgctgcacgactttacccaacaagtccaagtaatcgagatgttacaaaaagtcacccttgatattaaatcgctctctgctgaaaagtatgacgtcagttcccaagttatttcacaacttaaacaaaagcttgaaaacctgcagaattctcaactccccgaaagctttagagttccatatgatcctggactgaaagcaggagcgctggcaattgaaaaatgtaaagtaatggcctccaagaaaaaaccactatggcttgagtttaaatgtgccgatcctacagccctatcaaatgaaacaattggaattatctttaaacatggtgatgatctgcgccaagacatgcttattttacagattctacgaatcatggagtctatttgggagactgaatctttggatctatgcctcctgccatatggttgcatttcaactggtgacaaaataggaatgatcgagattgtgaaagacgccacgacaattgccaaaattcagcaaagcacagtgggcaacacgggagcatttaaagatgaagtcctgaatcactggctcaaagaaaaatcccctactgaagaaaagtttcaggcagcagtggagagatttgtttattcctgtgcaggctactgtgtggcaacctttgttcttggaataggcgacagacacaatgacaatattatgatcaccgagacaggaaacctatttcatattgacttcgggcacattcttgggaattacaaaagtttcctgggcattaataaagagagagtgccatttgtgctaacccctgacttcctctttgtgatgggaacttctggaaagaagacaagcccacacttccagaaatttcaggacatctgtgttaaggcttatctagcccttcgtcatcacacaaacctactgatcatcctgttctccatgatgctgatgacaggaatgccccagttaacaagcaaagaagacattgaatatatccgggatgccctcacagtggggaaaaatgaggaggatgctaaaaagtattttcttgatcagatcgaagtttgcagagacaaaggatggactgtgcagtttaattggtttctacatcttgttcttggcatcaaacaaggagagaaacattcagcctaatactttaggctagaatcaaraacaagttagtgttctrtggtttaaattagcatagcaatcatcgaacttggatttcaaatgcaatagacattgtgaaagctggcatttcagaagtatagctcttttcctacctgaactcttccctggagaaaagatgttggcattgctgattgtttggttaagcaatgtccagtgctaggattatttgcaggtttggttttttctcatttgtctgtggcattggagaatattctyggtttaaacagactaatgacttccttattgtccctgatattttgactatcttactattgagtgcttctggaaattctttggaataattgatgacatctattttcatctgggtttagtctcaattttggttatctttgtgttcctcaagctctttaaagaaaaagatgtaatcgttgtaacctttgtctcattccttaaatgatgcttccaaacatckccttagtgtctgcaggtgttagtggtgtgctaaaagcaaggaaagcgagttagtcttttcagtgtcttttgcarttcaattcttttgtcatgtataactgagacacacaaacacagcaggagaaatctaaaccgttgtgccttgaccttcctctgctggtcttgttccagggttatgaatatgaaaaaatagagatgagactttttgtgtcaactctgtccacaagagtgagttatctagtatgattagtatagctttctccagcatggcagcaggaagtaactacagggcctcttttatgcctgacatttcttcccttcctttttccctgcctccctttttcatcaattgcratgctcccacaactctttacagacttgtgaaatcttcaagaacacctttactctataactcaaaaattagttgaaaaataattacttctcaaggattattagaatcttaggtacttatttgtaaagatgtttagtgacttttttttcaagtatcttattaaaggaggcattctagaaaatatgaattagtttccaaatgccttaattttaaactttggcctgaacagttttttctttttcttaatggaagaagatatttaatatcttaaaaatattccaagttaggaagaacactacttgccttatccatttcccatttaaaggacttttaaactttgacacatccttcagatttcctgaaaatmmttgaaatatcttactttaaaaatattttcatctctgaaatatctcgttatttattggaggtattgtttaaccttagakagaccattaaattatttataaaatattttgtaattacctgtagctaatacattacatagaaaaaaactatgttaacagtgtctctgtttaagtataatcagatataaatatatacttaattttttaattttaaaaatagatacctgtttgactttgaggtagtccagrccttttctytttttttttttttttaatgkgtgcaaaagcccaaaggttcctaagcctggctgcaaagaagaatcaacagggacactttttaaaaacactcttatcagcctgggcaacacagtgagactccatctcttaaaaaaaaaattagctgggtatagtggtatgtgcctgtagtcccaggtactcaggaggctgasgcaggaggattgcctgagcccaggaggtggaaactgcagagagtcatgatcatgtccttacactccagcctggataacagagcgagaccctgtctcaaaaaaataaaataaaaaataaaaacacccttgcctgcgctccattcccaggttataatttaattactgtgggatgagacccagacatcaatatttttctagattcttcaggtgattctaattcacagccagagttggaagccctgcgtggcctttgaaggtctagatgattcttcttccttgccctttgagcttttccccatctcacaggtatctagaaaaaaactcctcttctttggcaacctgtccttttaaaatcacactctacccacct

SEQ ID NO: 839 - DNA, 5626 bp, Homo sapiens
gcacttccttctcggctagattatctgaaactgttgtcggttcttgagatgatactaccaccgaatgtctgtgtttcattgtctagtccaacctgtattgtggatatctacaacgttccggcaatagttttgcaggtgcatcacatttttgtttttgttttgggaggaaaagggagggcacggcagccaggcttcatattcctacaagtgcatgcttcaagattactgtacttacagtgtttccaacatcttctcataaaaggggaaagcttcatagcctcaaccatgaaggaaaccagtcgcatagggcatggagctggagaactataaacagcccgtggtgctgagagaggacaactgycgaaggcgccggaggatgaagccgcgcagtgctgcggccagcctgtcctccatggagctcatccccatcgagttcgtgctgcccaccagccagcgcaaatgcaagagccccgaaacggcgctgctgcacgtggccggccacggcaacgtggagcagatgaaggcccaggtgtggctgcgagcgctggagaccagcgtggcggcggacttctaccaccggctgggaccgcatcacttcctcctgctctatcagaagaaggggcagtggtacgagatctacgacaagtaccaggtggtgcagactctggactgcctgcgctactggaaggccacgcaccggagcccgggccagatccacctggtgcagcggcacccgccctccgaggagtcccaagccttccagcggcagctcacggcgctgattggctatgacgtcactgacgtcagcaacgtgcacgacgatgagctggagttcacgcgccgtggcttggtgaccccgcgcatggcggaggtggccagccgcgaccccaagctctacgccatgcacccgtgggtgacgtccaagcccctcccggagtacctgtggaagaagattgccaacaactgcatcttcatcgtcattcaccgcagcaccaccagccagaccattaaggtctcacccgacgacacccccggcgccatcctgcagagcttcttcaccaagatggccaagaagaaatctctgatggatattcccgaaagccaaagcgaacaggattttgtgctgcgcgtctgtggccgggatgagtacctggtgggcgaaacgcccatcaaaaacttccagtgggtgaggcactgcctcaagaacggagaagagattcacgtggtactggacacgcctccagacccggccctagacgaggtgaggaaggaagagtggccrctggtggaygactgcaygggagtcaccggctaccatgagcagcttaccatccacggcaaggaccacgagagtgtgttcaccgtgtccctgtgggactgckaccgcaagttcagggtcaagatcagaggcattgatatccccgtcctgcctcggaacaccgacctcacagtttttgtagaggcaaacatccagcatgggcaacaagtcctttgccaaaggagaaccagccccaaacccttcacagaggaggtgctgtggaatgtgtggcttgagttcagtatcaaaatcaaagacttgcccaaaggggctctactgaacctccagatctactgcggtaaagctccagcactgtmcagcaaggcctctgcagagtcccccagttctgagtccaagggcaaagttcagcttctctattatgtgaacctgctgctgatagaccaccgtttcctcctgcgccgtggagaatacgtcctccacatgtggcagatatctgggaagggagaagaccaaggaagcttcaatgctgacaaactcacgtctgcaactaacccagacaaggagaactcaatgtccatctccattcttctggacarttactgccacccgatagccctgcctaagcatcagcccacccctgacccggaaggggaccgggttcgagcagaaatgcccaaccagcttcgcaagcaattggaggcgatcatagccactgatccacttaaccctctcacagcagaggacaaagaattgctctggcattttagatacgaaagccttaagcacccaaaagcatatcctaagctatttagttcagtgaaatggggacagcaagaaattgtggccaaaacataccaattgttggccagaagggaagtctgggatcaaagtgctttggatgttgggttaacaatgcagctcctggactgcaacttctcagatgaaaatgtaagagccrttgcagttcagaaactggagagcttggaggacgatgatgttctgcattaccttctacaattggtccaggctgtgaaatttgaaccataccatgatagygcccttgccagatttctgctgaagcgtggtttaagaaacaaaagaattggtcactttttgttttggttcttgagaagtgagatagcccagtccagacactatcagcagaggttcgctgtgattctggaagcctatctgaggggctgtggcacagccatgctgcacgactttacccaacaagtccaagtaatcgagatgttacaaaaagtcacccttgatattaaatcgctctctgctgaaaagtatgacgtcagttcccaagttatttcacaacttaaacaaaagcttgaaaacctgcagaattctcaactccccgaaagctttagagttccatatgatcctggactgaaagcaggagcgctggcaattgaaaaatgtaaagtaatggcctccaagaaaaaaccactatggcttgagtttaaatgtgccgatcctacagccctatcaaatgaaacaattggaattatctttaaacatggtgatgatctgcgccaagacatgcttattttacagattctacgaatcatggagtctatttgggagactgaatctttggatctatgcctcctgccatatggttgcatttcaactggtgacaaaataggaatgatcgagattgtgaaagacgccacgacaattgccaaaattcagcaaagcacagtgggcaacacgggagcatttaaagatgaagtcctgaatcactggctcaaagaaaaatcccctactgaagaaaagtttcaggcagcagtggagagatttgtttattcctgtgcaggctactgtgtggcaacctttgttcttggaataggcgacagacacaatgacaatattatgatcaccgagacaggaaacctatttcatattgacttcgggcacattcttgggaattacaaaagtttcctgggcattaataaagagagagtgccatttgtgctaacccctgacttcctctttgtgatgggaacttctggaaagaagacaagcccacacttccagaaatttcaggacatctgtgttaaggcttatctagcccttcgtcatcacacaaacctactgatcatcctgttctccatgatgctgatgacaggaatgccccagttaacaagcaaagaagacattgaatatatccgggatgccctcacagtggggaaaaatgaggaggatgctaaaaagtattttcttgatcagatcgaagtttgcagagacaaaggatggactgtgcagtttaattggtttctacatcttgttcttggcatcaaacaaggagagaaacattcagcctaatactttaggctagaatcaaraacaagttagtgttctrtggtttaaattagcatagcaatcatcgaacttggatttcaaatgcaatagacattgtgaaagctggcatttcagaagtatagctcttttcctacctgaactcttccctggagaaaagatgttggcattgctgattgtttggttaagcaatgtccagtgctaggattatttgcaggtttggttttttctcatttgtctgtggcattggagaatattctyggtttaaacagactaatgacttccttattgtccctgatattttgactatcttactattgagtgcttctggaaattctttggaataattgatgacatctattttcatctgggtttagtctcaattttggttatctttgtgttcctcaagctctttaaagaaaaagatgtaatcgttgtaacctttgtctcattccttaaatgatgcttccaaacatckccttagtgtctgcaggtgttagtggtgtgctaaaagcaaggaaagcgagttagtcttttcagtgtcttttgcarttcaattcttttgtcatgtataactgagacacacaaacacagcaggagaaatctaaaccgttgtgccttgaccttcctctgctggtcttgttccagggttatgaatatgaaaaaatagagatgagactttttgtgtcaactctgtccacaagagtgagttatctagtatgattagtatagctttctccagcatggcagcaggaagtaactacagggcctcttttatgcctgacatttcttcccttcctttttccctgcctccctttttcatcaattgcratgctcccacaactctttacagacttgtgaaatcttcaagaacacctttactctataactcaaaaattagttgaaaaataattacttctcaaggattattagaatcttaggtacttatttgtaaagatgtttagtgacttttttttcaagtatcttattaaaggaggcattctagaaaatatgaattagtttccaaatgccttaattttaaactttggcctgaacagttttttctttttcttaatggaagaagatatttaatatcttaaaaatattccaagttaggaagaacactacttgccttatccatttcccatttaaaggacttttaaactttgacacatccttcagatttcctgaaaatmmttgaaatatcttactttaaaaatattttcatctctgaaatatctcgttatttattggaggtattgtttaaccttagakagaccattaaattatttataaaatattttgtaattacctgtagctaatacattacatagaaaaaaactatgttaacagtgtctctgtttaagtataatcagatataaatatatacttaattttttaattttaaaaatagatacctgtttgactttgaggtagtccagrccttttctytttttttttttttttaatgkgtgcaaaagcccaaaggttcctaagcctggctgcaaagaagaatcaacagggacactttttaaaaacactcttatcagcctgggcaacacagtgagactccatctcttaaaaaaaaaattagctgggtatagtggtatgtgcctgtagtcccaggtactcaggaggctgasgcaggaggattgcctgagcccaggaggtggaaactgcagagagtcatgatcatgtccttacactccagcctggataacagagcgagaccctgtctcaaaaaaataaaataaaaaataaaaacacccttgcctgcgctccattcccaggttataatttaattactgtgggatgagacccagacatcaatatttttctagattcttcaggtgattctaattcacagccagagttggaagccctgcgtggcctttgaaggtctagatgattcttcttccttgccctttgagcttttccccatctcacaggtatctagaaaaaaactcctcttctttggcaacctgtccttttaaaatcacactctacccacct

SEQ ID NO: 840 - DNA, 3287 bp, Homo sapiens
ggtgcaatacctgccttgcgtcgcccgtgccgctccagccaccgtcaaatccgggtagcgacccggggcgtttgcagcggtgccgaggaagaggacgggaacggtgttacgattgcctgcgtttaggaggtggctgcgttgtgggaaaagctatcaaggaagaaattgccaaaccatgtctttttttctgttttcagagtagttcacaacagatctgagtgttttaattaagcatggaatacagaaaacaacaaaaaacttaagctttaatttcatctggaattccacagttttcttagctccctggacccggttgacctgttggctcttcccgctggctgctctatcacgtggtgctctccgactactcaccccgagtgtaaagaaccttcrgctcgcgtgcttctgagctgctgtggatggcctcggctctctggactgtccttccgagtaggatgtcactgagatccctcaaatggagcctcctgctgctgtcactcctgagtttctttgtgatgtggtacctcagccttccccactacaatgtgatagaacgcgtgaactggatgtacttctatgagtatgagccgatttacagacaagactttcacttcacacttcgagagcattcaaactgctctcatcaaaatccatttctggtcattctggtgacctcccacccttcagatgtgaaagccaggcaggccattagagttacttggggtgaaaaaaagtcttggtggggatatgaggttcttacatttttcttattaggccaagaggctgaaaaggaaracaaaatgttggcattgtccttagaggatgaacaccttctttatggtgacataatccgacaagattttttagacacatataataacctgaccttgaaaaccattatggcattcaggtgggtaactgagttttgccccaatgccaagtacgtaatgaagacagacactgatgttttcatcaatactggcaatttagtgaagtatcttttaaacctaaaccactcagagaagtttttcacaggttatcctctaattgataattattcctatagaggattttaccaaaaaacccatatttcttaccaggagtatcctttcaaggtgttccctccatactgcagtgggttgggttatataatgtccagagatttggtgccaaggatctatgaaatgatgggtcacgtaaaacccatcaagtttgaagatgtttatgtcgggatctgtttgaatttattaaaagtgaacattcatattccagaagacacaaatcttttctttctatatagaatccatttggatgtctgtcaactgagacgtgtgattgcagcccatggcttttcttccaaggagatcatcactttttggcaggtcatgctaaggaacaccacatgccattattaacttcacattctacaaaaagcctagaaggacaggatactttgtggaaagtgttaaataaagtaggtactgtggaaaattcatggggaggtcagtgtgctggcttacactgaactgaaactcatgaaaaacccagactggagactggagggttacacttgtgatttattagtcaggcccttcaaagatgatatgtggaggaattaaatataaaggaattggaggtttttgctaaagaaattaataggaccaaacaatttggacatgtcattctgtagactagaatttcttaaaagggtgttactgagttataagctcactaggctgtaaaaacaaaacaatgtagagttttatttattgaacaatgtagtcacttgaaggttttgtgtatatcttatgtggattaccaatttaaaaatatatgtagttctgtgtcaaaaaacttcttcactgaagttatactgaacaaaattttacctgtttttggtcatttataaagtacttcaagatgttgcagtatttcacagttattattatttaaaattacttcaactttgtgtttttaaatgttttgacgatttcaatacaagataaaaaggatagtgaatcattctttacatgcaaacattttccagttacttaactgatcagtttattattgatacatcactccattaatgtaaagtcataggtcattattgcatatcagtaatctcttggactttgttaaatattttactgtggtaatatagagaagaattaaagcaagaaaatctgaagtattgtcttgtttttaaaaaatacagttcctagtgtttttagaagtcacttaatttgtctcatttttccacctggaaattaggaataatgtagaatgcaaggcagtaatttccttttggaaaggactctgaaggcagaaaagaagggagagaacctcatgggcagaatattataaaaagagtgtcatattccagcatttgaattggaaagagaagagtgaagatccaagttgcattattaatctgccctgtgwtttttccttttaacaatcagtttgagctgctgctgttatgagtttctcatcaagatgaaagccctaatatgtaaagtcaaatccgatttaaattttgtgcttttatagaaagaaatttcttcatagacgtggtgayatatcatttgttggacctgctaatagtaggtcaaaggggagcactccttgccccctgttcctgggtttrtgcagttttctttttagagtttatatagggcaagtggttctttttctctgaattacaggatggaaaaaggtcatatcctttgtcaggaaatataaacttgaaagtatgtagtcagctcttgtaatactcatatttatgattgtcctatatgaaaaacaacttcagttaaaactataatgtgtgattctgtataacaaggtgatgtctgtttcccagggctcagacctaatccagttataataaaatcaattaaatgaaatattctatagaatcgatctatgcccttgttaatctccatccatataggagtcacgttctttaagacagatggtggtagttatttttgtggcatggttagatttgactggttttgcagaagattacagttatgtactgcataatgacatatacaatagtggtcccataaaattataatggagcagaaaatctattgcctcatgatgttttagccgttttaatgtcatagcctagtgcattactcacgtgtctgtggagatgctggtgtaaacaaacctactacactgccagttgtataaaagtacagcacattcagttatgtacagtatgtaatactgataatgacaataaatgacaccggtttgtgtatttacttttt

SEQ ID NO: 841 - DNA, 2360 bp, Homo sapiens
gtagatagtcagatgtcttttgaaaatgtgttttcggtgtggaatattaacccaatctttgataactcttccagaaccttcrgctcgcgtgcttctgagctgctgtggatggcctcggctctctggactgtccttccgagtaggatgtcactgagatccctcaaatggagcctcctgctgctgtcactcctgagtttctttgtgatgtggtacctcagccttccccactacaatgtgatagaacgcgtgaactggatgtacttctatgagtatgagccgatttacagacaagactttcacttcacacttcgagagcattcaaactgctctcatcaaaatccatttctggtcattctggtgacctcccacccttcagatgtgaaagccaggcaggccattagagttacttggggtgaaaaaaagtcttggtggggatatgaggttcttacatttttcttattaggccaagaggctgaaaaggaaracaaaatgttggcattgtccttagaggatgaacaccttctttatggtgacataatccgacaagattttttagacacatataataacctgaccttgaaaaccattatggcattcaggtgggtaactgagttttgccccaatgccaagtacgtaatgaagacagacactgatgttttcatcaatactggcaatttagtgaagtatcttttaaacctaaaccactcagagaagtttttcacaggttatcctctaattgataattattcctatagaggattttaccaaaaaacccatatttcttaccaggagtatcctttcaaggtgttccctccatactgcagtgggttgggttatataatgtccagagatttggtgccaaggatctatgaaatgatgggtcacgtaaaacccatcaagtttgaagatgtttatgtcgggatctgtttgaatttattaaaagtgaacattcatattccagaagacacaaatcttttctttctatatagaatccatttggatgtctgtcaactgagacgtgtgattgcagcccatggcttttcttccaaggagatcatcactttttggcaggtcatgctaaggaacaccacatgccattattaacttcacattctacaaaaagcctagaaggacaggatactttgtggaaagtgttaaataaagtaggtactgtggaaaattcatggggaggtcagtgtgctggcttacactgaactgaaactcatgaaaaacccagactggagactggagggttacacttgtgatttattagtcaggcccttcaaagatgatatgtggaggaattaaatataaaggaattggaggtttttgctaaagaaattaataggaccaaacaatttggacatgtcattctgtagactagaatttcttaaaagggtgttactgagttataagctcactaggctgtaaaaacaaaacaatgtagagttttatttattgaacaatgtagtcacttgaaggttttgtgtatatcttatgtggattaccaatttaaaaatatatgtagttctgtgtcaaaaaacttcttcactgaagttatactgaacaaaattttacctgtttttggtcatttataaagtacttcaagatgttgcagtatttcacagttattattatttaaaattacttcaactttgtgtttttaaatgttttgacgatttcaatacaagataaaaaggatagtgaatcattctttacatgcaaacattttccagttacttaactgatcagtttattattgatacatcactccattaatgtaaagtcataggtcattattgcatatcagtaatctcttggactttgttaaatattttactgtggtaatatagagaagaattaaagcaagaaaatctgaagtattgtcttgtttttaaaaaatacagttcctagtgtttttagaagtcacttaatttgtctcatttttccacctggaaattaggaataatgtagaatgcaaggcagtaatttccttttggaaaggactctgaaggcagaaaagaagggagagaacctcatgggcagaatattataaaaagagtgtcatattccagcatttgaattggaaagagaagagtgaagatccaagttgcattattaatctgccctgtgwtttttccttttaacaatcagtttgagctgctgctgttatgagtttctcatcaagatgaaagccctaatatgtaaagtcaaatccgatttaaattttgtgcttttatagaaagaaatttcttcatagacgtggtgayatatcatttgttggacctgctaatagtaggtcaaaggggagcactccttgccccctgttcctgggtttrtgcagttttctttttagagtt

SEQ ID NO: 842 - DNA, 3160 bp, Homo sapiens
arggagagaacgccggccaccttcccgcttccgagctgggtgcgcgccgagcacaggagggtgcaatacctgccttgcgtcgcccgtgccgctccagccaccgtcaaatccgggtagcgacccggggcgtttgcagcggtgccgaggaagaggacgggaacggtgttacgattgcctgcgtttaggaggtggctgcgttgtgggaaaagctatcaaggaagaaattgccaaaccatgtctttttttctgttttcagagtagttcacaacagatctgagtgttttaattaagcatggaatacagaaaacaacaaaaaacttaagctttaatttcatctggaattccacagagacaaggccactttatgtttcccaggctggactggaacccctgggctcaaatgatcctcctacctaagcctgcagagtagcgaggacttcagttttcttagctccctggacccggttgacctgttggctcttcccgctggctgctctatcacgtggtgctctccgactactcaccccgagtgtaaagtcttgctgctctgttgcccaggctggagtacagtggcaggatctcagctcactgcaatctccgtctctcaggtttaagcagttctcctgcctcagcctcccaagtaggtgggactacagaaccttcrgctcgcgtgcttctgagctgctgtggatggcctcggctctctggactgtccttccgagtaggatgtcactgagatccctcaaatggagcctcctgctgctgtcactcctgagtttctttgtgatgtggtacctcagccttccccactacaatgtgatagaacgcgtgaactggatgtacttctatgagtatgagccgatttacagacaagactttcacttcacacttcgagagcattcaaactgctctcatcaaaatccatttctggtcattctggtgacctcccacccttcagatgtgaaagccaggcaggccattagagttacttggggtgaaaaaaagtcttggtggggatatgaggttcttacatttttcttattaggccaagaggctgaaaaggaaracaaaatgttggcattgtccttagaggatgaacaccttctttatggtgacataatccgacaagattttttagacacatataataacctgaccttgaaaaccattatggcattcaggtgggtaactgagttttgccccaatgccaagtacgtaatgaagacagacactgatgttttcatcaatactggcaatttagtgaagtatcttttaaacctaaaccactcagagaagtttttcacaggttatcctctaattgataattattcctatagaggattttaccaaaaaacccatatttcttaccaggagtatcctttcaaggtgttccctccatactgcagtgggttgggttatataatgtccagagatttggtgccaaggatctatgaaatgatgggtcacgtaaaacccatcaagtttgaagatgtttatgtcgggatctgtttgaatttattaaaagtgaacattcatattccagaagacacaaatcttttctttctatatagaatccatttggatgtctgtcaactgagacgtgtgattgcagcccatggcttttcttccaaggagatcatcactttttggcaggtcatgctaaggaacaccacatgccattattaacttcacattctacaaaaagcctagaaggacaggatactttgtggaaagtgttaaataaagtaggtactgtggaaaattcatggggaggtcagtgtgctggcttacactgaactgaaactcatgaaaaacccagactggagactggagggttacacttgtgatttattagtcaggcccttcaaagatgatatgtggaggaattaaatataaaggaattggaggtttttgctaaagaaattaataggaccaaacaatttggacatgtcattctgtagactagaatttcttaaaagggtgttactgagttataagctcactaggctgtaaaaacaaaacaatgtagagttttatttattgaacaatgtagtcacttgaaggttttgtgtatatcttatgtggattaccaatttaaaaatatatgtagttctgtgtcaaaaaacttcttcactgaagttatactgaacaaaattttacctgtttttggtcatttataaagtacttcaagatgttgcagtatttcacagttattattatttaaaattacttcaactttgtgtttttaaatgttttgacgatttcaatacaagataaaaaggatagtgaatcattctttacatgcaaacattttccagttacttaactgatcagtttattattgatacatcactccattaatgtaaagtcataggtcattattgcatatcagtaatctcttggactttgttaaatattttactgtggtaatatagagaagaattaaagcaagaaaatctgaagtattgtcttgtttttaaaaaatacagttcctagtgtttttagaagtcacttaatttgtctcatttttccacctggaaattaggaataatgtagaatgcaaggcagtaatttccttttggaaaggactctgaaggcagaaaagaagggagagaacctcatgggcagaatattataaaaagagtgtcatattccagcatttgaattggaaagagaagagtgaagatccaagttgcattattaatctgccctgtgwtttttccttttaacaatcagtttgagctgctgctgttatgagtttctcatcaagatgaaagccctaatatgtaaagtcaaatccgatttaaattttgtgcttttatagaaagaaatttcttcatagacgtggtgayatatcatttgttggacctgctaatagtaggtcaaaggggagcactccttgccccctgttcctgggtttrtgcagttttctttttagagtttatatagggcaagtggttctttttctctgaattacaggatggaaaaaggtcatatcctttgtcaggaaatataaacttgaaagtatgtagtcagctcttgtaatactcatatttatgattgtcctatatgaaaaacaacttcagttaaaactataatgtgtgattctgtataacaaggtgatgtctgtttcccagggctcagacctaatccagttata

SEQ ID NO: 843 - DNA, 3268 bp, Homo sapiens
gcgtgcggatgcggggaggctgcgtgtgtgcgcarggagagaacgccggccaccttcccgcttccgagctgggtgcgcgccgagcacaggagattgcctgcgtttaggaggtggctgcgttgtgggaaaagctatcaaggaagaaattgccaaaccatgtctttttttctgttttcagagtagttcacaacagatctgagtgttttaattaagcatggaatacagaaaacaacaaaaaacttaagctttaatttcatctggaattccacagttttcttagctccctggacccggttgacctgttggctcttcccgctggctgctctatcacgtggtgctctccgactactcaccccgagtgtaaagaaccttcrgctcgcgtgcttctgagctgctgtggatggcctcggctctctggactgtccttccgagtaggatgtcactgagatccctcaaatggagcctcctgctgctgtcactcctgagtttctttgtgatgtggtacctcagccttccccactacaatgtgatagaacgcgtgaactggatgtacttctatgagtatgagccgatttacagacaagactttcacttcacacttcgagagcattcaaactgctctcatcaaaatccatttctggtcattctggtgacctcccacccttcagatgtgaaagccaggcaggccattagagttacttggggtgaaaaaaagtcttggtggggatatgaggttcttacatttttcttattaggccaagaggctgaaaaggaaracaaaatgttggcattgtccttagaggatgaacaccttctttatggtgacataatccgacaagattttttagacacatataataacctgaccttgaaaaccattatggcattcaggtgggtaactgagttttgccccaatgccaagtacgtaatgaagacagacactgatgttttcatcaatactggcaatttagtgaagtatcttttaaacctaaaccactcagagaagtttttcacaggttatcctctaattgataattattcctatagaggattttaccaaaaaacccatatttcttaccaggagtatcctttcaaggtgttccctccatactgcagtgggttgggttatataatgtccagagatttggtgccaaggatctatgaaatgatgggtcacgtaaaacccatcaagtttgaagatgtttatgtcgggatctgtttgaatttattaaaagtgaacattcatattccagaagacacaaatcttttctttctatatagaatccatttggatgtctgtcaactgagacgtgtgattgcagcccatggcttttcttccaaggagatcatcactttttggcaggtcatgctaaggaacaccacatgccattattaacttcacattctacaaaaagcctagaaggacaggatactttgtggaaagtgttaaataaagtaggtactgtggaaaattcatggggaggtcagtgtgctggcttacactgaactgaaactcatgaaaaacccagactggagactggagggttacacttgtgatttattagtcaggcccttcaaagatgatatgtggaggaattaaatataaaggaattggaggtttttgctaaagaaattaataggaccaaacaatttggacatgtcattctgtagactagaatttcttaaaagggtgttactgagttataagctcactaggctgtaaaaacaaaacaatgtagagttttatttattgaacaatgtagtcacttgaaggttttgtgtatatcttatgtggattaccaatttaaaaatatatgtagttctgtgtcaaaaaacttcttcactgaagttatactgaacaaaattttacctgtttttggtcatttataaagtacttcaagatgttgcagtatttcacagttattattatttaaaattacttcaactttgtgtttttaaatgttttgacgatttcaatacaagataaaaaggatagtgaatcattctttacatgcaaacattttccagttacttaactgatcagtttattattgatacatcactccattaatgtaaagtcataggtcattattgcatatcagtaatctcttggactttgttaaatattttactgtggtaatatagagaagaattaaagcaagaaaatctgaagtattgtcttgtttttaaaaaatacagttcctagtgtttttagaagtcacttaatttgtctcatttttccacctggaaattaggaataatgtagaatgcaaggcagtaatttccttttggaaaggactctgaaggcagaaaagaagggagagaacctcatgggcagaatattataaaaagagtgtcatattccagcatttgaattggaaagagaagagtgaagatccaagttgcattattaatctgccctgtgwtttttccttttaacaatcagtttgagctgctgctgttatgagtttctcatcaagatgaaagccctaatatgtaaagtcaaatccgatttaaattttgtgcttttatagaaagaaatttcttcatagacgtggtgayatatcatttgttggacctgctaatagtaggtcaaaggggagcactccttgccccctgttcctgggtttrtgcagttttctttttagagtttatatagggcaagtggttctttttctctgaattacaggatggaaaaaggtcatatcctttgtcaggaaatataaacttgaaagtatgtagtcagctcttgtaatactcatatttatgattgtcctatatgaaaaacaacttcagttaaaactataatgtgtgattctgtataacaaggtgatgtctgtttcccagggctcagacctaatccagttataataaaatcaattaaatgaaatattctatagaatcgatctatgcccttgttaatctccatccatataggagtcacgttctttaagacagatggtggtagttatttttgtggcatggttagatttgactggttttgcagaagattacagttatgtactgcataatgacatatacaatagtggtcccataaaattataatggagcagaaaatctattgcctcatgatgttttagccgttttaatgtcatagcctagtgcattactcacgtgtctgtggagatgctggtgtaaacaaacctactacactgccagttgtataaaagtacagcacattcagttatgtacagtatgtaatactgataatgacaataaatgacaccggtttgtgtatttacttttt

SEQ ID NO: 844 - DNA, 3346 bp, Homo sapiens
arggagagaacgccggccaccttcccgcttccgagctgggtgcgcgccgagcacaggagggtgcaatacctgccttgcgtcgcccgtgccgctccagccaccgtcaaatccgggtagcgacccggggcgtttgcagcggtgccgaggaagaggacgggaacggtgttacgattgcctgcgtttaggaggtggctgcgttgtgggaaaagctatcaaggaagaaattgccaaaccatgtctttttttctgttttcagagtagttcacaacagatctgagtgttttaattaagcatggaatacagaaaacaacaaaaaacttaagctttaatttcatctggaattccacagttttcttagctccctggacccggttgacctgttggctcttcccgctggctgctctatcacgtggtgctctccgactactcaccccgagtgtaaagaaccttcrgctcgcgtgcttctgagctgctgtggatggcctcggctctctggactgtccttccgagtaggatgtcactgagatccctcaaatggagcctcctgctgctgtcactcctgagtttctttgtgatgtggtacctcagccttccccactacaatgtgatagaacgcgtgaactggatgtacttctatgagtatgagccgatttacagacaagactttcacttcacacttcgagagcattcaaactgctctcatcaaaatccatttctggtcattctggtgacctcccacccttcagatgtgaaagccaggcaggccattagagttacttggggtgaaaaaaagtcttggtggggatatgaggttcttacatttttcttattaggccaagaggctgaaaaggaaracaaaatgttggcattgtccttagaggatgaacaccttctttatggtgacataatccgacaagattttttagacacatataataacctgaccttgaaaaccattatggcattcaggtgggtaactgagttttgccccaatgccaagtacgtaatgaagacagacactgatgttttcatcaatactggcaatttagtgaagtatcttttaaacctaaaccactcagagaagtttttcacaggttatcctctaattgataattattcctatagaggattttaccaaaaaacccatatttcttaccaggagtatcctttcaaggtgttccctccatactgcagtgggttgggttatataatgtccagagatttggtgccaaggatctatgaaatgatgggtcacgtaaaacccatcaagtttgaagatgtttatgtcgggatctgtttgaatttattaaaagtgaacattcatattccagaagacacaaatcttttctttctatatagaatccatttggatgtctgtcaactgagacgtgtgattgcagcccatggcttttcttccaaggagatcatcactttttggcaggtcatgctaaggaacaccacatgccattattaacttcacattctacaaaaagcctagaaggacaggatactttgtggaaagtgttaaataaagtaggtactgtggaaaattcatggggaggtcagtgtgctggcttacactgaactgaaactcatgaaaaacccagactggagactggagggttacacttgtgatttattagtcaggcccttcaaagatgatatgtggaggaattaaatataaaggaattggaggtttttgctaaagaaattaataggaccaaacaatttggacatgtcattctgtagactagaatttcttaaaagggtgttactgagttataagctcactaggctgtaaaaacaaaacaatgtagagttttatttattgaacaatgtagtcacttgaaggttttgtgtatatcttatgtggattaccaatttaaaaatatatgtagttctgtgtcaaaaaacttcttcactgaagttatactgaacaaaattttacctgtttttggtcatttataaagtacttcaagatgttgcagtatttcacagttattattatttaaaattacttcaactttgtgtttttaaatgttttgacgatttcaatacaagataaaaaggatagtgaatcattctttacatgcaaacattttccagttacttaactgatcagtttattattgatacatcactccattaatgtaaagtcataggtcattattgcatatcagtaatctcttggactttgttaaatattttactgtggtaatatagagaagaattaaagcaagaaaatctgaagtattgtcttgtttttaaaaaatacagttcctagtgtttttagaagtcacttaatttgtctcatttttccacctggaaattaggaataatgtagaatgcaaggcagtaatttccttttggaaaggactctgaaggcagaaaagaagggagagaacctcatgggcagaatattataaaaagagtgtcatattccagcatttgaattggaaagagaagagtgaagatccaagttgcattattaatctgccctgtgwtttttccttttaacaatcagtttgagctgctgctgttatgagtttctcatcaagatgaaagccctaatatgtaaagtcaaatccgatttaaattttgtgcttttatagaaagaaatttcttcatagacgtggtgayatatcatttgttggacctgctaatagtaggtcaaaggggagcactccttgccccctgttcctgggtttrtgcagttttctttttagagtttatatagggcaagtggttctttttctctgaattacaggatggaaaaaggtcatatcctttgtcaggaaatataaacttgaaagtatgtagtcagctcttgtaatactcatatttatgattgtcctatatgaaaaacaacttcagttaaaactataatgtgtgattctgtataacaaggtgatgtctgtttcccagggctcagacctaatccagttataataaaatcaattaaatgaaatattctatagaatcgatctatgcccttgttaatctccatccatataggagtcacgttctttaagacagatggtggtagttatttttgtggcatggttagatttgactggttttgcagaagattacagttatgtactgcataatgacatatacaatagtggtcccataaaattataatggagcagaaaatctattgcctcatgatgttttagccgttttaatgtcatagcctagtgcattactcacgtgtctgtggagatgctggtgtaaacaaacctactacactgccagttgtataaaagtacagcacattcagttatgtacagtatgtaatactgataatgacaataaatgacaccggtttgtgtatttacttttt

SEQ ID NO: 845 - DNA, 3215 bp, Homo sapiens
gcgtgcggatgcggggaggctgcgtgtgtgcgcarggagagaacgccggccaccttcccgcttccgagctgggtgcgcgccgagcacaggagattgcctgcgtttaggaggtggctgcgttgtgggaaaagctatcaaggaagaaattgccaaaccatgtctttttttctgttttcagagtagttcacaacagatctgagtgttttaattaagcatggaatacagaaaacaacaaaaaacttaagctttaatttcatctggaattccacagttttcttagctccctggacccggttgacctgttggctcttcccgctggctgctctatcacgtggtgctctccgactactcaccccgagtgtaaagaaccttcrgctcgcgtgcttctgagctgctgtggatggcctcggctctctggactgtccttccgagtaggatgtcactgagatccctcaaatggagcctcctgctgctgtcactcctgagtttctttgtgatgtggtacctcagccttccccactacaatgtgatagaacgcgtgaactggatgtacttctatgagtatgagccgatttacagacaagactttcacttcacacttcgagagcattcaaactgctctcatcaaaatccatttctggtcattctggtgacctcccacccttcagatgtgaaagccaggcaggccattagagttacttggggtgaaaaaaagtcttggtggggatatgaggttcttacatttttcttattaggccaagaggctgaaaaggaaracaaaatgttggcattgtccttagaggatgaacaccttctttatggtgacataatccgacaagattttttagacacatataataacctgaccttgaaaaccattatggcattcaggtgggtaactgagttttgccccaatgccaagtacgtaatgaagacagacactgatgttttcatcaatactggcaatttagtgaagtatcttttaaacctaaaccactcagagaagtttttcacaggttatcctctaattgataattattcctatagaggattttaccaaaaaacccatatttcttaccaggagtatcctttcaaggtgttccctccatactgcagtgggttgggttatataatgtccagagatttggtgccaaggatctatgaaatgatgggtcacgtaaaacccatcaagtttgaagatgtttatgtcgggatctgtttgaatttattaaaagtgaacattcatattccagaagacacaaatcttttctttctatatagaatccatttggatgtctgtcaactgagacgtgtgattgcagcccatggcttttcttccaaggagatcatcactttttggcaggtcatgctaaggaacaccacatgccattattaacttcacattctacaaaaagcctagaaggacaggatactttgtggaaagtgttaaataaagtaggtactgtggaaaattcatggggaggtcagtgtgctggcttacactgaactgaaactcatgaaaaacccagactggagactggagggttacacttgtgatttattagtcaggcccttcaaagatgatatgtggaggaattaaatataaaggaattggaggtttttgctaaagaaattaataggaccaaacaatttggacatgtcattctgtagactagaatttcttaaaagggtgttactgagttataagctcactaggctgtaaaaacaaaacaatgtagagttttatttattgaacaatgtagtcacttgaaggttttgtgtatatcttatgtggattaccaatttaaaaatatatgtagttctgtgtcaaaaaacttcttcactgaagttatactgaacaaattattattatttaaaattacttcaactttgtgtttttaaatgttttgacgatttcaatacaagataaaaaggatagtgaatcattctttacatgcaaacattttccagttacttaactgatcagtttattattgatacatcactccattaatgtaaagtcataggtcattattgcatatcagtaatctcttggactttgttaaatattttactgtggtaatatagagaagaattaaagcaagaaaatctgaagtattgtcttgtttttaaaaaatacagttcctagtgtttttagaagtcacttaatttgtctcatttttccacctggaaattaggaataatgtagaatgcaaggcagtaatttccttttggaaaggactctgaaggcagaaaagaagggagagaacctcatgggcagaatattataaaaagagtgtcatattccagcatttgaattggaaagagaagagtgaagatccaagttgcattattaatctgccctgtgwtttttccttttaacaatcagtttgagctgctgctgttatgagtttctcatcaagatgaaagccctaatatgtaaagtcaaatccgatttaaattttgtgcttttatagaaagaaatttcttcatagacgtggtgayatatcatttgttggacctgctaatagtaggtcaaaggggagcactccttgccccctgttcctgggtttrtgcagttttctttttagagtttatatagggcaagtggttctttttctctgaattacaggatggaaaaaggtcatatcctttgtcaggaaatataaacttgaaagtatgtagtcagctcttgtaatactcatatttatgattgtcctatatgaaaaacaacttcagttaaaactataatgtgtgattctgtataacaaggtgatgtctgtttcccagggctcagacctaatccagttataataaaatcaattaaatgaaatattctatagaatcgatctatgcccttgttaatctccatccatataggagtcacgttctttaagacagatggtggtagttatttttgtggcatggttagatttgactggttttgcagaagattacagttatgtactgcataatgacatatacaatagtggtcccataaaattataatggagcagaaaatctattgcctcatgatgttttagccgttttaatgtcatagcctagtgcattactcacgtgtctgtggagatgctggtgtaaacaaacctactacactgccagttgtataaaagtacagcacattcagttatgtacagtatgtaatactgataatgacaataaatgacaccggtttgtgtatttactttttataa

SEQ ID NO: 846 - DNA, 2811 bp, Homo sapiens
atgcaggtggaagagggtaggagggatgctggtgccattagcagagagggctagaccagaacatgcctgctttttcaacacatgtaagaagtgcctttcatctcctgccatgattctgaggcctccccagccatgtggaactggaaatccaattaaacctctttttcttcccagtctcagactgcagctgaatatgtaaaatctcgactcccagaggcccttaaacagcatcttcaggactacgagaaagacaaagaaaatagtgtattatcttaccagaccatccttgaacagcagattttgtcaattgaccgagaaatgctagaaaaattgactgtatcctatgatgaagcaggcacaacgtgtttgattgctctgctatcagataaagacctcactgtggccaacgtgggtgactcgcgcggggtcctgtgtgacaaagatgggaacgctattcctttgtctcatgatcacaagccttaccagttgaaggaaagaaagaggataaagagagcaggtggtttcatcagtttcaatggctcctggagggtccagggaatcctggccatgtctcggtccctgggggattatccgctgaaaaatctcaacgtggtcatcccagacccagacatcctgacctttgacctggacaagcttcagcctgagttcatgatcttggcatcagatggtctctgggatgctttcagcaatgaagaagcagttcgattcatcaaggagcgcttggatgaacctcactttggggccaagagcatagttttacagtcattttacagaggctgccctgacaatataacagtcatggtggtgaagttcagaaatagcagcaaaacagaagagcagtgaacccttcaggggtctcagctgccttagactaaaggactttcaacacactggtctcttttaatttagtgaaaagtgtgggagttgtaattaggatcatccaccccagacatggaatcccccctccctggtggtcttaggtctataatcagtgacgaacagagggtgcccttggccaatgtagttaagaaactggaaaatggtttcttcatgttttcccaactctttcatccagtgtccaaaatatataagtaaatagctgtagagtcacatatatgaagtgaatagcatatgtgtcatttagtctccctgaagattcttttcaagatcctgttcasggtcctccaggcatcagctgttgtgtcctctctttgtaacagtggacaggacagaccacccagtgctgcaggagacaggccactgcgtcacctgtgagtggtcaggggctgatgtggcaacaccctctgccaagagacagagctgtcctgagaatgctttgtccttctgagcccatgttttctgctcagtagcagcttggaagcagatttggaatggtttaytattttggctgctcttggggactgcgagaagcagagagaatgagagaccagtggcaactgcctgcacagcagagataaccctcttcccttgcttcctttaatagttaaatagactttgtataccacctgaccagcctttgtgcatttatcctaatcatgcatgaccgttaaccttttgcttagtccttaccatatgtaataggcagctgttaaattcaccaacagataccctgatttttcatcttacgtgaccaagaaaccacgttaggggaaatgaaaaaagcaagccacaataccatgattccttccattttcaacagtagatgaaggaaatgatactgaatgagtcacagtgttccctggcaagtaagctgtttgcattgagaaaggagtgagctggtgaggttaccaccctgaattgagctccagctgccagtttttgtgtttttccttgcccctttccaagtggttttcaagtgtcaggcagtgttctgagaagcagcagcctataactgtatgtgtgttccttgaagccaggtgcagagttcccagctactgcagcttgggatttggtgggaaactactgggataagcttctccttgacaatggaaaggcagcagtcttcaacatttggttgcaaatctccatccacatcagggagctttccccaggcaaatacaaaccgccccgtggcctgcaggcctgcaggggaggcagcaaagggacctggcagttgcaacacagtaagtcaggaattcaagcgtgaacccatattgataagtgggccagaattatttaggggcctggcttgctgctctccatttcctgtatcgctaatttatcatttttccaaccttggtattttatattatttagagaaaatgctgggtcactctctttgcctaaggtgactcaaacagccaaacgaaacttccgttgcctcccagccctctgtatccacctggttttgttctttccctgtgagcatttgtggttatagcttcccatatgccacattcaccggccacctcctcrccgtggaaccctgccctctcccctcctgctgctgtagagttttcccaaagcagtgtccaggagagaatttgagagagtgaagaaattgccttgtagatgtggagggctgcaatctgtyttgatttctccaagcacttaactttctttgactgcactgakaattgctaatgatytcccatgagatttgcttacttttgtatactgtattttccagcattacagaaccttggttattgttttttagccatagaatcttctagtaaaaaatatctgccaccattttagatttaagcatttgcctatggggagacactgaatatgtggatgtgtgtattaatatttggggtggggaca

SEQ ID NO: 847 - DNA, 3411 bp, Homo sapiens
agacttgtgaagtattaattcaatatcacccgaggctttttcagactattattcaaatgacacagaatgaagacctccgagaaaacatgttacggcaagttctggagcatttgtctcagcaaagtgaaagccagtacctaaagattctaacaagccttgctgaagttgctacaacaaatggtcataaactgcttagcctctctagcaattatgatgctcaaatgaagagccttttaaggattgtgagaatgttttgtcacgtctttcgaattggtccatcctcccccagtaatggaattgatatgggctacaatgggaataaaactccaagaagccaggtgttcaagcctctggaattgctttggcactcgttagatgaatggctagttttaatagccacagaattgatgaaaaacaaaagagactcaacagagatcacttctattttactgaaacaaaaaggccaagrtcaagatgctgcttccattcctccatttgaacctccaggacctgggagctatgaaaatctgtccactggcacaagggaatctaaaccagatgctcttgcagggagacaggaagccagtgcagattgtcaggatgttatttctatgacagctaaccggctaagtgctgtcattcaagctttttacatgtgctgttcttgtcagatgcctccgggaatgacttcacctcgtttcattgaatttgtctgcaaacatgatgaagttttaaaatgctttgttaatagaaatcccaaaattatatttgaccactttcactttctccttgaatgtcctgagttgatgtcaagattcatgcatatcataaaagcacagccttttaaagatcgctgtgaatggttctatgaacatttgcattcaggacagccagattcagatatggtgcacaggccagtgaatgaaaatgatatcctgctggttcacagagattctatttttaggagtagctgtgaagttgtgtcaaaagcaaattgtgcaaagctaaagcaagggattgctgtacggttccatggagaagaaggcatgggtcaaggtgttgtgcgtgagtggtttgatattctgtccaatgagatagtcaatcctgattatgcattgtttacccagtcagctgatggaacaacttttcagcctaatagcaactcttatgtaaatcctgatcacttgaactattttcggtttgctgggcagatcttgggattagcgttgaaccacaggcagctggtcaatatttacttcacacgatccttctacaagcacattcttggtattcctgtaaattaccaagatgtggcatccattgatccagaatatgcgaaaaatttgcaatggattttagataatgatataagtgatctgggtctagaactractttttctgttgagactgatgtgtttggagcaatggaagaggtgcctttgaaacctgggggtgggagtattcttgtgacacaaaataataaagagctactgctttctggcatgccagaaattgatgtgagtgattggataaaaaatacagaatacacaagtggctatgaaagagaagatccagttattcagtttgttacgggcagttccagggtcccacatggtgggtttgctaatatcatgggtggaagtggattgcaaaactttacaatcgctgctgtgccatatactccaaatcttttaccaacttcaagcacatgcatcaacatgctcaagttacctgaatacccaagtaaagaaatactcaaggacagacttcttgtggcactacattgtggcagctatggttacacaatggcataatgaagtctggaaaactcctctgactactgatgcacaattcagaatggcagaagtaatttgggaaaatgtcaacaaaaaagcagcctaaatgcaacccataggcagggctgatgcttccaatttataaaggatcatcaggttttctgtttctctcttttcccttttatgttttctctgtttgtgatacaattagaaaatataaaatcacagtagattttattttttaaaatgctaactgaaagtaatagagactgtcctttttcataattaattttatccaagattgtattaaggcaaaatctgattctacattccacctctgctatgtaactgtcttgttaaaagggtgttttctcctaatttctgatatattatatgaggtcatccagctggtgtgttcttttgcatgtaaactgccatttatattttagaaaactattgtatagaatggatttagattgtctataaagccacaaatacgtattttgccacagtgtattctatattgcaatgatttttttagcattttaatattttaatatatattgtaaaatttagactgatgatactaacagttgatgaaatgacatataatttatatatgaaagcttacgctatattgtatgaattatttgcatctttcagtggccagttttccatatgtatatattatggtctcaatgtttttcttacgcctcattttaatttataatgaaggtaaaattaaaatgtattttaccacgtttcttttcattacttttatctgtgagctctgacacatctgaaaaagtaatctgatgtgcaaattataatttaaatatgttaatttttttgcttcttaaatttgcttttcatcattaaaatgtcaagttcaagtgatatgtgcctaatatcacttggatgttggtgggtttttgaatttttgggtggttaatcagttttattttgaaaagacgtacttgaatagttacagcatatgtttgaacaggaagtaggaacatgcatacacgaagaaatgctaacggaaggatttgttatgtttaggatcttcccttggaaactaaaaatagaatattaatgacattactgtttgtagaatgacatatgcagattttctcataagcagtcattgtgtttgccagtaatgtttgagagacatgtaagttgaaagttttgctaaattataaagctcctttaattcgttggttttgattctcttattctcttgtcttttctaaatgttaacaaaatatatcttaacagattacatgaaatttaggaattatttaaaagttaccattagctctaaaattaagattcggatgctttatttatagtaactgaagctaataatgttttatgttttgattttttgaaatttaattgtagaagtcactgccttctgagttttcaaatagataaccacctttaatattacactgcttataatactaatgtttacagatatgtttctgtttataaccatataatacattggctttgtcatattagttttttttgcaagtagttatgtaaaagagatagataataaaatattaaataactgagtgtggtggcttatgtctgtaatctcagc

SEQ ID NO: 848 - DNA, 3301 bp, Homo sapiens
tcctgtagtttaagaatgatgtttaaaaaacacttttgtttctctcagcctctggaattgctttggcactcgttagatgaatggctagttttaatagccacagaattgatgaaaaacaaaagagactcaacagagatcacttctattttactgaaacaaaaaggccaagrtcaagatgctgcttccattcctccatttgaacctccaggacctgggagctatgaaaatctgtccactggcacaagggaatctaaaccagatgctcttgcagggagacaggaagccagtgcagattgtcaggatgttatttctatgacagctaaccggctaagtgctgtcattcaagctttttacatgtgctgttcttgtcagatgcctccgggaatgacttcacctcgtttcattgaatttgtctgcaaacatgatgaagttttaaaatgctttgttaatagaaatcccaaaattatatttgaccactttcactttctccttgaatgtcctgagttgatgtcaagattcatgcatatcataaaagcacagccttttaaagatcgctgtgaatggttctatgaacatttgcattcaggacagccagattcagatatggtgcacaggccagtgaatgaaaatgatatcctgctggttcacagagattctatttttaggagtagctgtgaagttgtgtcaaaagcaaattgtgcaaagctaaagcaagggattgctgtacggttccatggagaagaaggcatgggtcaaggtgttgtgcgtgagtggtttgatattctgtccaatgagatagtcaatcctgattatgcattgtttacccagtcagctgatggaacaacttttcagcctaatagcaactcttatgtaaatcctgatcacttgaactattttcggtttgctgggcagatcttgggattagcgttgaaccacaggcagctggtcaatatttacttcacacgatccttctacaagcacattcttggtattcctgtaaattaccaagatgtggcatccattgatccagaatatgcgaaaaatttgcaatggattttagataatgatataagtgatctgggtctagaactractttttctgttgagactgatgtgtttggagcaatggaagaggtgcctttgaaacctgggggtgggagtattcttgtgacacaaaataataaagcggagtacgtccagcttgttacwgaacttcgaatgacaagagccattcagcctcagatcaatgcttttttacagggcttycatatgttcattccaccctccctcatacagctttttgatgaatatgaattggagctactgctttctggcatgccagaaattgatgtgagtgattggataaaaaatacagaatacacaagtggctatgaaagagaagatccagttattcagtggttctgggaagttgtagaagacattactcaagaggagagagttcttctcttacagtttgttacgggcagttccagggtcccacatggtgggtttgctaatatcatgggtggaagtggattgcaaaactttacaatcgctgctgtgccatatactccaaatcttttaccaacttcaagcacatgcatcaacatgctcaagttacctgaatacccaagtaaagaaatactcaaggacagacttcttgtggcactacattgtggcagctatggttacacaatggcataatgaagtctggaaaactcctctgactactgatgcacaattcagaatggcagaagtaatttgggaaaatgtcaacaaaaaagcagcctaaatgcaacccataggcagggctgatgcttccaatttataaaggatcatcaggttttctgtttctctcttttcccttttatgttttctctgtttgtgatacaattagaaaatataaaatcacagtagattttattttttaaaatgctaactgaaagtaatagagactgtcctttttcataattaattttatccaagattgtattaaggcaaaatctgattctacattccacctctgctatgtaactgtcttgttaaaagggtgttttctcctaatttctgatatattatatgaggtcatccagctggtgtgttcttttgcatgtaaactgccatttatattttagaaaactattgtatagaatggatttagattgtctataaagccacaaatacgtattttgccacagtgtattctatattgcaatgatttttttagcattttaatattttaatatatattgtaaaatttagactgatgatactaacagttgatgaaatgacatataatttatatatgaaagcttacgctatattgtatgaattatttgcatctttcagtggccagttttccatatgtatatattatggtctcaatgtttttcttacgcctcattttaatttataatgaaggtaaaattaaaatgtattttaccacgtttcttttcattacttttatctgtgagctctgacacatctgaaaaagtaatctgatgtgcaaattataatttaaatatgttaatttttttgcttcttaaatttgcttttcatcattaaaatgtcaagttcaagtgatatgtgcctaatatcacttggatgttggtgggtttttgaatttttgggtggttaatcagttttattttgaaaagacgtacttgaatagttacagcatatgtttgaacaggaagtaggaacatgcatacacgaagaaatgctaacggaaggatttgttatgtttaggatcttcccttggaaactaaaaatagaatattaatgacattactgtttgtagaatgacatatgcagattttctcataagcagtcattgtgtttgccagtaatgtttgagagacatgtaagttgaaagttttgctaaattataaagctcctttaattcgttggttttgattctcttattctcttgtcttttctaaatgttaacaaaatatatcttaacagattacatgaaatttaggaattatttaaaagttaccattagctctaaaattaagattcggatgctttatttatagtaactgaagctaataatgttttatgttttgattttttgaaatttaattgtagaagtcactgccttctgagttttcaaatagataaccacctttaatattacactgcttataatactaatgtttacagatatgtttctgtttataaccatataatacattggctttgtcatattagttttttttgcaagtagttatgtaaaagagatagataataaaatattaaataactgagtgtggtggcttatgtctgtaatctcagc

SEQ ID NO: 849 - DNA, 3468 bp, Homo sapiens
agacttgtgaagtattaattcaatatcacccgaggctttttcagactattattcaaatgacacagaatgaagacctccgagaaaacatgttacggcaagttctggagcatttgtctcagcaaagtgaaagccagtacctaaagattctaacaagccttgctgaagttgctacaacaaatggtcataaactgcttagcctctctagcaattatgatgctcaaatgaagagccttttaaggattgtgagaatgttttgtcacgtctttcgaattggtccatcctcccccagtaatggaattgatatgggctacaatgggaataaaactccaagaagccaggtgttcaagcctctggaattgctttggcactcgttagatgaatggctagttttaatagccacagaattgatgaaaaacaaaagagactcaacagagatcacttctattttactgaaacaaaaaggccaagrtcaagatgctgcttccattcctccatttgaacctccaggacctgggagctatgaaaatctgtccactggcacaagggaatctaaaccagatgctcttgcagggagacaggaagccagtgcagattgtcaggatgttatttctatgacagctaaccggctaagtgctgtcattcaagctttttacatgtgctgttcttgtcagatgcctccgggaatgacttcacctcgtttcattgaatttgtctgcaaacatgatgaagttttaaaatgctttgttaatagaaatcccaaaattatatttgaccactttcactttctccttgaatgtcctgagttgatgtcaagattcatgcatatcataaaagcacagccttttaaagatcgctgtgaatggttctatgaacatttgcattcaggacagccagattcagatatggtgcacaggccagtgaatgaaaatgatatcctgctggttcacagagattctatttttaggagtagctgtgaagttgtgtcaaaagcaaattgtgcaaagctaaagcaagggattgctgtacggttccatggagaagaaggcatgggtcaaggtgttgtgcgtgagtggtttgatattctgtccaatgagatagtcaatcctgattatgcattgtttacccagtcagctgatggaacaacttttcagcctaatagcaactcttatgtaaatcctgatcacttgaactattttcggtttgctgggcagatcttgggattagcgttgaaccacaggcagctggtcaatatttacttcacacgatccttctacaagcacattcttggtattcctgtaaattaccaagatgtggcatccattgatccagaatatgcgaaaaatttgcaatggattttagataatgatataagtgatctgggtctagaactractttttctgttgagactgatgtgtttggagcaatggaagaggtgcctttgaaacctgggggtgggagtattcttgtgacacaaaataataaagagctactgctttctggcatgccagaaattgatgtgagtgattggataaaaaatacagaatacacaagtggctatgaaagagaagatccagttattcagtggttctgggaagttgtagaagacattactcaagaggagagagttcttctcttacagtttgttacgggcagttccagggtcccacatggtgggtttgctaatatcatgggtggaagtggattgcaaaactttacaatcgctgctgtgccatatactccaaatcttttaccaacttcaagcacatgcatcaacatgctcaagttacctgaatacccaagtaaagaaatactcaaggacagacttcttgtggcactacattgtggcagctatggttacacaatggcataatgaagtctggaaaactcctctgactactgatgcacaattcagaatggcagaagtaatttgggaaaatgtcaacaaaaaagcagcctaaatgcaacccataggcagggctgatgcttccaatttataaaggatcatcaggttttctgtttctctcttttcccttttatgttttctctgtttgtgatacaattagaaaatataaaatcacagtagattttattttttaaaatgctaactgaaagtaatagagactgtcctttttcataattaattttatccaagattgtattaaggcaaaatctgattctacattccacctctgctatgtaactgtcttgttaaaagggtgttttctcctaatttctgatatattatatgaggtcatccagctggtgtgttcttttgcatgtaaactgccatttatattttagaaaactattgtatagaatggatttagattgtctataaagccacaaatacgtattttgccacagtgtattctatattgcaatgatttttttagcattttaatattttaatatatattgtaaaatttagactgatgatactaacagttgatgaaatgacatataatttatatatgaaagcttacgctatattgtatgaattatttgcatctttcagtggccagttttccatatgtatatattatggtctcaatgtttttcttacgcctcattttaatttataatgaaggtaaaattaaaatgtattttaccacgtttcttttcattacttttatctgtgagctctgacacatctgaaaaagtaatctgatgtgcaaattataatttaaatatgttaatttttttgcttcttaaatttgcttttcatcattaaaatgtcaagttcaagtgatatgtgcctaatatcacttggatgttggtgggtttttgaatttttgggtggttaatcagttttattttgaaaagacgtacttgaatagttacagcatatgtttgaacaggaagtaggaacatgcatacacgaagaaatgctaacggaaggatttgttatgtttaggatcttcccttggaaactaaaaatagaatattaatgacattactgtttgtagaatgacatatgcagattttctcataagcagtcattgtgtttgccagtaatgtttgagagacatgtaagttgaaagttttgctaaattataaagctcctttaattcgttggttttgattctcttattctcttgtcttttctaaatgttaacaaaatatatcttaacagattacatgaaatttaggaattatttaaaagttaccattagctctaaaattaagattcggatgctttatttatagtaactgaagctaataatgttttatgttttgattttttgaaatttaattgtagaagtcactgccttctgagttttcaaatagataaccacctttaatattacactgcttataatactaatgtttacagatatgtttctgtttataaccatataatacattggctttgtcatattagttttttttgcaagtagttatgtaaaagagatagataataaaatattaaataactgagtgtggtggcttatgtctgtaatctcagc

SEQ ID NO: 850 - DNA, 1113 bp, Homo sapiens
atttggttgaggacgcagccaaactatgtcagtctcttatttgccaacaaaagcatcctaactgatagaggccagacagatttgtttctttttgttttttcaatcttttgttgtgaagaagtaagcataaactctcaataggttacgttttacaagcctctgatgaagttcaaaggacaaccatgcttaggatttccaggacaacctggaaaaaaaaacaggttgagaaataggtgtgttaatctcccttccctctgctcctccctctggccttcctttctttgatggaataggccctaggacacctttctaaaaagactccctgtggtgttcagaatcactcctacagtcaggttctccacaatggatctcagtgctgcaagtcaccgcatacctctaagtgatggaaacagcattcccatcatcggacttggtacctactcagaacctaaatcgacccctaagggagcctgtgcaacatcggtgaaggttgctattgacacagggtaccgacatattgatggggcctacatctacgtgcggagggaagatatcttctactgtggaaagctatgggctacaaatcatgtcccagagatggtccgcccaaccctggagaggacactcagggtcctccagctagattatgtggatctttacatcattgaagtacccatggcctttaagccaggagatgaaatataccctagagatgagaatggcaaatggttatatcacaagtcaaatctgtgtgccacttgggaggcgatggaagcttgcaaagaygctggcttggtgaaatccctgggagtgtccaattttaaccgcaggcagctggagctcatcctgaacaagccaggactcaaacacaagccagtcagcaaccaggttgagtgccatccgtatttcacccagccaaaactcttgaaattttgccaacaacatgacattgtcattactgcatatagccctttggggaccagtaggaatccaatctggaggcagctccataaacttgccttgcttgatcttcccatactacgagtaactctccattcagtgcatactctgcactcagagaaactggttacaggtgacctgcagtgtcctggt

SEQ ID NO: 851 - DNA, 2986 bp, Homo sapiens
atttggttgaggacgcagccaaactatgtcagtctcttatttgccaacaaaagcatcctaactgatagaggccagacagatttgtttctttttgttttttcaatcttttgttgtgaagaagtaagcataaactctcaataggttacgttttacaagcctctgatgaagttcaaaggacaaccatgcttaggatttccaggacaacctggaaaaaaaaacaggttgagaaataggtgtgttaatctcccttccctctgctcctccctctggccttcctttctttgatggaataggccctaggacacctttctaaaaagactccctgtggtgttcagaatcactcctacagtcaggttctccacaatggatctcagtgctgcaagtcaccgcatacctctaagtgatggaaacagcattcccatcatcggacttggtacctactcagaacctaaatcgacccctaagggagcctgtgcaacatcggtgaaggttgctattgacacagggtaccgacatattgatggggcctacatctaccaaaatgaacacgaagttggggaggccatcagggagaagatagcagaaggaaaggtgcggagggaagatatcttctactgtggaaagctatgggctacaaatcatgtcccagagatggtccgcccaaccctggagaggacactcagggtcctccagctagattatgtggatctttacatcattgaagtacccatggcctttaagccaggagatgaaatataccctagagatgagaatggcaaatggttatatcacaagtcaaatctgtgtgccacttgggaggcgatggaagcttgcaaagaygctggcttggtgaaatccctgggagtgtccaattttaaccgcaggcagctggagctcatcctgaacaagccaggactcaaacacaagccagtcagcaaccaggttgagtgccatccgtatttcacccagccaaaactcttgaaattttgccaacaacatgacattgtcattactgcatatagccctttggggaccagtaggaatccaatctgggtgaatgtttcttctccacctttgttaaaggatgcacttctaaactcattggggaaaaggtacaataagacagcagctcaaattgttttgcgtttcaacatccagcgaggggtggttgtcattcctaaaagctttaatcttgaaaggatcaaagaaaattttcagatctttgacttttctctcactgaagaagaaatgaaggacattgaagccttgaataaaaatgtccgctttgtagaattgctcatgtggcgcgatcatcctgaatacccatttcatgatgaatactgactgcmgggagttcctgaacagatttttcactcccaygagtgccaagacggtrcaatgsgtagtcccctagatgtgaaaatgaagagagagggttttaccatcctgagaagaaataatgatggaaacatgtttaatgtttgtgcagtgtaaatgactttgactcagtcacattgaagtaaaaatattaaaatctgttgaaataactcttaggaaattatcaactaattttttcagatcagtatcttctagattccagacagaaaaaaattacacttcagaaaagacatcaaaggcaacatatgacaacaagtaatttatgaatctgggtagtagcgttggtaatctgagttctttaagggttmacaggacaacgaagtgcatgtggcagtgtgctggcagtggccttgaggctttggaccattggttacaaaacagacacagccaagataagatccacacacacattattaacaaggaagtgatttgctgcaccttgagttgagaggrctacatgtagaaaagtcttaaaatagagctaaacaccacagtggtcaacaaagccatcataatgttggtgtttgtttccctccaatgtatgtatgtttagtttttatccaacctgaggaatgaaaacttaactggatctctcttgcatccttaaagggcctgagtctcaacatggctgctgatccatacttacacatcttactgtcaatcttgcctacattgattatagaaccactattacgtgaaaaggcttgaaacaaccaacatatacaaataaaaccctgccttgtaaaatagtaaaagagaagccatatattggcttttcttcttaacttgggagatatattgaaacaaggtgctttataagattattgtacttaagactttaatagtgttacttggatagcttatatgaattttgagaattttatatgaattttgagaaagcaagttcaaaagaactctggtaattttcctgtatgtacaatttaaagagtgaataagattattagaattcagcaatagagatatatctattttcaattcaactacagaaatatattttattggccgggygyggtggctsatgcctataatcccagcactttgggaggccaaggtgggcagatcaggaggtcaggagatcgagaccatcytggctaacaaggtgaaaccccgtctctactaaaaatacaaaaaattagccaggcgcggtggcgggggcctgtaatcccagctactcaggaggctgaggcagaagaatggcrtgaacccgggaggaggagcttgcagtgagccgagatagcgccactgcagtccggcctgggtgaaagagcgagactccgtctcaaaaacaaaaaaaaaagaaaagaaatatattttattcattcacattaggtcactgtcatactgtcataggatgagagagttcttcaaaaattatgttttcccaagatcagttgcttatagataatgttcaatgacctcaagacatatatttttgagaaattatcattttaaaaaatttggtctatactgattgttttcactgattccaatattattacttataacactgacctctggaaaatattttgttcacaagaaataataaagtataatgatttgttgcatc

SEQ ID NO: 852 - DNA, 2236 bp, Homo sapiens
gggcctcccaaagtgctgggattasaggcatgagccaccgtgcccagcctcaaagcatattttaaaggatagaaataaacagccatatgaagagatacagacagggcggtctggaagggtccagagcaggagcttctatctccatagagttggggttacgtcaccctctgggcacattctgtcagcctccacacgttcagcyctcagaagctcccgaaccctgtcctttgggccttttatggagaactccattggctgtccatgactgaagcatggacaactgtgataatgtgattgggcaaaaagggtctgatctaagcccagcaaggccagtccagattctttgggcctttgtgcagcattcctttctccagggtatggggcaaggacccactctggaatgaggatcctacaacccacaatcagattagagtcctgccttgggcagctgaaaagaggacaggagaaggtcagagagacgaaaggctgttttttgaggcctgaggcaccccaacatgacaacgtaagactgtaaccatggtcatgtgagttatgagctaggaaccctggacgaaaccarcacatatacaatcatctcccacctcccaacgcctttactttcacagcctctgcagcaaactgcggtcactrtaatcgctcctgtggcacagaggcatacccaggggaatctgcccagggggccactctgtgcccacgtgggaacccacacctgcttgtaaagcctcccctccctytgaccagcaaccaggacagtttgttgttccaagcagtgggctcatgtctgttttggctcagaacagggtggggagagcgggccagggacccgcaggaaggcttatccttgagattgcgtgggagacacaacaaggggtgggggcccgcaggcggggcggggcgaagcaggtgatatcaagcccagagccccagcctctccccacagtctcaccatggccygcaccgtggtgctcatcaccggctgttcctcgggcatcggcctgcacttggccgtacgtctggcttcagatccatcccagagcttcaaagtgtatgccacgttgagggacctgaaaacacagggccggctgtgggaggcggcccgggccctggcatgccctcmgggatccctggagasgttgcagctggacgtaagggactcaaaatccgtggccgctgcccgggaacgcgtgactgagggccgcgtggacgtgctggtgtgtaacgcaggcctgggcctgctggggccgctggaggcgctgggggaggacgccgtggcctctgtgctggacgtgaatgtagtagggactgtgcggatgctgcaggccttcctgccagacatgaagaggcgcggttcgggacgcgtgttggtgaccgggagcgtgggaggattgatggggctgcctttcaatgacgtttattgcgccagcaagttcgcgctcgaaggcttatgcgagagtctggcggttctgctgctgccctttggggtccacttgagcctgatcgagtgcggcccagtgcacaccgccttcatggagaaggtgttgggcagcccagaggaggtgctggaccgcacggacatccacaccttccaccgcttctaccaatacctcgcccacagcaagcaagtctttcgcgaggcggcgcagaaccctgaggaggtggcggaggtcttcctcaccgctttgcgcgccccgaagccgaccctgcgctacttcaccaccgagcgcttcctgcccctgctgcggatgcgcctggacgaccccagcggctccaactacgtcaccgccatgcaccgggaagtgttcggcgacgttccggcaaaggccgaggctggggccgaggctgggggcggggccgggcctggggcagaggacgaggccgggcgcrgtgcggtgggggaccctgagctcggcgatcctccggccgccccgcagtaaaggcttcctcagccgctgtctcccgcgcccttctttgtcccctgggtctgtgtggtccctggggatggggcggyggtagcagctgtgggtggctaattaagatagatcgcgttagccagttttaccagcgcagctaggcgcgatggctgtcgcctgtaatgccagcgctttgggaggcggaggcaggaggatcgctcaagccccggagttggagaccagccagagcaacacagtgagacccccatctctacaaaaataaagaaaatttaaaaatcagcaca

SEQ ID NO: 853 - DNA, 4032 bp, Homo sapiens
gtccttcccacccttagtcccaggcatctgactaccgggaacctcagccagagtccgggagccccccaccccgtccaggagccaacagagcccccgtcttgctggcgtgagaatacattgctctcctttggttgaatcagctgtccctcttcgtgggaaaatgaaccagaagacaatcctcgtgctcctcattctggccgtcatcaccatctttgccttggtttgtgtcctgctggtgggcaggggtggagatgggggtgaacccagccagcttccccattgcccctctgtatctcccagtgcccagccttggacacaccctggccagagccagctgtttgcagacctgagccgagaggagctgacggctgtgatgcgctttctgacccagcrgctggggccagggctggtggatgcagcccaggcccrgccctcggacaactgtgtcttctcagtggagttgcagctgcctcccaaggctgcagccctggctcacttggacagggggagccccccacctgcccgggaggcactggccatcgtcttctttggcaggcaaccccagcccaacgtgagtgagctggtggtggggccactgcctcacccctcctacatgcgggacgtgactgtggagcgtcatggaggccccctgccctatcaccgacgccccatgttgttccaagagtacctggacatagaccagatgatcttcgacagagagctgccccaggcttctgggcttctccaycactgttgcttctacaagcrccggggacggaacctggtgacaatgaccacggctccccgtggtctgcaatcaggggaccgggccacctrgtttggcctctactacaacatctcgggcgctgggttcttcctgcaccacgtgggcttggagctgctagtgaaccacaaggcccttgaccctgcccgctggactatccagaaggtgttctatcaaggccgctactacgacagcctggcccagctggaggcccagtttgaggccggcctggtgaatgtggtgctgatcccagacaatggcacaggtgggtcctggtccctgaagtcccctgtgcccccgggtccagctccccctctrcagttcyatccccaaggcccccgcttcagtgtccagggaagtcragtggcctcctcactgtggactttctcctttggcctcggagcattcagtggcccaaggatctttgacgttcgcttccaaggagaaagactagtttatgagataagcctccaagaggccttggccatctatggtggaaattccccagcagcaatgacracccgctatgtggatggaggctttggcatgggcaagtacaccacgcccctgacccgtggggtggactgccccwacttggccacctacgtggactggcacttccttttggagtcccaggcccccaagacaatacrtgatgccttttgtgtgtttgaacagaaccagggcctccccctgyggcgacaccactcagatctctactcgcactactttgggggtcttgcggaaacggtgctggtcgtcagatctatgtccaccttgctcaactatgactatgtgtgggatacggtcttccaccccagtggggccatagaaatacgattctatgccacgggctacatcagctcggcattcctctttggtgctactgggaagtacgggaaccaagtgtcagagcacaccctgggcacggtccacacccacagcgcccacttcaaggtggatctggatgtagcaggactggagaactgggtctgggccgaggatatggtctttgtccccatggctgtgccctggagccctgagcaccarctgcagaggctgcaggtgacccggaagctgctggagatggaggagcaggccgccttcctcgtgggaagcgccacccctcgctacctgtacctggccagcaaccacagcaacaagtggggtcacccccggggctaccgcatccagatgctcagctttgctggagagccgctgccccaaaacagctccatggcgagaggcttcagctgggagaggtaccagctggctgtgacccagcggaaggaggaggagcccagtagcagcagcgttttcaatcagaatgacccttgggcccccactgtggatttcagtgacttcatcaacaatgagaccattgctggaaaggatttggtggcctgggtgacagctggttttctgcatatcccacatgcagaggacattcctaacacrgtgactgtggggaacrgcgtgggcttcttcctccgaccctayaacttctttgacgaagacccctccttctactctgccgactccatctacttccgaggggaccaggatgctggggcctgcgaggtcaaccccctagcttgcctgccccaggctgctgcctgtgcccccgacctccctgccttctcccacgggggcttctctcacaactaggcggtcctgggatggggcatgtggccaagggctccagggccagggtgtgagggatggggagcagctgggcactgggccggcagcctggttccctcttycctgtgccaggactctctttcttccactaccctccctcgcatccgcctctgagccaggagcctcctgaccctgtgatgcctgacacaggggacactgaaccttgttgatgccagctgtactgagttctcatccacagaggccaggcatggcccagcctggagccgtggccgagggcttccctagatggttccctttgttgctgtctggctttcccgaatctttttaggccacctccaaggactctaaaagggggctattccctggagaccccagagtagggttgccagtcctgcaagtccatagctgagctggaaaggatgcttctgctcacattccctctcatccaggtcctttccttctcgtcttcctctctctcacctacttcctcctcctcctcctgttcctgccttctcttctatcctgcaatttctcccgaatcctgaggggatatccctatgtcccagcccctggtactcccccagccctcagttttcagtcaagttccgtctcctctccagccctatggaagtctcaaggtcacgggacccctaatcagagtggccaatccctgtgtgtcgttcccttgtgtctgttgcttattgggagtaggagttgctcctacccctgtcctggggctgggtgtgtttcaggacagctgcttctgtgcatttgtgtctgcctgcctcatgctctctatagaggaggatggtcatcgtgacagcagcagctcaagttagcatttcaagtgatttgggggtgcaatgataatgaagaatggccattttgtaccagggctctgtattctgcaacagcctgtttgggaggctggagtggaaacaaagggtgggcatcaaagatgagaagccaaagcccctacaactccagccacccagccaggaggggctgtccaatcacattcaggcatgcgaatgagctgggccctgggtgaggtgggggtctggcctagtggggaggggcctggcctgggtggggcagggcctggcctggtccaggcttgggctccattcccatcactgctgtccctcctgaggtctggattggggatggggacaaagaaatagcaagagatgagaaacaacagaaacttttttctctaaaggactggttaaatcaattctgatacagccttacaatacaatagtatgcagctaaaaaataattgtatgtctttatatactaatatgtaataatcttcaggtgaaaaaggcaagccacagaaatgtgtatagcgcacttcccatttgtgtttcagaaaggagtagaatataaayacataattgcttatgtatgcctattcagaataaatgggtaacactgattacttttgggaggggaaccagtaggttgaggacaggagagggaagggtcttaacacttacacccttttgtacattttgaattttgaaccatgtgactgtattacctattcaaaataaacaataaatgggcccaaacaggaa

SEQ ID NO: 854 - DNA, 3707 bp, Homo sapiens
tarcagagcaatcaccaccaagcctggaataactgcaagggctctgctgacatcttcctgaggtgccaaggaaatgaggatggaggaaggaakgaatgttctccatgactttgggatccagtcarcacattacctccrggtgaattacyaagactcccaggactggttcatcttggtgtccgtgatcgcagwcctcaggaatgccttctacgtcctcttccccatctrgttccatcttcmggaagctgtgggcattaaactccttygrgtagctgtgattggagactrrctcaacctcgtctttaasyggattctctttrgacagyrtccatactggtgggttttggatactgactactacagcaacacttccgtgcccctgataaagcagttccctgtaayctgtvagaytggacyagggagcccctctsgccwtgccatgggcacagcaggtgtatactacgtgatggtcacatctactctttccatctttcagggaaagataaagccracctacagatttcggtgcttgaatgtcattttgtkgttgggattctgggctgtgcagctgaatgbctgtctgtcayraatctamcttgctgctcattttcctcatcaagttgttgctggagtcctgtcavgcattgctgttrcagaaactttcagccacatccacagcatctataatgccagcctcaagaaatattttcycattaccttcttcctgttcagcttcgccatcvgattttatctgctgctcaagggactgggtgtagacctcctgwggactctggagaaarccyagaggtggtgcgagcagccagaatgggtccacattgacaycacacyctttgccagcctcctcaagaamcyggkcacgctctttskcctggggctggctctcaactccagcatgtacagggagagctgcaaggggaaactcagcaagtggctcccattcygcctcagcyctattgtagcctccctcgtcctcctgcacgtctttgactccttgaaacccccatcccaagtcgagctggtcytctacgtcttgtccttctgcaagagtgcggtagtgcccctggcatccktcagtgtcawcccctactgcctcgccyaggtcctgggccagccgcacaagaagtcgttgtaagagatgtggagtcttcggtgttyaaagtcaacaaccatgccagggattgaggaggactactatttgaagcaatgggcactggtatttggagcaagtgacatgccatccattctgccgtcgtggaattaaatcacggatggcagattggagggtcgcctggcttattcccatgtgtgactccagcctgccctcagcacagactctttcagatggaggtgccatatcacgtacaccatatgcaagtttcccgccaggaggtcctcctctctctacttgaatactctcacaagtagggagctcactcccactggaacagcccattttatctttgaatggtcttctgccagcccattttgaggccagaggtgctgtcagctcaggtggtcctcttttacaatcctaatcatattgggtaatgtttttgaaaagctaatgaagctattgagaaagacctgttgctagaagttgggttgttctggattttcccctgaagacttacttattcttccgtcacatatacaaaagcaagacttccaggtagggccagctcacaagcccaggctggagatcctaactgagaattttctacctgtgttcattcttaccgagaaaaggagaaaggagctctgaatctgataggaaaagaaggctgcctaaggaggagtttttagtatgtggcgtatcatgcaagtgctatgccaagccatgtctaaatggctttaattatatagtaatgcactctcagtaatgggggaccagcttaagtataattaatagatggttagtggggtaattctgcttctagtattttttttactgtgcatacatgttcatcgtatttccttggatttctgaatggctgcagtgacccagatattgcactaggtcaaaacattcaggtatagctgacatctcctctatcacattacatcatcctccttataagcccagctctgctttttccagattcttccactggctccacatccaccccactggatcttcagaaggctagagggcgactctggtggtgcttttgtatgtttcaattaggctctgaaatcttgggcaaaatgacaaggggagggccaggattcctctctcaggtcactccagtgttacttttaattcctagagggtaaatatgactcctttctctatcccaagccaaccaagagcacattcttaaaggaaaagtcaacatcttctctctttttttttttttttgagacagggtctcactatgttgcccaggctgctcttgaattcctgggctcaagcagtcctcccaccmtaccacagcgtcccgcgtagctgggactacaggtgcaagccactatgtccagctagccaactcctccttgcctgcttttctttttttttctttttttgagacggcgcacctatcacccaggctggagtggagtggcacgatcttggctcactgcaacctcttcctcctggttcaagcgattctcatgtctcagcctcctcagtagctaggactaccggcgtgcaccaccatgccaggctaatttttatatttttagaattttagaagagatgggatttcatcatgttggccaggctggtctcgaactcctgacctcaagtgatccacctgccttggcctcccaaggtgctaggattacaggcatgagccaccgcaccgggccctccttgcctgtttttcaatctcatctgatatgcagagtatttctgccccacccacctaccccccaaaaaaagctgaagcctatttatttgaaagtccttgtttttgctactaattatatagtataccatacattatcattcaaaacaaccatcctgctcataacatctttgaaaagaaaaatatatatgtgcagtattttattaaagcaacattttatttaagaataaagtcttgttaattactatattttagatgcaatgtgatctgaagtttctaattctggcccaactaaatttctagctctgtttccctaaacaaataatttggtttctctgtgcctgcattttccctttggagaagaaaagtgctctctcttgagttgaccgagagtcccattagggatagggagwcttaaawgcatccacaggggcacaggcagagttgagcacataaacggaggcccaaaatcagcatagaaccagaaagattcagagttggccaagaatgaacattggctaccagaccacaagtcagcatgagttgctctatggcatcaaattgcaacttgagagtagatgggcagggtcactatcaaattaagcaatcagggcacacaagttgcagtaacacaacaagactaggccagctctggaatccagtaactcagtgtcagcaaggttttgggttatagttcaagaaagtctaaacagagccagtcacagcaccaaggaatgctcaagggagctattgcaggtttctctgctaagagatttatttcatcctgggtgcagggttcgacctccaaaggcctcaaatcatcaccgtatcaatggatttcctgagggtaagctccgctatttcacacctgaactccgg

SEQ ID NO: 855 - DNA, 3749 bp, Homo sapiens
tarcagagcaatcaccaccaagcctggaataactgcaagggctctgctgacatcttcctgaggtgccaaggaaatgaggatggaggaaggaakgaatgttctccatgactttgggatccagtcarcacattacctccrggtgaattacyaagactcccaggactggttcatcttggtgtccgtgatcgcagwcctcaggaatgccttctacgtcctcttccccatctrgttccatcttcmggaagctgtgggcattaaactccttygrgtagctgtgattggagactrrctcaacctcgtctttaasyggattctctttrgacagyrtccatactggtgggttttggatactgactactacagcaacacttccgtgcccctgataaagcagttccctgtaayctgtvagaytggacyagggagcccctctsgccwtgccatgggcacagcaggtgtatactacgtgatggtcacatctactctttccatctttcagggaaagataaagccracctacagatttcggtgcttgaatgtcattttgtkgttgggattctgggctgtgcagctgaatgbctgtctgtcayraatctamcttgctgctcattttcctcatcaagttgttgctggagtcctgtcavgcattgctgttrcagaaactttcagccacatccacagcatctataatgccagcctcaagaaatattttcycattaccttcttcctgttcagcttcgccatcvgattttatctgctgctcaagggactgggtgtagacctcctgwggactctggagaaarccyagaggtggtgcgagcagccagaatgggtccacattgacaycacacyctttgccagcctcctcaagaamcyggkcacgctctttskcctggggctggctctcaactccagcatgtacagggagagctgcaaggggaaactcagcaagtggctcccattcygcctcagcyctattgtagcctccctcgtcctcctgcacgtctttgactccttgaaacccccatcccaagtcgagctggtcytctacgtcttgtccttctgcaagagtgcggtagtgcccctggcatccktcagtgtcawcccctactgcctcgccyaggtcctgggccagccgcacaagaagtcgttgtaagagatgtggagtcttcggtgttyaaagtcaacaaccatgccagggattgaggaggactactatttgaagcaatgggcactggtatttggagcaagtgacatgccatccattctgccgtcgtggaattaaatcacggatggcagattggagggtcgcctggcttattcccatgtgtgactccagcctgccctcagcacagactctttcagatggaggtgccatatcacgtacaccatatgcaagtttcccgccaggaggtcctcctctctctacttgaatactctcacaagtagggagctcactcccactggaacagcccattttatctttgaatggtcttctgccagcccattttgaggccagaggtgctgtcagctcaggtggtcctcttttacaatcctaatcatattgggtaatgtttttgaaaagctaatgaagctattgagaaagacctgttgctagaagttgggttgttctggattttcccctgaagacttacttattcttccgtcacatatacaaaagcaagacttccaggtagggccagctcacaagcccaggctggagatcctaactgagaattttctacctgtgttcattcttaccgagaaaaggagaaaggagctctgaatctgataggaaaagaaggctgcctaaggaggagtttttagtatgtggcgtatcatgcaagtgctatgccaagccatgtctaaatggctttaattatatagtaatgcactctcagtaatgggggaccagcttaagtataattaatagatggttagtggggtaattctgcttctagtattttttttactgtgcatacatgttcatcgtatttccttggatttctgaatggctgcagtgacccagatattgcactaggtcaaaacattcaggtatagctgacatctcctctatcacattacatcatcctccttataagcccagctctgctttttccagattcttccactggctccacatccaccccactggatcttcagaaggctagagggcgactctggtggtgcttttgtatgtttcaattaggctctgaaatcttgggcaaaatgacaaggggagggccaggattcctctctcaggtcactccagtgttacttttaattcctagagggtaaatatgactcctttctctatcccaagccaaccaagagcacattcttaaaggaaaagtcaacatcttctctctttttttttttttttgagacagggtctcactatgttgcccaggctgctcttgaattcctgggctcaagcagtcctcccaccmtaccacagcgtcccgcgtagctgggactacaggtgcaagccactatgtccagctagccaactcctccttgcctgcttttctttttttttctttttttgagacggcgcacctatcacccaggctggagtggagtggcacgatcttggctcactgcaacctcttcctcctggttcaagcgattctcatgtctcagcctcctcagtagctaggactaccggcgtgcaccaccatgccaggctaatttttatatttttagaattttagaagagatgggatttcatcatgttggccaggctggtctcgaactcctgacctcaagtgatccacctgccttggcctcccaaggtgctaggattacaggcatgagccaccgcaccgggccctccttgcctgtttttcaatctcatctgatatgcagagtatttctgccccacccacctaccccccaaaaaaagctgaagcctatttatttgaaagtccttgtttttgctactaattatatagtataccatacattatcattcaaaacaaccatcctgctcataacatctttgaaaagaaaaatatatatgtgcagtattttattaaagcaacattttatttaagaataaagtcttgttaattactatattttagatgcaatgtgatctgaagtttctaattctggcccaactaaatttctagctctgtttccctaaacaaataatttggtttctctgtgcctgcattttccctttggagaagaaaagtgctctctcttgagttgaccgagagtcccattagggatagggagwcttaaawgcatccacaggggcacaggcagagttgagcacataaacggaggcccaaacagaccacaagtcagcatgagttgctctatggcatcaaattgcaacttgagagtagatgggcagggtcactatcaaattaagcaatcagggcacacaagttgcagtaacacaacaagactaggccagctctggaatccagtaactcagtgtcagcaaggttttgggttatagttcaagaaagtctaaacagagccagtcacagcaccaaggaatgctcaagggagctattgcaggtttctctgctaagagatttatttcatcctgggtgcagggttcgacctccaaaggcctcaaatcatcaccgtatcaatggatttcctgagggtaagctccgctatttcacacctgaactccggagtctgtatattcagggaagattgcattctcctactggatttgggctctcagagggcgttgtgggaaccaggcccctcacagaatcaaatggtcc

SEQ ID NO: 856 - DNA, 2663 bp, Homo sapiens
tgttagaaytctgatttcagctctcagcatccaccatgcatctcaagatagtcctggcgttcctggcactgtccctcattaccatctttgccctggcctatgttttgctgaccagcccaggtggttccagccagcctccccactgcccctctgtatcccatagggcccagccctggccacaccctggccagagccagctgtttgcagacctgagccgagaggagttgacagctgtgatgcgctttctgacccagcggctggggccagggctggtggacgcagcccaggctcagccctcggacaactgcatcttctcagtggagctgcagctgccccccaaggctrcagccctggcccacctggacagggggagccccccacctgcccgggaggcactggccatcgtcctctttggtggacaaccccaacccaatgtgagtgagctggtggtggggccgctgcctcacccctcgtacatgcgggatgtgactgtggagcgtcacggcgggcccctgccctatcaccgtcgcccggtgctgagagctgagtttacacagatgtggaggcatctgaaagaggtggagctacccaaggcacccatcttcctgtcgtccaccttcaactacaatggctctaccctggcagctgtgcatgccacccctcggggcttgcgctcaggggaccgagctacctggatggccctctaccataacatctcaggggttggtcttttccttcaccccgtggggctggagctactactggaccacagggccctggaccctgcccactggactgtccagcaggtcttctaccttgggcactactatgcagacttgggccagttggaacgggagtttaagtctggccggttggaagtggttagagtccctctacctccaccaaatggagcttcatccctgaggtctcggaactctccaggtcctcttccccctcttcagttctcgccccagggttcccagtacagtgtgcaaggaaacctggtggtatcctccctctggtcatttacctttggccatggggtgttcagcggcctgaggatttttgatgttcggttccagggtgagcgaatagcctatgaagtcagtgtccaggagtgtgtatctatctatggtgccgattcacccaagacgatgctgactcgctatttggatagcagctttggactcggccgtaacagccgaggcttggtgcggggagtggactgcccctatcaagccacgatggtggacatccatatattagtgggcaaaggggcagtccagctgcttccaggggctgtgtgtgtatttgaggaagcccagggaytgccccttcgaaggcaccacaattaccttcaaaatcatttctatggtggtttggccagctcagcccttgtggtcaggtctgtgtcatctgtgggcaactatgactacatttgggactttgtgttgtacccaaatggggcacttgaagggcgggtccatgccacgggttatatcaacacagctttcctgaaagggggagaggagggcctcctctttgggaaccgtgtgggggaaagagtgctgggaacggtgcacacacatgccttccacttcaagctggacctggatgtggcagggctgaaaaactgggtggtagctgaagacgtggtgtttaaacctgtggctgccccctggaacccggagcactggctacagcgcccacagctgactcggcaggtcctgggaaaggaggacctgacagctttttccttgggaagccccctaccccgctacctctacctggctagcaaccagactaatgcgtggggtcaccagcgcgggtaccgaatccagatccacagcccccttggcatacacatacccctggagagtgacatggagagggccctcagctgggggagataccagcttgtggtgacccagagaaaggaggaggagtcacagagcagtagcatctatcaccagaatgacatctggacacccacagttacctttgctgacttcatcaacaatgaaaccctcttaggagaggatctggtggcttgggtcacagccagcttcctgcacattccccatgccgaggacatcccaaacacrgtgaytctggggaacagagttggcttcttgctccgaccctataacttctttgatgaggacccctccatcttctcccctggcagtgtctactttgagaagggccaggatgctgggctctgcagcatcaatcctgtggcctgcctccccgacctggcagcctgtgtcccggacttaccccctttctcttaccacggcttctagtcctgagggtgtggcgggcggcgtggttaggcacatgtacttttccctgtttctactttctattctccgtgtttttatcacacctgctccccagattcccaccccctcaatgttcctctcacacgaaacccccatcagtccctttggttaattcttacttcctgttcatctctaaagtgttaaattataaaaatgatttttaaatattcaaagaaaaatatcacaaatcctactactcagaaataggtggtcacattacatcagacatctctttatgcatgtgcattcaaaaggaagagtagatagaattttgtaaaacagatgttgtatgtaatttataataaaaagtattagagg

SEQ ID NO: 857 - DNA, 2582 bp, Homo sapiens
tgttagaaytctgatttcagctctcagcatccaccatgcatctcaagatagtcctggcgttcctggcactgtccctcattaccatctttgccctggcctatgttttgctgaccagcccaggtggttccagccagcctccccactgcccctctgtatcccatagggcccagccctggccacaccctggccagagccagctgtttgcagacctgagccgagaggagttgacagctgtgatgcgctttctgacccagcggctggggccagggctggtggacgcagcccaggctcagccctcggacaactgcatcttctcagtggagctgcagctgccccccaaggctrcagccctggcccacctggacagggggagccccccacctgcccgggaggcactggccatcgtcctctttggtggacaaccccaacccaatgtgagtgagctggtggtggggccgctgcctcacccctcgtacatgcgggatgtgactgtggagcgtcacggcgggcccctgccctatcaccgtcgcccggtgctgagagctgagtttacacagatgtggaggcatctgaaagaggtggagctacccaaggcacccatcttcctgtcgtccaccttcaactacaatggctctaccctggcagctgtgcatgccacccctcggggcttgcgctcaggggaccgagctacctggatggccctctaccataacatctcaggggttggtcttttccttcaccccgtggggctggagctactactggaccacagggccctggaccctgcccactggactgtccagcaggtcttctaccttgggcactactatgcagacttgggccagttggaacgggagtttaagtctggccggttggaagtggttagagtccctctacctccaccaaatggagcttcatccctgaggtctcggaactctccaggtcctcttccccctcttcagttctcgccccagggttcccagtacagtgtgcaaggaaacctggtggtatcctccctctggtcatttacctttggccatggggtgttcagcggcctgaggatttttgatgttcggttccagggtgagcgaatagcctatgaagtcagtgtccaggagtgtgtatctatctatggtgccgattcacccaagacgatgctgactcgctatttggatagcagctttggactcggccgtaacagccgaggcttggtgcggggagtggactgcccctatcaagccacgatggtggacatccatatattagtgggcaaaggggcagtccagctgcttccaggggctgtgtgtgtatttgaggaagcccagggaytgccccttcgaaggcaccacaattaccttcaaaatcatttctatggtggtttggccagctcagcccttgtggtcaggtctgtgtcatctgtgggcaactatgactacatttgggactttgtgttgtacccaaatggggcacttgaagggcgggtccatgccacgggttatatcaacacagctttcctgaaagggggagaggagggcctcctctttgggaaccgtgtgggggaaagagtgctgggaacggtgcacacacatgccttccacttcaagctggacctggatgtggcagggctgaaaaactgggtggtagctgaagacgtggtgtttaaacctgtggctgccccctggaacccggagcactggctacagcgcccacagctgactcggcaggtcctgggaaaggaggacctgacagctttttccttgggaagccccctaccccgctacctctacctggctagcaaccagactaatgcgtggggtcaccagcgcggataccagcttgtggtgacccagagaaaggaggaggagtcacagagcagtagcatctatcaccagaatgacatctggacacccacagttacctttgctgacttcatcaacaatgaaaccctcttaggagaggatctggtggcttgggtcacagccagcttcctgcacattccccatgccgaggacatcccaaacacrgtgaytctggggaacagagttggcttcttgctccgaccctataacttctttgatgaggacccctccatcttctcccctggcagtgtctactttgagaagggccaggatgctgggctctgcagcatcaatcctgtggcctgcctccccgacctggcagcctgtgtcccggacttaccccctttctcttaccacggcttctagtcctgagggtgtggcgggcggcgtggttaggcacatgtacttttccctgtttctactttctattctccgtgtttttatcacacctgctccccagattcccaccccctcaatgttcctctcacacgaaacccccatcagtccctttggttaattcttacttcctgttcatctctaaagtgttaaattataaaaatgatttttaaatattcaaagaaaaatatcacaaatcctactactcagaaataggtggtcacattacatcagacatctctttatgcatgtgcattcaaaaggaagagtagatagaattttgtaaaacagatgttgtatgtaatttataataaaaagtattagagg

SEQ ID NO: 858 - DNA, 2761 bp, Homo sapiens
cgcctcgcccggcgccccgcccctcccgctggatcccgcagccgcggctcttcccgacgcgttccgccttccccagctgtgcactctccatccagctgtgcgctctcgtcgggagkcccagccatgtccgacgagagagaggtagccgaggcagcgaccggggaagacgcctcttcgccgcctccgaaaaccgaggcagcgagcgacccccagcatcccgcggcctccgaaggggccgccgccgccgccgcctcrccgccactgctgcgctgcctagtgctcaccggctttggaggctacgacaaggtgaagctgcagagccggccggcagcgsccccggcccctgggcccggccagctgacgctgcgtctgcgggcctgcgggctcaacttcgcagacctcatggctaggcaggggctgtacgaccgtctcccgcckctgcctgtcactccgggcatggagggcgcgggtgttgtgatcgcagtgggcgagggagtcagcgaccgcaaggcaggagaccgggtgatggtgttgaaccggtcagggatgtggcaggaagaggtgactgtgccctcggtccagaccttcctgattcctgaggccatgacctttgaggaagctgctgccttgctcgtcaattacattacagcctacatggtcctctttgacttcggcaacctacagcctggccacagcgtcttggtacacatggctgcagggggtgtgggtatggctgccgtgcagctgtgccgtacagtggagaatgtgacagtgttcggaacggcctcggccagcaagcacgaggcactgaaggagaatggggtcacacatcccatcgactatcacacgactgactacgtggatgagatcaagaagatttcccctaaaggagtggacattgtcatggaccctctgggtgggtcagatactgccaagggctacaacctcctgaaacccatgggcaaagtcgtcacctatggaatggccaacctgctgacgggccccaaacggaacctgatggccctggcccggacatggtggaatcagttcagcgtgacagctctgcagctgctgcaggccaaccgggctgtgtgtggcttccacctgggctacctggatggtgaggtggagctggtcagtggtgtggtggcccgcctcctggctctgtacaaccagggccacatcaagccccacattgactcagtctggcccttygagaaggtggctgatgccatgaaacagatgcaggagaagaagaatgtgggcaaggtcctcctggttccagggccagagaagsagaactagggcaagtggctgtgagaccctagagaccagcgaagggagaagttgggaagctacgttctgttggccaccagacttgcatttcagcctctgtcataatgctctgccctccctcccccgaagktctctgtggtgatgaccgctctcccctgcccctccccgcttcctgacctctgaagaggttgggaagtgaccatttggatgtctgggccctgccaaggcgacagggagggtcagagggaggccggctgcttcctgcccccaccctttccccgggcctgctgtgctgcttttgtgccaaggttagccagtcccccctgttgtgttccatgtgctttcacctstgcctcatctttcctcccgtccctgccccgccacctccccaaagaattgaaacgtcagctcaggatatggggccaatctctgtgagtccagcatgtacctgtctctccctagtgtcccttcagcctgggctgaccagtgcccgcctctgggcttgaccagttcccaatctcgtcctctgtccccaacttcttaagcacaattgggcttcttccatctccaggttttctgccattcttaaccaaggctgcctcttccaacagggcgggaatcagacctactcccctaggtcacaactctgggaaggatacagagcccccacccttcactgagttctctggatttgttctcagtgccttagcaacgaaaacctgtgcttgtgtgtgtgtggcggcggggagggaggatcctgtttcccacctccttctcctcccctgtactccccagtgccttccttgttctggtggagctggggtttctctcctccccagtcccacaacactgccaaaaatctgtgtatgtgccattgggtggggcagccccaagcctcctggggaggcagggcaaaaacaggtgccctcatcgtggtctgtgccatgtcccgtctctatggtggttgaggagaaaggcggggaagcttcctcagccttgcrgatatgtgtggcatttactagccagagctctgaaaggcagtgctgtctgtttcttgtactgggaccaaagtaaaaatccaagcacattccccttgcagttaggggaggccctactgccttctcaaagcagrgaggcagcttatcaaactcagcccaaaactctgtttacatgggtggggagatggagcagggaagtacagagtgggatggtcaggacctgggccattgcaaccaaaatggggacttcctgggtagggaggtcactccctctactcmctgagctaggattagggagggttattgccccaaccattgcaatgggaggtggagggacaggctcagcctcctcattgtytaaatgaggcctaaatgtktgaagtgcgatttytgcttttgtgtaccccaccaccccattaccacagctgcctttgtgtgtttgtgtcaataaaaagccaaaccctgrr

SEQ ID NO: 859 - DNA, 1692 bp, Homo sapiens
cgcctcgcccggcgccccgcccctcccgctggatcccgcagccgcggctcttcccgacgcgttccgccttccccagctgtgcactctccatccagctgtgcgctctcgtcgggagkcccagccatgtccgacgagagagaggtagccgaggcagcgaccggggaagacgcctcttcgccgcctccgaaaaccgaggcagcgagcgacccccagcatcccgcggcctccgaaggggccgccgccgccgccgcctcrccgccactgctgcgctgcctagtgctcaccggctttggaggctacgacaaggtgaagctgcagagccggccggcagcgsccccggcccctgggcccggccagctgacgctgcgtctgcgggcctgcgggctcaacttcgcagacctcatggctaggcaggggctgtacgaccgtctcccgcckctgcctgtcactccgggcatggagggcgcgggtgttgtgatcgcagtgggcgagggagtcagcgaccgcaaggcaggagaccgggtgatggtgttgaaccggtcagggatgtggcaggaagaggtgactgtgccctcggtccagaccttcctgattcctgaggccatgacctttgaggaagctgctgccttgctcgtcaattacattacagcctacatggtcctctttgacttcggcaacctacagcctggccacagcgtcttggtacacatggctgcagggggtgtgggtatggctgccgtgcagctgtgccgtacagtggagaatgtgacagtgttcggaacggcctcggccagcaagcacgaggcactgaaggagaatggggtcacacatcccatcgactatcacacgactgactacgtggatgagatcaagaagatttcccctaaaggagtggacattgtcatggaccctctgggtgggtcagatactgccaagggctacaacctcctgaaacccatgggcaaagtcgtcacctatggaatggccaacctgctgacgggccccaaacggaacctgatggccctggcccggacatggtggaatcagttcagcgtgacagctctgcagctgctgcaggccaaccgggctgtgtgtggcttccacctgggctacctggatggtgaggtggagctggtcagtggtgtggtggcccgcctcctggctctgtacaaccagggccacatcaagccccacattgactcagtctggcccttygagaaggtggctgatgccatgaaacagatgcaggagaagaagaatgtgggcaaggtcctcctggttccagggccagagaagsagaaktagggcaagtggctgtgagaccctagagaccagcgaagggagaagttgggaagctacgttctgttggccaccagacttgcatttcagcctctgtcataatgctctgccctccctcccccgaatacagagtgggatggtcaggacctgggccattgcaaccaaaatggggacttcctgggtagggaggtcactccctctactcmctgagctaggattagggagggttattgccccaaccattgcaatgggaggtggagggacaggctcagcctcctcattgtytaaatgaggcctaaatgtktgaagtgcgatttytgcttttgtgtaccccaccaccccattaccacagctgcctttgtgtgtttgtgtcaataaaaagccaaaccctgr

SEQ ID NO: 860 - DNA, 3666 bp, Homo sapiens
acaagtcgatgaaaaatgaatttactgtaaattggttaacacaaatcgctgtagtaacatatctgctatgtgaaatttttaaaataaaaaccagggcggagaaggggagaaggagatctctttccaaggcccaccacccaaattctaattcttagttcacagatccaaataataataatgtgttgttctatgacttctagtattaaaagtaaatataaatttactctgcatattaaacatttacattattctaggacttctcctttaaattacgatagtacacacacaaaaaccttatttatctaattgcctttcgttggcacataaagacaaagatcgtttgcaacataatcgcgttctgatasgtttgaccctctctagtcttcgtagaaggtggccaaggtttccgttaccccggcgtccctcgggcaccgcggaaacgaaactccatcaggctccgccccacggtctgcggagtgagccaatcagggcacagcctgcgttgaccgcgtgccgggtgtcatggcggcctgcaggtactgctgctcgtgcctccggctccggcccctgagcgatggtcctttccttctgccacggcgggatcgggcactcacccagttgcaagtgcgagcactatggagtascgcagggtctcgagctgtggccgtggacttaggcaacaggaaattagaaatatcttctggaaagctggccagatttgcagatggctctgctgtagtacagtcaggtgacactgcagtaatggtcacagcggtcagtaaaacaaaaccttccccttcccagtttatgcctttggtggttgactacagacaaaaagctgctgcagcaggtagaattcccacaaactatctgagaagagagrttggtacttctgataaagaaattctaacaagtcgaataatagatcgttcaattagaccgctctttccagctggctacttctatgatacacaggttctgtgtaatctgttagcagtagatggtgtaaatgagcctgatgtcctagcaattaatggcgcttccgtagccctctcattatcagatattccttggaatggacctgttggggcagtacgaataggaataattgatggagaatatgttgttaacccaacaagaaaagaaatgtcttctagtactttaaatttagtggttgctggagcacctaaaagtcagattgtcatgttgsaagcctctgcagagaacattttacagcaggacttttgccatgctatcaaagtgggagtgaaatatacccaacaaataattcagggcattcagcagttggtaaaagaaactggtgttaccaagaggacacctcagaagttatttaccccttcgccagagattgtgaaatatactcataaacttgctatggagagactctatgcagtttttacagattacgagcatgacaaagtttccagagatgaagctgttaacaraataagattagatacggaggaacaactaaaagaaaaatttccagaagccgatccatatgaaataatagaatccttcaatgttgttgcaaaggaagtttttagaagtattgttttgaatgaatacaaaaggtgcgatggtcgggatttgacttcacttaggaatgtaagttgtgaggtagatatgtttaaaacccttcatggatcagcattatttcaaagaggacaaacacaggtgctttgtaccgttacatttgattcattagaatctggtattaagtcagatcaagttataacagctataaatgggataaaagataaaaatttcatgctgcactacgagtttcctccttatgcaactaatgaaattggcaaagtcactggtttaaatagaagagaacttgggcatggtgctcttgctgagaaagctttgtatcctgttattcccmgagattttcctttcaccataagagttacatctgaagtcctagagtcaaatgggtcatcttctatggcatctgcatgtggcggaagtttagcattaatggattcagggaattgaagattacaatggtgacatggacttcaaaatagctggcactaataaaggaataactgcattacaggctgatattaaattacctggaataccaataaaaattgtgatggaggctattcaacaagcttcagtggcaaaaaaggagatattacagatcatgaacaaaactatttcaaaacctcgagcatctagaaaagaaaatggacctgttgtagaaactgttcaggttccattatcaaaacgagcaaaatttgttggacctggtggctataacttaaaaaaacttcaggctgaaacaggtgtaactattagtcaggtggatgaagaaacgttttctgtatttgcaccaacacccagtgctatgcatgaggcaagagacttcattactgaaatctgcaaggatgatcaggagcagcaattagaatttggagcagtatataccgccacaataactgaaatcagagatactggtgtaatggtaaaattatatccaaatatgactgcggtactgcttcataacacacaacttgatcaacgaaagattaaacatcctactgccctaggattagaagttggccaagaaattcaggtgaaatactttggacgtgacccagccgatggaagaatgaggctttctcgaaaagtgcttcagtcgccagctacaaccgtggtcagaactttgaatgacagaagtagtattgtaatgggagaacctatttcacagtcatcatctaattctcagtgatttttttttttaaagagaattctagaattctattttgtctagggtgatgtgctgtagagcaacattttagyagtatcttccattgtgtagatttctatataatataaatacattttaattatttgtactaaaatgctcatttacatgtgccatttttttaattcgagtaacccatatttgtttaattgtatttacattataaatcaagaaatatttattattaaaagtaagtcatttatacatcttagaaaaaattacwgttttgtttttacaattctgaaatatatgaaaaacttagaatatgtcatatgttattataacagatctcttcctacatcttatttttcttctttgtatacagtagtgacagtttaccttcagtcatcctacaggtcacctctgtgcccaacaactttacttgcctacaacggttcacaaactggaacaggccatattcaaagccagtgcctatttcttcagaactgttaacagatatagtgagttgagggagctaatctgatacacttttgataatataatgcctttcaaattagttaccaaatcataaacagagtggaataaatataaatkagattctaactaggatgaatgtggtagtaatgatgtatatttttcaaatttacctaaacagaaagattattggctaaggcaggcggatcatgagatcaggagatcgagaccatcctggctaacacggtgaaaccccgtctctactaaaagtgcaaaaattagccgggcgtggtggcgcatgcctgtaatcctagctactcaggaggctgaggcagaagaatcacttcaacccaggaggtggaggttgtagtgagccgagattgcgccattgcactccagctcaggcaacaagagcaaaactccgtctc

SEQ ID NO: 861 - DNA, 3773 bp, Homo sapiens
acaagtcgatgaaaaatgaatttactgtaaattggttaacacaaatcgctgtagtaacatatctgctatgtgaaatttttaaaataaaaaccagggcggagaaggggagaaggagatctctttccaaggcccaccacccaaattctaattcttagttcacagatccaaataataataatgtgttgttctatgacttctagtattaaaagtaaatataaatttactctgcatattaaacatttacattattctaggacttctcctttaaattacgatagtacacacacaaaaaccttatttatctaattgcctttcgttggcacataaagacaaagatcgtttgcaacataatcgcgttctgatasgtttgaccctctctagtcttcgtagaaggtggccaaggtttccgttaccccggcgtccctcgggcaccgcggaaacgaaactccatcaggctccgccccacggtctgcggagtgagccaatcagggcacagcctgcgttgaccgcgtgccgggtgtcatggcggcctgcaggtactgctgctcgtgcctccggctccggcccctgagcgatggtcctttccttctgccacggcgggatcgggcactcacccagttgcaagtgcgagcactatggagtascgcagggtctcgagctgtggccgtggacttaggcaacaggaaattagaaatatcttctggaaagctggccagatttgcagatggctctgctgtagtacagtcaggtgacactgcagtaatggtcacagcggtcagtaaaacaaaaccttccccttcccagtttatgcctttggtggttgactacagacaaaaagctgctgcagcaggtagaattcccacaaactatctgagaagagagrttggtacttctgataaagaaattctaacaagtcgaataatagatcgttcaattagaccgctctttccagctggctacttctatgatacacaggttctgtgtaatctgttagcagtagatggtgtaaatgagcctgatgtcctagcaattaatggcgcttccgtagccctctcattatcagatattccttggaatggacctgttggggcagtacgaataggaataattgatggagaatatgttgttaacccaacaagaaaagaaatgtcttctagtactttaaatttagtggttgctggagcacctaaaagtcagattgtcatgttgsaagcctctgcagagaacattttacagcaggacttttgccatgctatcaaagtgggagtgaaatatacccaacaaataattcagggcattcagcagttggtaaaagaaactggtgttaccaagaggacacctcagaagttatttaccccttcgccagagattgtgaaatatactcataaacttgctatggagagactctatgcagtttttacagattacgagcatgacaaagtttccagagatgaagctgttaacaraataagattagatacggaggaacaactaaaagaaaaatttccagaagccgatccatatgaaataatagaatccttcaatgttgttgcaaaggaagtttttagaagtattgttttgaatgaatacaaaaggtgcgatggtcgggatttgacttcacttaggaatgtaagttgtgaggtagatatgtttaaaacccttcatggatcagcattatttcaaagaggacaaacacaggtgctttgtaccgttacatttgattcattagaatctggtattaagtcagatcaagttataacagctataaatgggataaaagataaaaatttcatgctgcactacgagtttcctccttatgcaactaatgaaattggcaaagtcactggtttaaatagaagagaacttgggcatggtgctcttgctgagaaagctttgtatcctgttattcccmgagattttcctttcaccataagagttacatctgaagtcctagagtcaaatgggtcatcttctatggcatctgcatgtggcggaagtttagcattaatggattcaggggttccaatttcatctgctgttgcaggcgtagcaataggattggtcaccaaaaccgatcctgagaagggtgaaatagaagattatcgtttgctgacagatattttgggaattgaagattacaatggtgacatggacttcaaaatagctggcactaataaaggaataactgcattacaggctgatattaaattacctggaataccaataaaaattgtgatggaggctattcaacaagcttcagtggcaaaaaaggagatattacagatcatgaacaaaactatttcaaaacctcgagcatctagaaaagaaaatggacctgttgtagaaactgttcaggttccattatcaaaacgagcaaaatttgttggacctggtggctataacttaaaaaaacttcaggctgaaacaggtgtaactattagtcaggtggatgaagaaacgttttctgtatttgcaccaacacccagtgctatgcatgaggcaagagacttcattactgaaatctgcaaggatgatcaggagcagcaattagaatttggagcagtatataccgccacaataactgaaatcagagatactggtgtaatggtaaaattatatccaaatatgactgcggtactgcttcataacacacaacttgatcaacgaaagattaaacatcctactgccctaggattagaagttggccaagaaattcaggtgaaatactttggacgtgacccagccgatggaagaatgaggctttctcgaaaagtgcttcagtcgccagctacaaccgtggtcagaactttgaatgacagaagtagtattgtaatgggagaacctatttcacagtcatcatctaattctcagtgatttttttttttaaagagaattctagaattctattttgtctagggtgatgtgctgtagagcaacattttagyagtatcttccattgtgtagatttctatataatataaatacattttaattatttgtactaaaatgctcatttacatgtgccatttttttaattcgagtaacccatatttgtttaattgtatttacattataaatcaagaaatatttattattaaaagtaagtcatttatacatcttagaaaaaattacwgttttgtttttacaattctgaaatatatgaaaaacttagaatatgtcatatgttattataacagatctcttcctacatcttatttttcttctttgtatacagtagtgacagtttaccttcagtcatcctacaggtcacctctgtgcccaacaactttacttgcctacaacggttcacaaactggaacaggccatattcaaagccagtgcctatttcttcagaactgttaacagatatagtgagttgagggagctaatctgatacacttttgataatataatgcctttcaaattagttaccaaatcataaacagagtggaataaatataaatkagattctaactaggatgaatgtggtagtaatgatgtatatttttcaaatttacctaaacagaaagattattggctaaggcaggcggatcatgagatcaggagatcgagaccatcctggctaacacggtgaaaccccgtctctactaaaagtgcaaaaattagccgggcgtggtggcgcatgcctgtaatcctagctactcaggaggctgaggcagaagaatcacttcaacccaggaggtggaggttgtagtgagccgagattgcgccattgcactccagctcaggcaacaagagcaaaactccgtctc

SEQ ID NO: 862 - DNA, 2914 bp, Homo sapiens
caaagcgcatctcaggactgatagctccgccctaaactaagggagagactgtgctcccaagtacgtagcctgcagtgcctaacgcattctcagcaattttgacccccaacagacgccgtcgacagtctcccaagaacaattcccaggagctcggattccaagagccgcccgcgccctcgtttaccttcgctagtcgccctgcagccccgccctgtccggaggccccgccctccatgaatcagctgatyccgcggacccactgggttgccaagctcgcgccggatgcggagcgcggtgctgccggtggagcttcaggtcttgatagactttctgtaaagaaggaatgatttggtgatggagtgttcccactgaccgatggactcaaagaagagaagctcaacagaggcagaaggatccaaggaaagaggcctggtccatatctggcaggcaggatcctttcccataacaccagagagattgccaggctggggaggaaagactgttttgcaggcagccctcggagtgaaacatggagttcttctgactgaagatggtgaggtctacagctttgggactcttccctggagaagtggaccagtggagatttgtccaagtagccccattctagaaaatgccctggttgggcaatatgttattactgtggcaacaggaagcttccatagtggagcagtgacagacaatggtrtcgcgtacatgtggggagagaattctgctggccagtgtgcagtagccaaccagcagtatgtgccggaaccaaatcctgtcagcattgctgattctgaggccagccctttgttagcagtcaggattttacagttggcgtgtggcraggagcacactctggcattgtcaataagcagagagatttgggcatggggtacyggttgtcagttgggtctcattaccactgccttcccagtgacaaagccgcaaaaggtagaacatcttgctgggcgagtggtgcttcaagttgcctgtggtgctttccacagcttagcccttgtacaatgcctcccttcccaggatctgaagccagtcccagaacgatgcaaccagtgcagccagctcttgattactatgactgacaaagaagaccatgtgattatatcagacagtcattgttgcccattaggtgtgacactgacagaatctcaggcagaaaaccatgccagcactgctctcagcccctccactgaaacccttgacaggcaggaagaagtatttgagaacactcttgtagcaaatgatcagtctgttgctactgaactgaatgcagtaagtgctcagatcacaagcagcgatgccatgtcctctcaacaaaatgtcatgggaacaactgaaatttcctctgccagaaacataccatcataccctgacacccaagcagtcaatgaatacctacggaaactgtcagatcattcagtaagagaggactcagagcatggtgaaaagccartgccatctcaggtacctgctcaattttataaaataaaagtgtgtctagagttgaactgtatgggcttttctttagaaactttaaaatgagtaaggcttggtagcattttttattttttgagtttgattataattttgttttatcaggcaagcctagataaaggaaagaacctggattaattcaaaatcactctttatgtttgttctggccctttatgatattgaaaggtgtcatgttgggcttgttttataagtaggagcatttcatttttttttcttgctagtactttttttctatggctaaagtactgaattttggtgggccctgaatagtttaatataactagagattcacaaagattcttcttacttgtgtttgtaacactcttcagaattctgtagagaaaagtcttttccttctttaacagggaagattgttttgtggcagatccttcaattgtaggcagatttaaaacttacaggcaattacatgtttcagtttttttcaattatagctgtggtccttactgggcttaatttgaagaggtggctaatattttatctttttgtttgtttgtttttgagatggggtcttgctctgtcacccaggctggagtgcagtaatgcgattgtggctcactgcagcctcgatctcccaggttcaagcgatcctcccatttcagccttccaagtagctgggactatacacatgccaccacacctgctgattttatttttaagtagagtagagcctgttgcccaggctcatctcaaactcctgagctcaagcaatcctcccacctcagcctcccaaagtgttgagattacaggcatgagccatcatgcccagcctattttatatatcttattaaaactattttcattttgaagatttgtggtagaatgaacaaaagttgtttatcagtagcacatggtaaagtttgagttcccgcttaaactaaattgttttaaaaggattatttctgtgttttactcttagtgtggccttttgattttgctttaccaaaactgtaagaaaacaaaacaaaagatcatactcataaaagatctgtcctgcagtgtttctttttaggtttttgaaaccacatagcctcttgattctcaattcttattgtttactctgtcagaatgtgaacatgaaggtatttttagaaatagtctttatttcacaatctattcactgaaacttgtgggtatttgaatttttaaaaaaatcaaggataagctgtttggagaaaggtattataaagtctgaacaaagcaaaagtagtagtttaacaagaatgcatgtagaaaattcttagactgtacatgcttatcacattttacttactttgttaaacattggaagtttttgttacttatgctagtaacaatgtgtgtgtttctattgaattaaatttaatttatttaaatt

SEQ ID NO: 863 - DNA, 6667 bp, Homo sapiens
caaagcgcatctcaggactgatagctccgccctaaactaagggagagactgtgctcccaagtacgtagcctgcagtgcctaacgcattctcagcaattttgacccccaacagacgccgtcgacagtctcccaagaacaattcccaggagctcggattccaagagccgcccgcgccctcgtttaccttcgctagtcgccctgcagccccgccctgtccggaggccccgccctccatgaatcagctgatyccgcggacccactgggttgccaagctcgcgccggatgcggagcgcggtgctgccggtggagcttcaggtcttgatagactttctgtaaagaaggaatgatttggtgatggagtgttcccactgaccgatggactcaaagaagagaagctcaacagaggcagaaggatccaaggaaagaggcctggtccatatctggcaggcaggatcctttcccataacaccagagagattgccaggctggggaggaaagactgttttgcaggcagccctcggagtgaaacatggagttcttctgactgaagatggtgaggtctacagctttgggactcttccctggagaagtggaccagtggagatttgtccaagtagccccattctagaaaatgccctggttgggcaatatgttattactgtggcaacaggaagcttccatagtggagcagtgacagacaatggtrtcgcgtacatgtggggagagaattctgctggccagtgtgcagtagccaaccagcagtatgtgccggaaccaaatcctgtcagcattgctgattctgaggccagccctttgttagcagtcaggattttacagttggcgtgtggcraggagcacactctggcattgtcaataagcagagagatttgggcatggggtacyggttgtcagttgggtctcattaccactgccttcccagtgacaaagccgcaaaaggtagaacatcttgctgggcgagtggtgcttcaagttgcctgtggtgctttccacagcttagcccttgtacaatgcctcccttcccaggatctgaagccagtcccagaacgatgcaaccagtgcagccagctcttgattactatgactgacaaagaagaccatgtgattatatcagacagtcattgttgcccattaggtgtgacactgacagaatctcaggcagaaaaccatgccagcactgctctcagcccctccactgaaacccttgacaggcaggaagaagtatttgagaacactcttgtagcaaatgatcagtctgttgctactgaactgaatgcagtaagtgctcagatcacaagcagcgatgccatgtcctctcaacaaaatgtcatgggaacaactgaaatttcctctgccagaaacataccatcataccctgacacccaagcagtcaatgaatacctacggaaactgtcagatcattcagtaagagaggactcagagcatggtgaaaagccartgccatctcagcctcttttagaagaagcaattcctaatctccacagcccgcctaccacaagcacctcagccctaaacagcctggtggtctcttgtgcatctgctgttggtgtgagagtggctgctacttatgaagctggtgccttgtcactgaagaaagttatgaacttttatagtacaaccccttgtgaaactggagctcaggcaggcagtagtgccattggccccgaaggtttgaaagatagcagggaagaacaggttaaacaggaatcaatgcaaggaaagaaaagttcaagtcttgtggatatcagagaagaagaaacagagggaggcagtcgaagactctccctccctggattgttgtcacaagtttcccccaggctcttaagaaaggctgcacgggtgaaaacgaggacagtggttctgacccccacatacagtggagaagcagatgcgctcctgccttctctgagaacagaagtgtggacctgggggaaagggaaggaagggcagctggggcacggcgatgttctgcctagrcttcaaccgttgtgtgtaaaatgtctggatggcaaagaagtaatccatctggaggcaggtggttaccattctcttgcacttactgcgaaatcccaggtttactcatggggtagcaatacctttggtcaacttgggcattccgattttccaacaacagttcctcgtcttgcaaagataagcagtgaaaatggagtctggagcatagctgcaggcagggattattccctgtttttagtggatacagaagacttccagcctgggttatattacagtggccgacaggaccctacagaaggtgacaaccttccagagaatcacagtggttctaagactccagtacttctctcctgtagtaagcttggatatataagcagagtgacagcaggaaaagatagctatttagccttggtggataaaaacattatggggtatattgccagtctccacgagttagctactacagaaagacgattctattcaaaactaagtgatatcaaatctcagattctcaggcctcttctcagtttagaaaatttgggcactacaactacagtccagctgttgcaggaggtggctagccgattcagcaagctgtgttacctcattggtcagcatggagcctcattgagcagcttccttcatggggtaaaggaagccaggagtttggtcatcctgaagcattcaagtctcttcttggatagttatacagagcaagtatccagtcccgtgtattgcacatctattacmaatttcctggttatgggaggattccagcttcttgctaagcctgccattgatttcctaaataaaaaccaagagctgttgcaagatttgtcagaagtraatgacgaaaacactcagttgatggaaatactgaatactttgtttttcttgccaatcagacgacttcataattacgcaaaagttttgctaaagcttgctacttgttttgaagtggcatctccagaatatcagaaactgcaggattccagttcttgttatgagtgtcttgctctccatctcggcaggaaaaggaaggaagcagaatacacactgggcttctggaagaccttccccggaaaaatgacggattccttgaggaagccagagcgtcgactgctgtgtgagagtagtaaccgagccctgtctctgcagcatgctgggaggttttccgtgaattggttcattctctttaatgatgccctggtccatgcccagttctccacgcaccatgttttccctctggccacgctgtgggcagagccactgtctgaagaagctggtggtgtgaatggcttaaagataactacacctgaggagcagttcactctcatttcatctacaccccaggaaaagacaaagtggctacgagctataagccaagccgtagatcaggctttgagagggatgtctgatctccccccttatggaagtggtagcagtgttcagagacaggaaccacccatttcacgcagtgccaaatatactttctacaaggatcctcgcctaaaggatgccacctatgatggacgctggctttcagggaagcctcatggcagaggggttttgaagtggcctgatggaaagatgtattctggcatgttcaggaatggcttggaagatgggtatggagaatacagaatcccaaacaaggcaatgaacaaagaagaccattatgtgggccattggaaagaaggaaaaatgtgcggtcaaggagtctacagctatgcttctggtgaagtatttgagggctgttttcaagataatatgcgtcatggtcatggtcttctacgaagtgggaaattgacgtcctcttctcctagtatgttcattggccagtgggtaatggataagaaagcaggatatggtgtctttgatgatatcactaggggggaaaagtatatgggaatgtggcaagatgatgtgtgtcaagggaatggtgtggtggttacccagtttggattatactacgagggcaactttcaccttaataaaatgatgggaaatggggttttgctttccgaagatgatactatctatgaaggagaattttcagatgactggactcttagtggaaagggaacactgactatgccaaatggagactacattgaaggttattttagtggagaatggggatctgggataaaaatcactggaacctacttcaaacctagtctatatgagagtgataaagacagacctaaagttttcaggaagctaggaaacctggcagtgccagctgatgagaagtggaaagcrgtgtttgacgaatgttggcgccaactgggctgtgagggcccaggccaaggggaagtttggaaagcatgggacaatattgctgtggccttgaccaccagtcggcgccagcacagagacagtccagaaataytgagtcgttcacagactcagacactagagagtttggaattcattccacagcatgttggtgccttctctgtggagaaatatgatgacatcaggaaatatttaataaaggcctgtgacactcctctgcaccccctgggcaggcttgtggagacactggttgcagtgtatagaatgacatacgtgggcgtaggagccaaccgcaggttattgcaggaggctgtaaaggagattaagtcctatcttaagcgaattttccagctggtgaggttcttatttcctgagctgcctgaagaaggcagcacaattcctctctctgctcctctgccaaccgaaaggaagtctttttgcactgggaagtcagattcccgatctgaatcaccagagccaggttatgtagtaacgagttctggattattgcttcctgtgctgctacctcggctctacccaccgctgtttatgctttatgctttggataatgatcgcgaggaagacatttactgggaatgtgtccttcgactaaataagcagccagatattgctctcctgggctttcttggggtgcagaggaaattttggccagcaaccttgtcaatccttggagagagtaaaaaggttttgccaaccacgaaagatgcttgttttgcctcagcagtagaatgtctgcagcagatcagcacaacatttaccccatcagacaaacttaaggtcatccagcagacttttgaggagatctctcagagtgtcctggcrtcactccacgaagacttcttgtggtccatggatgacttgtttcctgttttcttatatgtggtgctacgggccaggattaggaatttaggctctgaggtacacctcattgaggatctaatggacccctatcttcagcatggggaacagggtataatgttcaccaccttgaaggcatgttactaccagattcagcgtgagaagcttaactaggctgcataacagcttgaaaactggattatctactacagagtgttataacaccatctggagtcttcctgtagtggcaaaaaagaacagtgttgaaattggaaaggactttgtgttatttaggttgttagaatgagccttaccaataataagagccctgagcccagaaaaaaggactgtatagtttaaagggaggattgaaagggaggtaaaaaatcagattagaccagttcttggcctatgataagttccaaaaataccatttatctactatttgaaaaaagaagaggatatcccttcctacagtaaagggtatgtcagctacatgaagttgtaagaaaagcttccagtagagcttcttatattaaagaagttgatggatatttttgaatttctggtttgcctgaatccacctgcagttaccccgatccgtttgcaagaaccagatcgtacttgaaactatagtggccacactctgccttcctgagtcccttccagtcatgtgtgcatcatgtctctttgccaagggaggggagaaaggaacttttaaactgcagttttaactttttctaagctgtttcttgatgggagaggttctgtgcaaaactaccacattctgtccccaaaatgtggaatgcatccaaataggagtcttctgcctcttaacttaaaagaacataggaattttgtttttggtttctttatcatgctacagagagtgaatacactggaattcagacaccgactctgagctgctaggaacctcatttgtccatgtgcaaacgctgtattccaaggcctgtgaatggcagcctgaggaagttttgcatgcaggctgtgttttcgagcaggactaacaactgggaaataagcaaaaaactgcatcgatccccagcctggtgttgttcttccctatacttcacactgaactcaggatgggaagaaaaaggaaacaagctttggctttttccatctcaaaagtattgtggcacctcaacatttcagtrttttgctttttaaaaaatgccctattgtaagttgttggtttatactgtataagtaacactagtagctgttttgaataacataggtgctcttcctcatctcatctcctacaccgtggtgagcatacagagtgtcctgatttgtgttaagtgactgagaagatgttaattacttttgaaaaaggatcatggtttttgctctactttataatcaagacaagtgtttattaaaatactgttttggaatgttggctgtaatgtaacagcaattttcataataaaaggcattcatctttatg

SEQ ID NO: 864 - DNA, 6649 bp, Homo sapiens
caaagcgcatctcaggactgatagctccgccctaaactaagggagagactgtgctcccaagtacgtagcctgcagtgcctaacgcattctcagcaattttgacccccaacagacgccgtcgacagtctcccaagaacaattcccaggagctcggattccaagagccgcccgcgccctcgtttaccttcgctagtcgccctgcagccccgccctgtccggaggccccgccctccatgaatcagctgatyccgcggacccactgggttgccaagctcgcgccggatgcggagcgcggtgctgccggtggagcttcaggtcttgatagactttctgtaaagaaggaatgatttggtgatggagtgttcccactgaccgatggactcaaagaagagaagctcaacagaggcagaaggatccaaggaaagaggcctggtccatatctggcaggcaggatcctttcccataacaccagagagattgccaggctggggaggaaagactgttttgcaggcagccctcggagtgaaacatggagttcttctgactgaagatggtgaggtctacagctttgggactcttccctggagaagtggaccagtggagatttgtccaagtagccccattctagaaaatgccctggttgggcaatatgttattactgtggcaacaggaagcttccatagtggagcagtgacagacaatggtrtcgcgtacatgtggggagagaattctgctggccagtgtgcagtagccaaccagcagtatgtgccggaaccaaatcctgtcagcattgctgattctgaggccagccctttgttagcagtcaggattttacagttggcgtgtggcraggagcacactctggcattgtcaataagcagagagatttgggcatggggtacyggttgtcagttgggtctcattaccactgccttcccagtgacaaagccgcaaaaggtagaacatcttgctgggcgagtggtgcttcaagttgcctgtggtgctttccacagcttagcccttgtacaatgcctcccttcccaggatctgaagccagtcccagaacgatgcaaccagtgcagccagctcttgattactatgactgacaaagaagaccatgtgattatatcagacagtcattgttgcccattaggtgtgacactgacagaatctcaggcagaaaaccatgccagcactgctctcagcccctccactgaaacccttgacaggcaggaagaagtatttgagaacactcttgtagcaaatgatcagtctgttgctactgaactgaatgcagtaagtgctcagatcacaagcagcgatgccatgtcctctcaacaaaatgtcatgggaacaactgaaatttcctctgccagaaacataccatcataccctgacacccaagcagtcaatgaatacctacggaaactgtcagatcattcagtaagagaggactcagagcatggtgaaaagccartgccatctcagcctcttttagaagaagcaattcctaatctccacagcccgcctaccacaagcacctcagccctaaacagcctggtggtctcttgtgcatctgctgttggtgtgagagtggctgctacttatgaagctggtgccttgtcactgaagaaagttatgaacttttatagtacaaccccttgtgaaactggagctcaggcaggcagtagtgccattggccccgaaggtttgaaagatagcagggaagaacaggttaaacaggaatcaatgcaaggaaagaaaagttcaagtcttgtggatatcagagaagaagaaacagagggaggcagtcgaagactctccctccctggattgttgtcacaagtttcccccaggctcttaagaaaggctgcacgggtgaaaacgaggacagtggttctgacccccacatacagtggagaagcagatgcgctcctgccttctctgagaacagaagtgtggacctgggggaaagggaaggaagggcagctggggcacggcgatgttctgcctagrcttcaaccgttgtgtgtaaaatgtctggatggcaaagaagtaatccatctggaggcaggtggttaccattctcttgcacttactgcgaaatcccaggtttactcatggggtagcaatacctttggtcaacttgggcattccgattttccaacaacagttcctcgtcttgcaaagataagcagtgaaaatggagtctggagcatagctgcaggcagggattattccctgtttttagtggatacagaagacttccagcctgggttatattacagtggccgacaggaccctacagaaggtgacaaccttccagagaatcacagtggttctaagactccagtacttctctcctgtagtaagcttggatatataagcagagtgacagcaggaaaagatagctatttagccttggtggataaaaacattatggggtatattgccagtctccacgagttagctactacagaaagacgattctattcaaaactaagtgatatcaaatctcagattctcaggcctcttctcagtttagaaaatttgggcactacaactacagtccagctgttgcaggaggtggctagccgattcagcaagctgtgttacctcattggtcagcatggagcctcattgagcagcttccttcatggggtaaaggaagccaggagtttggtcatcctgaagcattcaagtctcttcttggatagttatacagagtattgcacatctattacmaatttcctggttatgggaggattccagcttcttgctaagcctgccattgatttcctaaataaaaaccaagagctgttgcaagatttgtcagaagtraatgacgaaaacactcagttgatggaaatactgaatactttgtttttcttgccaatcagacgacttcataattacgcaaaagttttgctaaagcttgctacttgttttgaagtggcatctccagaatatcagaaactgcaggattccagttcttgttatgagtgtcttgctctccatctcggcaggaaaaggaaggaagcagaatacacactgggcttctggaagaccttccccggaaaaatgacggattccttgaggaagccagagcgtcgactgctgtgtgagagtagtaaccgagccctgtctctgcagcatgctgggaggttttccgtgaattggttcattctctttaatgatgccctggtccatgcccagttctccacgcaccatgttttccctctggccacgctgtgggcagagccactgtctgaagaagctggtggtgtgaatggcttaaagataactacacctgaggagcagttcactctcatttcatctacaccccaggaaaagacaaagtggctacgagctataagccaagccgtagatcaggctttgagagggatgtctgatctccccccttatggaagtggtagcagtgttcagagacaggaaccacccatttcacgcagtgccaaatatactttctacaaggatcctcgcctaaaggatgccacctatgatggacgctggctttcagggaagcctcatggcagaggggttttgaagtggcctgatggaaagatgtattctggcatgttcaggaatggcttggaagatgggtatggagaatacagaatcccaaacaaggcaatgaacaaagaagaccattatgtgggccattggaaagaaggaaaaatgtgcggtcaaggagtctacagctatgcttctggtgaagtatttgagggctgttttcaagataatatgcgtcatggtcatggtcttctacgaagtgggaaattgacgtcctcttctcctagtatgttcattggccagtgggtaatggataagaaagcaggatatggtgtctttgatgatatcactaggggggaaaagtatatgggaatgtggcaagatgatgtgtgtcaagggaatggtgtggtggttacccagtttggattatactacgagggcaactttcaccttaataaaatgatgggaaatggggttttgctttccgaagatgatactatctatgaaggagaattttcagatgactggactcttagtggaaagggaacactgactatgccaaatggagactacattgaaggttattttagtggagaatggggatctgggataaaaatcactggaacctacttcaaacctagtctatatgagagtgataaagacagacctaaagttttcaggaagctaggaaacctggcagtgccagctgatgagaagtggaaagcrgtgtttgacgaatgttggcgccaactgggctgtgagggcccaggccaaggggaagtttggaaagcatgggacaatattgctgtggccttgaccaccagtcggcgccagcacagagacagtccagaaataytgagtcgttcacagactcagacactagagagtttggaattcattccacagcatgttggtgccttctctgtggagaaatatgatgacatcaggaaatatttaataaaggcctgtgacactcctctgcaccccctgggcaggcttgtggagacactggttgcagtgtatagaatgacatacgtgggcgtaggagccaaccgcaggttattgcaggaggctgtaaaggagattaagtcctatcttaagcgaattttccagctggtgaggttcttatttcctgagctgcctgaagaaggcagcacaattcctctctctgctcctctgccaaccgaaaggaagtctttttgcactgggaagtcagattcccgatctgaatcaccagagccaggttatgtagtaacgagttctggattattgcttcctgtgctgctacctcggctctacccaccgctgtttatgctttatgctttggataatgatcgcgaggaagacatttactgggaatgtgtccttcgactaaataagcagccagatattgctctcctgggctttcttggggtgcagaggaaattttggccagcaaccttgtcaatccttggagagagtaaaaaggttttgccaaccacgaaagatgcttgttttgcctcagcagtagaatgtctgcagcagatcagcacaacatttaccccatcagacaaacttaaggtcatccagcagacttttgaggagatctctcagagtgtcctggcrtcactccacgaagacttcttgtggtccatggatgacttgtttcctgttttcttatatgtggtgctacgggccaggattaggaatttaggctctgaggtacacctcattgaggatctaatggacccctatcttcagcatggggaacagggtataatgttcaccaccttgaaggcatgttactaccagattcagcgtgagaagcttaactaggctgcataacagcttgaaaactggattatctactacagagtgttataacaccatctggagtcttcctgtagtggcaaaaaagaacagtgttgaaattggaaaggactttgtgttatttaggttgttagaatgagccttaccaataataagagccctgagcccagaaaaaaggactgtatagtttaaagggaggattgaaagggaggtaaaaaatcagattagaccagttcttggcctatgataagttccaaaaataccatttatctactatttgaaaaaagaagaggatatcccttcctacagtaaagggtatgtcagctacatgaagttgtaagaaaagcttccagtagagcttcttatattaaagaagttgatggatatttttgaatttctggtttgcctgaatccacctgcagttaccccgatccgtttgcaagaaccagatcgtacttgaaactatagtggccacactctgccttcctgagtcccttccagtcatgtgtgcatcatgtctctttgccaagggaggggagaaaggaacttttaaactgcagttttaactttttctaagctgtttcttgatgggagaggttctgtgcaaaactaccacattctgtccccaaaatgtggaatgcatccaaataggagtcttctgcctcttaacttaaaagaacataggaattttgtttttggtttctttatcatgctacagagagtgaatacactggaattcagacaccgactctgagctgctaggaacctcatttgtccatgtgcaaacgctgtattccaaggcctgtgaatggcagcctgaggaagttttgcatgcaggctgtgttttcgagcaggactaacaactgggaaataagcaaaaaactgcatcgatccccagcctggtgttgttcttccctatacttcacactgaactcaggatgggaagaaaaaggaaacaagctttggctttttccatctcaaaagtattgtggcacctcaacatttcagtrttttgctttttaaaaaatgccctattgtaagttgttggtttatactgtataagtaacactagtagctgttttgaataacataggtgctcttcctcatctcatctcctacaccgtggtgagcatacagagtgtcctgatttgtgttaagtgactgagaagatgttaattacttttgaaaaaggatcatggtttttgctctactttataatcaagacaagtgtttattaaaatactgttttggaatgttggctgtaatgtaacagcaattttcataataaaaggcattcatctttatg

SEQ ID NO: 865 - DNA, 3776 bp, Homo sapiens
cgcggcggtggcgggggcgcaaccagcgggccgaggcggcggcgccagcggctctttaaatagcatccagagccggcgcggggcagggagtgggctgcagtgacagccggcggcggagcggccggtccacggaggagaactatcaacacaggacaatgcaagcccatgagctgttccggtattttcgaatgccagagctggttgacttccgacagtacgtgcgtactcttccgaccaacacgcttatgggcttcggagcttttgcagcactcaccaccttctggtacgccacgagacccaaacccctgaagccgccatgcgacctctccatgcagtcagtggaagtggcgggtagtggtggtgcacgaagatccgcactacttgacagcgacgagcccttggtgtatttctatgatgatgtcacaacattatacgaaggtttccagaggggaatacaggtgtcaaataatggcccttgtttaggctctcggaaaccagaccaaccctatgaatggctttcatataaacaggttgcagaattgtcggagtgcataggctcagcactgatmcagaagggcttcaagactgccccagatcagttcattggcatctttgctcaaaatagacctgagtgggtgattattgaacaaggatgctttgcttattcratggtgatcgttccactttatgatacccttggaaatgaagccatcacgtacatagtcaacaaagctgaactctctctggtttttgttgacaagccagagaaggccaaactcttattagagggtgtagaaaataagttaataccaggccttaaaatcatagttgtcatggatgcctacggcagtgaactggtggaacgaggccagaggtgtggggtggaagtcaccagcatgaaggcgatggaggacctgggaagagccaacagacggaagcccaagcctccagcacctgaagatcttgcagtaatttgtttcacaagtggaactacaggcaaccccaaaggagcaatggtcactcaccgaaacatagtgagcgattgttcagcttttgtgaaagcaacagagaatacagtcaatccttgcccagatgatactttgatatctttcttgcctctcgcccatatgtttgagagagttgtagagtgtgtaatgctgtgtcatggagctaaaatcggatttttccaaggagatatcaggctgctcatggatgacctcaaggtgcttcaacccactgtcttccccgtggttccaagactgctgaaccggatgtttgaccgaattttcggacaagcaaacaccacgctgaagcgatggctcttggacttygcctccaagaggaaagaagcagagcttcgcagcggcatcatcagaaacaacagcctgtgggaccggctgatcttccacaaagtacagtcgagcctgggcggaagagtccggctgatggtgacaggagccgccccggtgtctgccactgtgctgacgttcctcagagcagccctgggctgtcagttttatgaaggatayggacagacagagtgcactgccgggtgctgcctraccatgcctggagactggaccgcaggccatgttggggccccgatgccgtgcaatttgataaaacttgttgatgtggaagaaatgaattacatggctgccgagggcgagggcgaggtgtgtgtgaaagggccaaatgtatttcagggctacttgaaggacccagcgaaaacagcagaagctttggacaaagacggctggttacacacaggggacattggaaaatggttaccaaatggcaccttgaaaattatcgaccggaaaaagcacatatttaagctggcacaaggagaatacatagcccctgaaaagattgaaaatatctacatgcgaagtgagcctgttgctcaggtgtttgtccacggagaaagcctgcaggcatttctcattgcaattgtggtaccagatgttgagacattatgttcctgggcccaaaagagaggatttgaagggtcgtttgaggaactgtgcagaaataaggatgtcaaaaaagctatcctcgaagatatggtgagacttgggaaggattctggtctgaaaccatttgaacaggtcaaaggcatcacattgcaccctgaattattttctatcgacaatggccttctgactccaacaatgaaggcgaaaaggccagagctgcggaactatttcaggtcgcagatagatgacctctattccactatcaaggtttagtgtgaagaagaaagctcagaggaaatggcacagttccacaatctcttctcctgctgatggccttcatgttgttaattttgaatacagcaagtgtagggaagraagcgttcgtgtttgacttgtccattcggggttcttctcataggaatgctagaggaaasagaacacygccttacagtcacctcatgttgcagaccatgtttatggtaatacacactttccaaaatgagccttaaaaattgtaaaggggatactataaatgtgctaagttatttgagacttcctcagtttaaaaagtgggttttaaatcttctgtctccctgtttytctaatcaaggggttaggactttgctatctctgagatgtctgctacttgctgcaaattctgcagctgtctgctgctctaaagagtacagtgcactagagggaagtgttccctttaaaaataagaacaactgtcctggctggagaatctcacaagcggaccagagatctttttaaatccctgctactgtcccttctcacaggcattcacagaacccttctgattcgtaagggttacgaaactcatgttcttctccagtcccctgtggtttctgttggagcataaggtttccagtaagcgggagggcagatccaactcagaaccatgcagataaggagcctctggcaaatgggtgctcatcagaacgcgtggattctctttcatggcagaatgctcttggactcggttctccaggcctgattccccgactccatcctttttcaggggttatttaaaaatctgccttagattctatagtgaagacaagcatttcaagaaagagttacctggatcagccatgctcagctgtgacrcctgaataactgtctactttatcttcactgaaccactcactctgtgtaaaggccaacrgatttttaatgtggttttcatatcaaaagatcatgttgggattaacttgcctttttccccaaaaaataaactctcaggcaagcatttctttaaagctattaagggagtatatacttgagtacttattgaaatggacagtaataagcaaatgttcttataatgctacctgatttctatgaaatgtgtttgacaagccaaaattctaggatgtagaaatctggaaagttcatttcctgggattmacttctccagggattttttaaagttaatttgggaaattaacagcagttcactttattgtgagtctttgccacatttgactgaattgagctgtcatttgtacatttaaagcagctgttttggggtctgtgagagtacatgtattatatacaagcacaacagggcttgcactaaagaattgtmattgtaataacactacttggtagcctaacttcatatatgtattcttaattgcacaaaaagtcaataatttgtcaccttggggttttgaatgtttgctttaagtgttggctatttctatgttttataaaccaaaacaaaatttccaaaaacaatgaaggaaaccaaaataaatatttctgcatttc

SEQ ID NO: 866 - DNA, 3653 bp, Homo sapiens
aattcagcttagagaactatcaacacaggacaatgcaagcccatgagctgttccggtattttcgaatgccagagctggttgacttccgacagtacgtgcgtactcttccgaccaacacgcttatgggcttcggagcttttgcagcactcaccaccttctggtacgccacgagacccaaacccctgaagccgccatgcgacctctccatgcagtcagtggaagtggcgggtagtggtggtgcacgaagatccgcactacttgacagcgacgagcccttggtgtatttctatgatgatgtcacaacattatacgaaggtttccagaggggaatacaggtgtcaaataatggcccttgtttaggctctcggaaaccagaccaaccctatgaatggctttcatataaacaggttgcagaattgtcggagtgcataggctcagcactgatmcagaagggcttcaagactgccccagatcagttcattggcatctttgctcaaaatagacctgagtgggtgattattgaacaaggatgctttgcttattcratggtgatcgttccactttatgatacccttggaaatgaagccatcacgtacatagtcaacaaagctgaactctctctggtttttgttgacaagccagagaaggccaaactcttattagagggtgtagaaaataagttaataccaggccttaaaatcatagttgtcatggatgcctacggcagtgaactggtggaacgaggccagaggtgtggggtggaagtcaccagcatgaaggcgatggaggacctgggaagagccaacagacggaagcccaagcctccagcacctgaagatcttgcagtaatttgtttcacaagtggaactacaggcaaccccaaaggagcaatggtcactcaccgaaacatagtgagcgattgttcagcttttgtgaaagcaacagagaatacagtcaatccttgcccagatgatactttgatatctttcttgcctctcgcccatatgtttgagagagttgtagagtgtgtaatgctgtgtcatggagctaaaatcggatttttccaaggagatatcaggctgctcatggatgacctcaaggtgcttcaacccactgtcttccccgtggttccaagactgctgaaccggatgtttgaccgaattttcggacaagcaaacaccacgctgaagcgatggctcttggacttygcctccaagaggaaagaagcagagcttcgcagcggcatcatcagaaacaacagcctgtgggaccggctgatcttccacaaagtacagtcgagcctgggcggaagagtccggctgatggtgacaggagccgccccggtgtctgccactgtgctgacgttcctcagagcagccctgggctgtcagttttatgaaggatayggacagacagagtgcactgccgggtgctgcctraccatgcctggagactggaccgcaggccatgttggggccccgatgccgtgcaatttgataaaacttgttgatgtggaagaaatgaattacatggctgccgagggcgagggcgaggtgtgtgtgaaagggccaaatgtatttcagggctacttgaaggacccagcgaaaacagcagaagctttggacaaagacggctggttacacacaggggacattggaaaatggttaccaaatggcaccttgaaaattatcgaccggaaaaagcacatatttaagctggcacaaggagaatacatagcccctgaaaagattgaaaatatctacatgcgaagtgagcctgttgctcaggtgtttgtccacggagaaagcctgcaggcatttctcattgcaattgtggtaccagatgttgagacattatgttcctgggcccaaaagagaggatttgaagggtcgtttgaggaactgtgcagaaataaggatgtcaaaaaagctatcctcgaagatatggtgagacttgggaaggattctggtctgaaaccatttgaacaggtcaaaggcatcacattgcaccctgaattattttctatcgacaatggccttctgactccaacaatgaaggcgaaaaggccagagctgcggaactatttcaggtcgcagatagatgacctctattccactatcaaggtttagtgtgaagaagaaagctcagaggaaatggcacagttccacaatctcttctcctgctgatggccttcatgttgttaattttgaatacagcaagtgtagggaagraagcgttcgtgtttgacttgtccattcggggttcttctcataggaatgctagaggaaasagaacacygccttacagtcacctcatgttgcagaccatgtttatggtaatacacactttccaaaatgagccttaaaaattgtaaaggggatactataaatgtgctaagttatttgagacttcctcagtttaaaaagtgggttttaaatcttctgtctccctgtttytctaatcaaggggttaggactttgctatctctgagatgtctgctacttgctgcaaattctgcagctgtctgctgctctaaagagtacagtgcactagagggaagtgttccctttaaaaataagaacaactgtcctggctggagaatctcacaagcggaccagagatctttttaaatccctgctactgtcccttctcacaggcattcacagaacccttctgattcgtaagggttacgaaactcatgttcttctccagtcccctgtggtttctgttggagcataaggtttccagtaagcgggagggcagatccaactcagaaccatgcagataaggagcctctggcaaatgggtgctcatcagaacgcgtggattctctttcatggcagaatgctcttggactcggttctccaggcctgattccccgactccatcctttttcaggggttatttaaaaatctgccttagattctatagtgaagacaagcatttcaagaaagagttacctggatcagccatgctcagctgtgacrcctgaataactgtctactttatcttcactgaaccactcactctgtgtaaaggccaacrgatttttaatgtggttttcatatcaaaagatcatgttgggattaacttgcctttttccccaaaaaataaactctcaggcaagcatttctttaaagctattaagggagtatatacttgagtacttattgaaatggacagtaataagcaaatgttcttataatgctacctgatttctatgaaatgtgtttgacaagccaaaattctaggatgtagaaatctggaaagttcatttcctgggattmacttctccagggattttttaaagttaatttgggaaattaacagcagttcactttattgtgagtctttgccacatttgactgaattgagctgtcatttgtacatttaaagcagctgttttggggtctgtgagagtacatgtattatatacaagcacaacagggcttgcactaaagaattgtmattgtaataacactacttggtagcctaacttcatatatgtattcttaattgcacaaaaagtcaataatttgtcaccttggggttttgaatgtttgctttaagtgttggctatttctatgttttataaaccaaaacaaaatttccaaaaacaatgaaggaaaccaaaataaatatttctgcatttc

SEQ ID NO: 867 - DNA, 3809 bp, Homo sapiens
agcagcatcctggctcagccgcggcggtggcgggggcgcaaccagcgggccgaggcggcggcgccagcggctctttaaatagcatccagagccggcgcggggcagggagtgggctgcagtgacagccggcggcggagcggccggtccacggaggagaattcagcttagagaactatcaacacaggacaatgcaagcccatgagctgttccggtattttcgaatgccagagctggttgacttccgacagtacgtgcgtactcttccgaccaacacgcttatgggcttcggagcttttgcagcactcaccaccttctggtacgccacgagacccaaacccctgaagccgccatgcgacctctccatgcagtcagtggaagtggcgggtagtggtggtgcacgaagatccgcactacttgacagcgacgagcccttggtgtatttctatgatgatgtcacaacattatacgaaggtttccagaggggaatacaggtgtcaaataatggcccttgtttaggctctcggaaaccagaccaaccctatgaatggctttcatataaacaggttgcagaattgtcggagtgcataggctcagcactgatmcagaagggcttcaagactgccccagatcagttcattggcatctttgctcaaaatagacctgagtgggtgattattgaacaaggatgctttgcttattcratggtgatcgttccactttatgatacccttggaaatgaagccatcacgtacatagtcaacaaagctgaactctctctggtttttgttgacaagccagagaaggccaaactcttattagagggtgtagaaaataagttaataccaggccttaaaatcatagttgtcatggatgcctacggcagtgaactggtggaacgaggccagaggtgtggggtggaagtcaccagcatgaaggcgatggaggacctgggaagagccaacagacggaagcccaagcctccagcacctgaagatcttgcagtaatttgtttcacaagtggaactacaggcaaccccaaaggagcaatggtcactcaccgaaacatagtgagcgattgttcagcttttgtgaaagcaacagagaatacagtcaatccttgcccagatgatactttgatatctttcttgcctctcgcccatatgtttgagagagttgtagagtgtgtaatgctgtgtcatggagctaaaatcggatttttccaaggagatatcaggctgctcatggatgacctcaaggtgcttcaacccactgtcttccccgtggttccaagactgctgaaccggatgtttgaccgaattttcggacaagcaaacaccacgctgaagcgatggctcttggacttygcctccaagaggaaagaagcagagcttcgcagcggcatcatcagaaacaacagcctgtgggaccggctgatcttccacaaagtacagtcgagcctgggcggaagagtccggctgatggtgacaggagccgccccggtgtctgccactgtgctgacgttcctcagagcagccctgggctgtcagttttatgaaggatayggacagacagagtgcactgccgggtgctgcctraccatgcctggagactggaccgcaggccatgttggggccccgatgccgtgcaatttgataaaacttgttgatgtggaagaaatgaattacatggctgccgagggcgagggcgaggtgtgtgtgaaagggccaaatgtatttcagggctacttgaaggacccagcgaaaacagcagaagctttggacaaagacggctggttacacacaggggacattggaaaatggttaccaaatggcaccttgaaaattatcgaccggaaaaagcacatatttaagctggcacaaggagaatacatagcccctgaaaagattgaaaatatctacatgcgaagtgagcctgttgctcaggtgtttgtccacggagaaagcctgcaggcatttctcattgcaattgtggtaccagatgttgagacattatgttcctgggcccaaaagagaggatttgaagggtcgtttgaggaactgtgcagaaataaggatgtcaaaaaagctatcctcgaagatatggtgagacttgggaaggattctggtctgaaaccatttgaacaggtcaaaggcatcacattgcaccctgaattattttctatcgacaatggccttctgactccaacaatgaaggcgaaaaggccagagctgcggaactatttcaggtcgcagatagatgacctctattccactatcaaggtttagtgtgaagaagaaagctcagaggaaatggcacagttccacaatctcttctcctgctgatggccttcatgttgttaattttgaatacagcaagtgtagggaagraagcgttcgtgtttgacttgtccattcggggttcttctcataggaatgctagaggaaasagaacacygccttacagtcacctcatgttgcagaccatgtttatggtaatacacactttccaaaatgagccttaaaaattgtaaaggggatactataaatgtgctaagttatttgagacttcctcagtttaaaaagtgggttttaaatcttctgtctccctgtttytctaatcaaggggttaggactttgctatctctgagatgtctgctacttgctgcaaattctgcagctgtctgctgctctaaagagtacagtgcactagagggaagtgttccctttaaaaataagaacaactgtcctggctggagaatctcacaagcggaccagagatctttttaaatccctgctactgtcccttctcacaggcattcacagaacccttctgattcgtaagggttacgaaactcatgttcttctccagtcccctgtggtttctgttggagcataaggtttccagtaagcgggagggcagatccaactcagaaccatgcagataaggagcctctggcaaatgggtgctcatcagaacgcgtggattctctttcatggcagaatgctcttggactcggttctccaggcctgattccccgactccatcctttttcaggggttatttaaaaatctgccttagattctatagtgaagacaagcatttcaagaaagagttacctggatcagccatgctcagctgtgacrcctgaataactgtctactttatcttcactgaaccactcactctgtgtaaaggccaacrgatttttaatgtggttttcatatcaaaagatcatgttgggattaacttgcctttttccccaaaaaataaactctcaggcaagcatttctttaaagctattaagggagtatatacttgagtacttattgaaatggacagtaataagcaaatgttcttataatgctacctgatttctatgaaatgtgtttgacaagccaaaattctaggatgtagaaatctggaaagttcatttcctgggattmacttctccagggattttttaaagttaatttgggaaattaacagcagttcactttattgtgagtctttgccacatttgactgaattgagctgtcatttgtacatttaaagcagctgttttggggtctgtgagagtacatgtattatatacaagcacaacagggcttgcactaaagaattgtmattgtaataacactacttggtagcctaacttcatatatgtattcttaattgcacaaaaagtcaataatttgtcaccttggggttttgaatgtttgctttaagtgttggctatttctatgttttataaaccaaaacaaaatttccaaaaacaatgaaggaaaccaaaataaatatttctgcatttc

SEQ ID NO: 868 - DNA, 3493 bp, Homo sapiens
agcagcatcctggctcagccgcggcggtggcgggggcgcaaccagcgggccgaggcggcggcgccagcggctctttaaatagcatccagagccggcgcggggcagggagtgggctgcagtgacagccggcggcggagcggccggtccacggaggagaattcagcttagagaactatcaacacaggacaatgcaagcccatgagctgttccggtattttcgaatgccagagctggttgacttccgacagtacgtgcgtactcttccgaccaacacgcttatgggcttcggagcttttgcagcactcaccaccttctggtacgccacgagacccaaacccctgaagccgccatgcgacctctccatgcagtcagtggaagtggcgggtagtggtggtgcacgaagatccgcactacttgacagcgacgagcccttggtgtatttctatgatgatgtcacaacattatacgaaggtttccagaggggaatacaggtgtcaaataatggcccttgtttaggctctcggaaaccagaccaaccctatgaatggctttcatataaacaggttgcagaattgtcggagtgcataggctcagcactgatmcagaagggcttcaagactgccccagatcagttcattggcatctttgctcaaaatagacctgagtgggtgattattgaacaaggatgctttgcttattcratggtgatcgttccactttatgatacccttggaaatgaagccatcacgtacatagtcaacaaagctgaactctctctggtttttgttgacaagccagagaaggccaaactcttattagagggtgtagaaaataagttaataccaggccttaaaatcatagttgtcatggatgcctacggcagtgaactggtggaacgaggccagaggtgtggggtggaagtcaccagcatgaaggcgatggaggacctgggaagagccaacagacggaagcccaagcctccagcacctgaagatcttgcagtaatttgtttcacaagtggaactacaggcaaccccaaaggagcaatggtcactcaccgaaacatagtgagcgattgttcagcttttgtgaaagcaacagagaatacagtcaatccttgcccagatgatactttgatatctttcttgcctctcgcccatatgtttgagagagttgtagagtgtgtaatgctgtgtcatggagctaaaatcggatttttccaaggagatatcaggctgctcatggatgacctcaaggtgcttcaacccactgtcttccccgtggttccaagactgctgaaccggatgtttgaccgaattttcggacaagcaaacaccacgctgaagcgatggctcttggacttygcctccaagaggaaagaagcagagcttcgcagcggcatcatcagaaacaacagcctgtgggaccggctgatcttccacaaagtacagtcgagcctgggcggaagagtccggctgatggtgacaggagccgccccggtgtctgccactgtgctgacgttcctcagagcagccctgggctgtcagttttatgaaggatayggacagacagagtgcactgccgggtgctgcctraccatgcctggagactggaccgcaggccatgttggggccccgatgccgtgcaatttgataaaacttgttgatgtggaagaaatgaattacatggctgccgagggcgagggcgaggtgtgtgtgaaagggccaaatgtatttcagggctacttgaaggacccagcgaaaacagcagaagctttggacaaagacggctggttacacacaggggacattggaaaatggttaccaaatggcaccttgaaaattatcgaccggaaaaagcacatatttaagctggcacaaggagaatacatagcccctgaaaagattgaaaatatctacatgcgaagtgagcctgttgctcaggtgtttgtccacggagaaagcctgcaggcatttctcattgcaattgtggtaccagatgttgagacattatgttcctgggcccaaaagagaggatttgaagggtcgtttgaggaactgtgcagaaataaggatgtcaaaaaagctatcctcgaagatatggtgagacttgggaaggattctggtctgaaaccatttgaacaggtcaaaggcatcacattgcaccctgaattattttctatcgacaatggccttctgactccaacaatgaaggcgaaaaggccagagctgcggaactatttcaggtcgcagatagatgacctctattccactatcaaggtttagtgtgaagaagaaagctcagaggaaatggcacagttccacaatctcttctcctgctgatggccttcatgttgttaattttgaatacagcaagtgtagggaagraagcgttcgtgtttgacttgtccattcggggttcttctcataggaatgctagaggaaasagaacacygccttacagtcacctcatgttgcagaccatgtttatggtaatacacactttccaaaatgagccttaaaaattgtaaaggggatactataaatgtgctaagttatttgagacttcctcagactttgctatctctgagatgtctgctacttgctgcaaattctgcagctgtctgctgctctaaagagtacagtgcactagagggaagtgttccctttaaaaataagaacaactgtcctggctggagaatctcacaagcggaccagagatctttttaaatccctgctactgtcccttctcacaggcattcacagaacccttctgattcgtaagggttacgaaactcatgttcttctccagtcccctgtggtttctgttggagcataaggtttccagtaagcgggagggcagatccaactcagaaccatgcagataaggagcctctggcaaatgggtgctcatcagaacgcgtggattctctttcatggcagaatgctcttggactcggttctccaggcctgattccccgactccatcctttttcaggggttatttaaaaatctgccttagattctatagtgaagacaagcatttcaagaaagagttacctggatcagccatgctcagctgtgacrcctgaataactgtctactttatcttcactgaaccactcactctgtgtaaaggccaacrgatttttaatgtggttttcatatcaaaagatcatgttgggattaacttgcctttttccccaaaaaataaactctcaggcaagcatttctttaaagctattaagggagtatatacttgagtacttattgaaatggacagtaataagcaaatgttcttataatgctacctgatttctatgaaatgtgtttgacaagccaaaattctaggatgtagaaatctggaaagttcatttcctgggattmacttctccagggattttttaaagttaatttgggaaattaacagcagttcactttattgtgagtctttgccacatttgactgaattgagctgtcatttgtacatttaa

SEQ ID NO: 869 - DNA, 1547 bp, Homo sapiens
ctgaggattcctcacacatgtagtactcagagctctacggaaacccaggcacctcgacctcaagaggatcagcctggccagggtggcacaactcttccttccccgtgcacagcaggaaagctgccatcagctgagcaagtccaccaacagtttctgtgtcccacttcatctttaataagggggaaaaatgctcttttgggtgctaggcctcctaatcctctgtggttttctgtggactcgtaaaggaaaactaaagattgaagacatcactgataagtacatttttatcactggatgtgactcrggctttggaaacttggcagccagaacttttgataaaaagggatttcatgtaatcgctgcctgtctgactgaatcaggatcaacagctttaaaggcagaaacctcagagagacttygtactgtgcttctggatgtgaccgacccagagaatgtcaagaggactgcccagtgggtgaagaaccaagttggggagaaaggtctctggggtctgatcaataatgctggtgttcccggcgtgctggctcccactgactggctgacactagaggactacagagaacctattgaagtgaacctgtttggactcatcagtgtgacactaaatatgcttcctttggtcaagaaagctcaagggagagttattaatgtctccagtgttggaggtcgccttgcaatcgttggagggggctatactccatccaaatatgcagtggaaggtttcaatgacagcttaagacgggacatgaaagcttttggtgtgcacgtctcatgcattgaaccaggattgttcaaaacaaacttggcagatccagtaaaggtaattgaaaaaaaactcgccatttgggagcagctgtctccagacatcaaacaacaatatggagaaggttacattgaaaaaagtctagacaaactgaaaggcaataaatcctrtgtgaacatggacctctctccggtggtagagtgcatggaccacgctctaacaagtctcttccctaagactcattatgccgctggaaaasatgccaaaattttctggatacctctgtctcacatgccagcagctttgcaagactttttaytgttgaaacagaaagcagagctggctaatcccaaggcagtgtgactcagctaaccacaaaygtctcctccaggctatgaaattggccgatttcaagaacacatctccttttcaaccccattccttatctgctccaacctggactcatttagatcgtgcttatttggattgcaaaagggagtcccaccatcgctggtggtatcccagggtccctgctcaagttttctttgaaaaggagggctggaatggtacatcacataggcaagtcctgccctgtatttaggctttgcctgcttgstgtgatgtaagggaaattgaaagacttgcccattcaaaatgatctttaccgtggcctgccccatgcttatggtccccagcatttacagtaacttgtgaatgttaagtatcatctcttatctaaatattaaaagataagtcaaacatt

SEQ ID NO: 870 - DNA, 1792 bp, Homo sapiens
gaagccactgtgcatgctctatcaccagcctcaccctcctggtcagccttacaagagtgacactggatatactccagaagttggacccaccacagcctgcacactggacttcttggcttttatgagctattcaagagatatttagtcatcacgttgtgtcacaatgggagtgactcacagagcaaggagagaacctgaggattcctcacacatgtagtactcagagctctacggaaacccaggcacctcgacctcaagaggatcagcctggccagggtggcacaactcttccttccccgtgcacagcaggaaagctgccatcagctgagcaagtccaccaacagtttctgtgtcccacttcatctttaataaggacaccatcttcttgtattatacaagaaaggagtgtacctatcacacacagggggaaaaatgctcttttgggtgctaggcctcctaatcctctgtggttttctgtggactcgtaaaggaaaactaaagattgaagacatcactgataagtacatttttatcactggatgtgactcrggctttggaaacttggcagccagaacttttgataaaaagggatttcatgtaatcgctgcctgtctgactgaatcaggatcaacagctttaaaggcagaaacctcagagagacttygtactgtgcttctggatgtgaccgacccagagaatgtcaagaggactgcccagtgggtgaagaaccaagttggggagaaaggtctctggggtctgatcaataatgctggtgttcccggcgtgctggctcccactgactggctgacactagaggactacagagaacctattgaagtgaacctgtttggactcatcagtgtgacactaaatatgcttcctttggtcaagaaagctcaagggagagttattaatgtctccagtgttggaggtcgccttgcaatcgttggagggggctatactccatccaaatatgcagtggaaggtttcaatgacagcttaagacgggacatgaaagcttttggtgtgcacgtctcatgcattgaaccaggattgttcaaaacaaacttggcagatccagtaaaggtaattgaaaaaaaactcgccatttgggagcagctgtctccagacatcaaacaacaatatggagaaggttacattgaaaaaagtctagacaaactgaaaggcaataaatcctrtgtgaacatggacctctctccggtggtagagtgcatggaccacgctctaacaagtctcttccctaagactcattatgccgctggaaaasatgccaaaattttctggatacctctgtctcacatgccagcagctttgcaagactttttaytgttgaaacagaaagcagagctggctaatcccaaggcagtgtgactcagctaaccacaaaygtctcctccaggctatgaaattggccgatttcaagaacacatctccttttcaaccccattccttatctgctccaacctggactcatttagatcgtgcttatttggattgcaaaagggagtcccaccatcgctggtggtatcccagggtccctgctcaagttttctttgaaaaggagggctggaatggtacatcacataggcaagtcctgccctgtatttaggctttgcctgcttgstgtgatgtaagggaaattgaaagacttgcccattcaaaatgatctttaccgtggcctgccccatgcttatggtccccagcatttacagtaacttgtgaatgttaagtatcatctcttatctaaatattaaaagataagtcaaacatt

SEQ ID NO: 871 - DNA, 1269 bp, Homo sapiens
gaagccactgtgcatgctctatcaccagcctcaccctcctggtcagccttacaagagtgacactggatatactccagaagttggacccaccacagcctgcacactggacttcttggcttttatgagctattcaagagatatttagtcatcacgttgtgtcacaatgggagtgactcacagagcaaggagagaacctgaggattcctcacacatgtagtactcagagctctacggaaacccaggcacctcgacctcaagaggatcagcctggccagggtggcacaactcttccttccccgtgcacagcaggaaagctgccatcagctgagcaagtccaccaacagtttctgtgtcccacttcatctttaataaggacaccatcttcttgtattatacaagaaaggagtgtacctatcacacacagggggaaaaatgctcttttgggtgctaggcctcctaatcctctgtggttttctgtggactcgtaaaggaaaactaaagattgaagacatcactgataagtacatttttatcactggatgtgactcrggctttggaaacttggcagccagaacttttgataaaaagggatttcatgtaatcgctgcctgtctgactgaatcaggatcaacagctttaaaggcagaaacctcagagagacttygtactgtgcttctggatgtgaccgacccagagaatgtcaagaggactgcccagtgggtgaagaaccaagttggggagaaaggtctctggggtctgatcaataatgctggtgttcccggcgtgctggctcccactgactggctgacactagaggactacagagaacctattgaagtgaacctgtttggactcatcagtgtgacactaaatatgcttcctttggtcaagaaagctcaagggagagttattaatgtctccagtgttggaggtcgccttgcaatcgttggagggggctatactccatccaaatatgcagtggaaggtttcaatgacagcttaagacgggacatgaaagcttttggtgtgcacgtctcatgcattgaacgtctagacaaactgaaaggcaataaatcctrtgtgaacatggacctctctccggtggtagagtgcatggaccacgctctaacaagtctcttccctaagactcattatgccgctggaaaasatgccaaaattttctggatacctctgtctcacatgccagcagctttgcaagactttttaytgttgaaacagaaagcagagctggctaatcccaaggcagtg

SEQ ID NO: 872 - DNA, 1670 bp, Homo sapiens
gaagccactgtgcatgctctatcaccagcctcaccctcctggtcagccttacaagagtgacactggatatactccagaagttggacccaccacagcctgcacactggacttcttggcttttatgagctattcaagagatatttagtcatcacgttgtgtcacaatgggagtgactcacagagcaaggagagaacctgaggattcctcacacatgtagtactcagagctctacggaaacccaggcacctcgacctcaagaggatcagcctggccagggtggcacaactcttccttccccgtgcacagcaggaaagctgccatcagctgagcaagtccaccaacagtttctgtgtcccacttcatctttaataaggacaccatcttcttgtattatacaagaaaggagtgtacctatcacacacagggggaaaaatgctcttttgggtgctaggcctcctaatcctctgtggttttctgtggactcgtaaaggaaaactaaagattgaagacatcactgataagtacatttttatcactggatgtgactcrggctttggaaacttggcagccagaacttttgataaaaagggatttcatgtaatcgctgcctgtctgactgaatcaggatcaacagctttaaaggcagaaacctcagagagacttygtactgtgcttctggatgtgaccgacccagagaatgtcaagaggactgcccagtgggtgaagaaccaagttggggagaaaggtctctggggtctgatcaataatgctggtgttcccggcgtgctggctcccactgactggctgacactagaggactacagagaacctattgaagtgaacctgtttggactcatcagtgtgacactaaatatgcttcctacgggacatgaaagcttttggtgtgcacgtctcatgcattgaaccaggattgttcaaaacaaacttggcagatccagtaaaggtaattgaaaaaaaactcgccatttgggagcagctgtctccagacatcaaacaacaatatggagaaggttacattgaaaaaagtctagacaaactgaaaggcaataaatcctrtgtgaacatggacctctctccggtggtagagtgcatggaccacgctctaacaagtctcttccctaagactcattatgccgctggaaaasatgccaaaattttctggatacctctgtctcacatgccagcagctttgcaagactttttaytgttgaaacagaaagcagagctggctaatcccaaggcagtgtgactcagctaaccacaaaygtctcctccaggctatgaaattggccgatttcaagaacacatctccttttcaaccccattccttatctgctccaacctggactcatttagatcgtgcttatttggattgcaaaagggagtcccaccatcgctggtggtatcccagggtccctgctcaagttttctttgaaaaggagggctggaatggtacatcacataggcaagtcctgccctgtatttaggctttgcctgcttgstgtgatgtaagggaaattgaaagacttgcccattcaaaatgatctttaccgtggcctgccccatgcttatggtccccagcatttacagtaacttgtgaatgttaagtatcatctcttatctaaatattaaaagataagtcaaacatt

SEQ ID NO: 873 - DNA, 1297 bp, Homo sapiens
gacaccatcttcttgtattatacaagaaaggagtgtacctatcacacacagggggaaaaatgctcttttgggtgctaggcctcctaatcctctgtggttttctgtggactcgtaaaggaaaactaaagattgaagacatcactgataagtacatttttatcactggatgtgactcrggctttggaaacttggcagccagaacttttgataaaaagggatttcatgtaatcgctgcctgtctgactgaatcaggatcaacagctttaaaggcagaaacctcagagagacttygtactgtgcttctggatgtgaccgacccagagaatgtcaagaggactgcccagtgggtgaagaaccaagttggggagaaaggtctctggggtctgatcaataatgctggtgttcccggcgtgctggctcccactgactggctgacactagaggactacagagaacctattgaagtgaacctgtttggactcatcagtgtgacactaaatatgcttcctacgggacatgaaagcttttggtgtgcacgtctcatgcattgaaccaggattgttcaaaacaaacttggcagatccagtaaaggtaattgaaaaaaaactcgccatttgggagcagctgtctccagacatcaaacaacaatatggagaaggttacattgaaaaaagtctagacaaactgaaaggcaataaatcctrtgtgaacatggacctctctccggtggtagagtgcatggaccacgctctaacaagtctcttccctaagactcattatgccgctggaaaasatgccaaaattttctggatacctctgtctcacatgccagcagctttgcaagactttttaytgttgaaacagaaagcagagctggctaatcccaaggcagtgtgactcagctaaccacaaaygtctcctccaggctatgaaattggccgatttcaagaacacatctccttttcaaccccattccttatctgctccaacctggactcatttagatcgtgcttatttggattgcaaaagggagtcccaccatcgctggtggtatcccagggtccctgctcaagttttctttgaaaaggagggctggaatggtacatcacataggcaagtcctgccctgtatttaggctttgcctgcttgstgtgatgtaagggaaattgaaagacttgcccattcaaaatgatctttaccgtggcctgccccatgcttatggtccccagcatttacagtaacttgtgaatgttaagtatcatctcttatctaaatattaaaagataagtcaaacatt

SEQ ID NO: 874 - DNA, 1209 bp, Homo sapiens
ggatcgaggaagactccgcccgcacccggccgcamggaggtcaccgtggagcggaaaagggtagcgctgcgaacgtcgtaaaatgccgggccgggctgctttccggcaggcgttggagaggctgctttccggcggcgccgggcgagaagcgcgactggagtctggggctgcggcttcccagaggcgcgagtcgcttttccaggagccgaggcccaaacggggccgggcctgaagggtcccmcgccagcccgcggccgcgccatcaatcgccgccgcctcgtcccgcttctcggctgaggcgccgcgcggccaggcagcgggtccaggcctcagccgcgcgcccaggggcctccggggccctcccgggtcagcatgcccggggtgaaactgaccacccaggcctactgcaagatggtgctgcacggcgccaagtacccgcactgcgccgtcaacgggctcctggtggccgagaagcagaagccrcgtaaggagcacctccccctgggcggccccggcgcccaccacaccctcttcgtggactgcatccccctcttccacggcaccctggccctcgcccccatgctggaggtggctctcaccctgattgattcatggtgcaaagatcatagctacgtgattgctggttattatcaagctaatgagcgagtaaaggatgccagtccaaaccaggttgcagagaakgtggcctccagaatcgccgagggcttcagcgacactgcgctcatcatggtagacaacaccaagtttacgatggactgcgtagcgcctacgatccacgtgtacgagcaccatgagaacagatggcggtgcagagacccacaccatgactactgtgaagactggccagaggcacagaggatctcagcctcgctcctggacagccggtcctacgagacgctcgtggatttcgataaccacctggatgacattcggaatgactggacaaacccagagatcaataaagytgtcctacacttgtgctaggcaggcaccgctgtgactgggctccgggcctttccactacgttgaagaagaaaacctatttttaaatttcaatcaaatgcctggtaggaattgctagcgttgcccctgccaactctcagacggagtctcgcactgtcacccgattggagcacaatgccgcagtctcggttcactgcaacctccgcctgctgggttcaagcgatt

SEQ ID NO: 875 - DNA, 2088 bp, Homo sapiens
ggatcgaggaagactccgcccgcacccggccgcamggaggtcaccgtggagcggaaaagggtagcgctgcgaacgtcgtaaaatgccgggccgggctgctttccggcaggcgttggagaggctgctttccggcggcgccgggcgagaagcgcgactggagtctggggctgcggcttcccagaggcgcgagtcgcttttccaggagccgaggcccaaacggggccgggcctgaagggtcccmcgccagcccgcggccgcgccatcaatcgccgccgcctcgtcccgcttctcggctgaggcgccgcgcggccaggcagcgggtccaggcctcagccgcgcgcccaggggcctccggggccctcccgggtcagcatgcccggggtgaaactgaccacccaggcctactgcaagatggtgctgcacggcgccaagtacccgcactgcgccgtcaacgggctcctggtggccgagaagcagaagccrcgtaaggagcacctccccctgggcggccccggcgcccaccacaccctcttcgtggactgcatccccctcttccacggcaccctggccctcgcccccatgctggaggtggctctcaccctgattgattcatggtgcaaagatcatagctacgtgattgctggttattatcaagctaatgagcgagtaaaggatgccagtccaaaccaggttgcagagaakgtggcctccagaatcgccgagggcttcagcgacactgcgctcatcatggtagacaacaccaagtttacgatggactgcgtagcgcctacgatccacgtgtacgagcaccatgagaacagatggcggtgcagagacccacaccatgactactgtgaagactggccagaggcacagaggatctcagcctcgctcctggacagccggtcctacgagacgctcgtggatttcgataaccacctggatgacattcggaatgactggacaaacccagagatcaataaagytgtcctacacttgtgctaggcaggcaccgctgtgactgggctccgggcctttccactacgttgaagaagaaaacctatttttaaatgtaaataaaatatctkgtagcctgtgtggaaagctgaccgttttaagaagtggcatgtgccttgaaagggggcagaatgttcagtcggtcgtgtttttaacacagagtctctagaagaggtgcagacatcccgtctgactgtccctgtggactctctcagttgtatgttgctataatcctccaaatcaaagctctttctgcttgtgcaagattgttcctattaaacagttttaactaaccttttataatctggagagaatactttttaaggcttttgaactatcttttttttaaaaaaaaaaaaaagcccacatcttatactccaatgagtgtgtttgtgagtttttatcctgtttgaattttgatgtcgtccaggcgtcctgggatcagggtagacacgtggagtgctggtgctgagctgtttgagaagctctgtgtgggtgtttctgtggtcaggtaggctgggctgtgaacagcactgctccacatggtgtcggctcacagagccaccgcaactctgcccagcgggagtgacaccactgatgccacagaagcctttatcgttaggggcaaaagcagacatctctggtagcaggagctcagtgtggtgctcttcagccacgcagaaagctcacgtgcctgcagggccaggaaagggaaatgatcgtttcttttgtattaggaaaaacaagacttagacttcccgagttgtgcagagtgacgtctgtactttttatacttagaacatttggtcaagttttgtaaccaaaccttagggaattgagagggaaactttatggtacgtttaccttttttcctttttatatgaattattttgtacaaagttcagagagcggtacctttcctactgtcttttctttgactccatggaggaatttgtaacgatcggtgtgacctgaaagggtttgtgatacagcggtcactattttctcttaacacataggaaaaaagttcagacatcgctacaataaatgtgctttatttgatccaccaaa

SEQ ID NO: 876 - DNA, 728 bp, Homo sapiens
tgctctcttccggtcgckggacaccgggtgtagagggcggtcgcggcgggcagtggcggcaggtgtacatttttatctttcagaatgttgrctaccagggtatttagcctagttggcaagcgagcaatttccacctctgtgtgtgtacgagctcatgaaagtgttgtgaagagcgaagacttttcgctcccagcttatatggatcggcgtgaccaccccttgccggaggtggcccatgtcaagcacctgtctgccagccagaaggcaytgaaggagaaggagaaggcctcctggagcagcctctccatggaygagaaagtcgagttgtatcgcattaagttcaaggagagctttgctgagatgaacaggggctcgaacgagtggaagacggttgtgggcggtgccatgttcttcatcggtttcaccgcgctcgytatcatgtggcagaagcactatgtgtacggccccctcccgcaaagctttgacaaagagtgggtggccaagcagaccaagaggaygctggacatgaaggtgaaccccatccagggcttagcctccaagtgggactacgaaaagaacgagtggaagrrgtgagagatgctggcctgcgcctgcacctgcgcctggctctgtcaccgccatgcaactccatgcctatttactggaaacctgttatgccaaacagttgtaccactgctaataaatgaccagtttacctgaaacccttt

SEQ ID NO: 877 - DNA, 808 bp, Homo sapiens
cgacgttcgcagcgctacccttttccgctccacggtgacctccktgcggccgggtgcgggcggagtcttcctcgatcccgtrgtgctccgcggcgcggcsttgctctcttccggtcgckggacaccgggtgtagagggcggtcgcggcgggcagtggcggcagaatgttgrctaccagggtatttagcctagttggcaagcgagcaatttccacctctgtgtgtgtacgagctcatgaaagtgttgtgaagagcgaagacttttcgctcccagcttatatggatcggcgtgaccaccccttgccggaggtggcccatgtcaagcacctgtctgccagccagaaggcaytgaaggagaaggagaaggcctcctggagcagcctctccatggaygagaaagtcgagttgtatcgcattaagttcaaggagagctttgctgagatgaacaggggctcgaacgagtggaagacggttgtgggcggtgccatgttcttcatcggtttcaccgcgctcgytatcatgtggcagaagcactatgtgtacggccccctcccgcaaagctttgacaaagagtgggtggccaagcagaccaagaggaygctggacatgaaggtgaaccccatccagggcttagcctccaagtgggactacgaaaagaacgagtggaagrrgtgagagatgctggcctgcgcctgcacctgcgcctggctctgtcaccgccatgcaactccatgcctatttactggaaacctgttatgccaaacagttgtaccactgctaataaatgaccagtttacctgaaacccttt

SEQ ID NO: 878 - DNA, 2655 bp, Homo sapiens
gccggcaccggatggtgggcgggggccagccgtgcgggtacgcggcccgcgcgcccctagccaccgccgcgtggcaccgtcccgagcgcgtggcgcggggcgctggctgccgggcgggggcctggggccgcggacgctgggggcgcctcggccgcgctcagcctttagatcggagaatgcgggcggggtgggggcgctcggggtccccgcagtcactccagggtcgatttctcggcgggcgccgcggcctgtgcgaggccgggccccttggagtgccccgggaggtggtgctgggcgtctgaacaccacatcccttcctgcgcccgtgtgtgggttgggaatgccgggtgtaggccctggatcagagctgacggrgttgcgagcggcgtggggtgtgcctgggacggtgaccggatgtgtcttcctgaatcgttgtattcgagctccagttctctctgtttctacagctgggcctcagtcctcacagggctctagtgggcgttcagccacaccaggagaaggcgcccaggggattaacaggacccttccctctcctgctcttccctcgccccccatggctccccctccctcctatttagtaggtacttctccagcaccccacagcgatgatggatgctggccctaaagccaggcactgccgccctgcactgtagcagatgcctaaataaagtgtggagcctgaagcagaagttttgggagatgcttgccttcctttagaccacattcctcgcctttctcaagatttctccgtgacccaacatgagtgaagtttcctgcaagaaacgggacgactatttggaatggccagagtattttatggctgtggccttcttatcagcacagagaagcaaagatccaaattcccaggtcggygcctgcatcgtgaattcagaaaacaagattgtcgggattgggtacaatgggatgccaratgggtgcagtgatgacgtgttgccttggagaaggacagcagagaataagctggacaccaaatacccgtacgtgtgccatgcsgagctgaatgccatcatgaacaaaaattcgaccgatgtgaaaggctgtagtatgtatgtygccttgttcccttgtaatgaatgcgctaagctcatcatccaggcaggtataaaagaagtgattttcatgtctgataaataccatgatagtgacgaggcaactgctgcgaggctcctgtttaatatggccggggtgacattccggaaattcataccgaagtgcagcaagattgtcattgactttgattcaattaacagcagaccgagtcaaaagcttcagtgagttacatctcattcaatctccagaagattgggattatcgtcttctaagaggttgctaatgcctttcatcttgaagttacacataacttcttactagccagtatggcaaaagtaggcatctaaagaatataaagcctcaaatcttccttactgtctctcttgtcacatggaatctacatgtgtttgaactattgctttaggrtttaaaataggggagcctgtggtggcctggtgcacagggctagaacgagrgtgcctccccttcytgtgtcctggctggctgggatgctggtggctcttcagaggagcatcagctgtctgtcatctgctgcgatccggcagcctctcttcactgctacatgtgctggaaggacaaataaataattgtggttgtgttcttaatggggacragcagacacactgatctgaacatctggcccaagtgaagcatggcatatagtgcccttggaagaaaattaggcctcaaatgacagtagcattgaagtrtttgctgcagagttgagggaaacccccagccaccctcccggaatccgagatagggtggcacatctgtcctgacagacgaggagtgtaactgaaccaggaatatttcctccattcctgctctcccactgcacacagggtggtggcacattatccctctggggggtggggacgcctgttgttttggctcaatttgggtttgttggtcacatggagctcttccatttcgtttagctgaataatgagttgttcctagaggagacagcctgtctctccttgttgcccccaaagcccatgccctgccgtggtggcagctggggctgtggatgggaggggtccccaacatggatgtgttgcccctcctccgcatrccaacgcrgttcatgtacaaggcccctctgcaactggakagaaaattaattcctatcccgtgagtggattgtgagaaattccacccacgtggagacagcttactgcagcactgttggtgttcggagctcttctgtgccctggctccatgctttcacctacacaarcatcaccttcctaatcaccgcggggyggggagcgtgtggctstgccccttctctttaatctcatttaatttttattaaacatgctcagtacctgtgttgagaaaaggctttctttatcctaaagattattacctttttaaagtgctcttatattttcatgagtttttattttgtctctgagattttgtattccacattctagggtattctgtaatttggctccttaccaatattattaaaatcttattaaaatctaccctaccaaagcatgtacatttttatgttattataattatatg

SEQ ID NO: 879 - DNA, 2094 bp, Homo sapiens
acttccttccctgagcacggcggcggcggggacgagcaccggcctgcgcgcggagccggcaccggatggtgggcgggggccagccgtgcgggcactgccgccctgcactgtagcagatgcctaaataaagtgtggagcctgaagcagaagttttgggagatgcttgccttcctttagaccacattcctcgcctttctcaagatttctccgtgacccaacatgagtgaagtttcctgcaagaaacgggacgactatttggaatggccagagtattttatggctgtggccttcttatcagcacagagaagcaaagatccaaattcccaggtcggygcctgcatcgtgaattcagaaaacaagattgtcgggattgggtacaatgggatgccaratgggtgcagtgatgacgtgttgccttggagaaggacagcagagaataagctggacaccaaatacccgtacgtgtgccatgcsgagctgaatgccatcatgaacaaaaattcgaccgatgtgaaaggctgtagtatgtatgtygccttgttcccttgtaatgaatgcgctaagctcatcatccaggcaggtataaaagaagtgattttcatgtctgataaataccatgatagtgacgaggcaactgctgcgaggctcctgtttaatatggccggggtgacattccggaaattcataccgaagtgcagcaagattgtcattgactttgattcaattaacagcagaccgagtcaaaagcttcagtgagttacatctcattcaatctccagaagattgggattatcgtcttctaagaggttgctaatgcctttcatcttgaagttacacataacttcttactagccagtatggcaaaagtaggcatctaaagaatataaagcctcaaatcttccttactgtctctcttgtcacatggaatctacatgtgtttgaactattgctttaggrtttaaaataggggagcctgtggtggcctggtgcacagggctagaacgagrgtgcctccccttcytgtgtcctggctggctgggatgctggtggctcttcagaggagcatcagctgtctgtcatctgctgcgatccggcagcctctcttcactgctacatgtgctggaaggacaaataaataattgtggttgtgttcttaatggggacragcagacacactgatctgaacatctggcccaagtgaagcatggcatatagtgcccttggaagaaaattaggcctcaaatgacagtagcattgaagtrtttgctgcagagttgagggaaacccccagccaccctcccggaatccgagatagggtggcacatctgtcctgacagacgaggagtgtaactgaaccaggaatatttcctccattcctgctctcccactgcacacagggtggtggcacattatccctctggggggtggggacgcctgttgttttggctcaatttgggtttgttggtcacatggagctcttccatttcgtttagctgaataatgagttgttcctagaggagacagcctgtctctccttgttgcccccaaagcccatgccctgccgtggtggcagctggggctgtggatgggaggggtccccaacatggatgtgttgcccctcctccgcatrccaacgcrgttcatgtacaaggcccctctgcaactggakagaaaattaattcctatcccgtgagtggattgtgagaaattccacccacgtggagacagcttactgcagcactgttggtgttcggagctcttctgtgccctggctccatgctttcacctacacaarcatcaccttcctaatcaccgcggggyggggagcgtgtggctstgccccttctctttaatctcatttaatttttattaaacatgctcagtacctgtgttgagaaaaggctttctttatcctaaagattattacctttttaaagtgctcttatattttcatgagtttttattttgtctctgagattttgtattccacattctagggtattctgtaatttggctccttaccaatattattaaaatcttattaaaatctaccctaccaaagcatgtacatttttatgttattataattatatg

SEQ ID NO: 880 - DNA, 1837 bp, Homo sapiens
acttccttccctgagcacggcggcggcggggacgagcaccggcctgcgcgcggagccggcaccggatggtgggcgggggccagccgtgcggacccaacatgagtgaagtttcctgcaagaaacgggacgactatttggaatggccagagtattttatggctgtggccttcttatcagcacagagaagcaaagatccaaattcccagtgtgccatgcsgagctgaatgccatcatgaacaaaaattcgaccgatgtgaaaggctgtagtatgtatgtygccttgttcccttgtaatgaatgcgctaagctcatcatccaggcaggtataaaagaagtgattttcatgtctgataaataccatgatagtgacgaggcaactgctgcgaggctcctgtttaatatggccggggtgacattccggaaattcataccgaagtgcagcaagattgtcattgactttgattcaattaacagcagaccgagtcaaaagcttcagtgagttacatctcattcaatctccagaagattgggattatcgtcttctaagaggttgctaatgcctttcatcttgaagttacacataacttcttactagccagtatggcaaaagtaggcatctaaagaatataaagcctcaaatcttccttactgtctctcttgtcacatggaatctacatgtgtttgaactattgctttaggrtttaaaataggggagcctgtggtggcctggtgcacagggctagaacgagrgtgcctccccttcytgtgtcctggctggctgggatgctggtggctcttcagaggagcatcagctgtctgtcatctgctgcgatccggcagcctctcttcactgctacatgtgctggaaggacaaataaataattgtggttgtgttcttaatggggacragcagacacactgatctgaacatctggcccaagtgaagcatggcatatagtgcccttggaagaaaattaggcctcaaatgacagtagcattgaagtrtttgctgcagagttgagggaaacccccagccaccctcccggaatccgagatagggtggcacatctgtcctgacagacgaggagtgtaactgaaccaggaatatttcctccattcctgctctcccactgcacacagggtggtggcacattatccctctggggggtggggacgcctgttgttttggctcaatttgggtttgttggtcacatggagctcttccatttcgtttagctgaataatgagttgttcctagaggagacagcctgtctctccttgttgcccccaaagcccatgccctgccgtggtggcagctggggctgtggatgggaggggtccccaacatggatgtgttgcccctcctccgcatrccaacgcrgttcatgtacaaggcccctctgcaactggakagaaaattaattcctatcccgtgagtggattgtgagaaattccacccacgtggagacagcttactgcagcactgttggtgttcggagctcttctgtgccctggctccatgctttcacctacacaarcatcaccttcctaatcaccgcggggyggggagcgtgtggctstgccccttctctttaatctcatttaatttttattaaacatgctcagtacctgtgttgagaaaaggctttctttatcctaaagattattacctttttaaagtgctcttatattttcatgagtttttattttgtctctgagattttgtattccacattctagggtattctgtaatttggctccttaccaatattattaaaatcttattaaaatctaccctaccaaagcatgtacatttttatgttattataattatatg

SEQ ID NO: 881 - DNA, 1882 bp, Homo sapiens
acccaacatgagtgaagtttcctgcaagaaacgggacgactatttggaatggccagagtattttatggctgtggccttcttatcagcacagagaagcaaagatccaaattcccaggtcggygcctgcatcgtgaattcagaaaacaagattgtcgggattgggtacaatgggatgccaratgggtgcagtgatgacgtgttgccttggagaaggacagcagagaataagctggacaccaaatacccgtacgtgtgccatgcsgagctgaatgccatcatgaacaaaaattcgaccgatgtgaaaggctgtagtatgtatgtygccttgttcccttgtaatgaatgcgctaagctcatcatccaggcaggtataaaagaagtgattttcatgtctgataaataccatgatagtgacgaggcaactgctgcgaggctcctgtttaatatggccggggtgacattccggaaattcataccgaagtgcagcaagattgtcattgactttgattcaattaacagcagaccgagtcaaaagcttcagtgagttacatctcattcaatctccagaagattgggattatcgtcttctaagaggttgctaatgcctttcatcttgaagttacacataacttcttactagccagtatggcaaaagtaggcatctaaagaatataaagcctcaaatcttccttactgtctctcttgtcacatggaatctacatgtgtttgaactattgctttaggrtttaaaataggggagcctgtggtggcctggtgcacagggctagaacgagrgtgcctccccttcytgtgtcctggctggctgggatgctggtggctcttcagaggagcatcagctgtctgtcatctgctgcgatccggcagcctctcttcactgctacatgtgctggaaggacaaataaataattgtggttgtgttcttaatggggacragcagacacactgatctgaacatctggcccaagtgaagcatggcatatagtgcccttggaagaaaattaggcctcaaatgacagtagcattgaagtrtttgctgcagagttgagggaaacccccagccaccctcccggaatccgagatagggtggcacatctgtcctgacagacgaggagtgtaactgaaccaggaatatttcctccattcctgctctcccactgcacacagggtggtggcacattatccctctggggggtggggacgcctgttgttttggctcaatttgggtttgttggtcacatggagctcttccatttcgtttagctgaataatgagttgttcctagaggagacagcctgtctctccttgttgcccccaaagcccatgccctgccgtggtggcagctggggctgtggatgggaggggtccccaacatggatgtgttgcccctcctccgcatrccaacgcrgttcatgtacaaggcccctctgcaactggakagaaaattaattcctatcccgtgagtggattgtgagaaattccacccacgtggagacagcttactgcagcactgttggtgttcggagctcttctgtgccctggctccatgctttcacctacacaarcatcaccttcctaatcaccgcggggyggggagcgtgtggctstgccccttctctttaatctcatttaatttttattaaacatgctcagtacctgtgttgagaaaaggctttctttatcctaaagattattacctttttaaagtgctcttatattttcatgagtttttattttgtctctgagattttgtattccacattctagggtattctgtaatttggctccttaccaatattattaaaatcttattaaaatctaccctaccaaagcatgtacatttttatgttattataattatatg

SEQ ID NO: 882 - DNA, 1842 bp, Homo sapiens
acttccttccctgagcacggcggcggcggggacgagcaccggcctgcgcgcggagccggcaccggatggtgggcgggggccagccgtgcggacccaacatgagtgaagtttcctgcaagaaacgggacgactatttggaatggccagagtattttatggctgtggccttcttatcagcacagagaagcaaagatccaaattcccaggtcggygcctgcatcgtgaattcagaaaacaagattgtcgggattgggtacaatgggatgccaratgggtgcagtgatgacgtgttgccttggagaaggacagcagagaataagctggacaccaaatacccgtacgtgtgccatgcsgagctgaatgccatcatgaacaaaaattcgaccgatgtgaaaggctgtagtatgtatgtygccttgttcccttgtaatgaatgcgctaagctcatcatccaggcaggtataaaagaagtgattttcatgtctgataaataccatgatagtgacgaggcaactgctgcgaggctcctgtttaatatggccggggtgacattccggaaattcataccgaagtgcagcaagattgtcattgactttgattcaattaacagcagaccgagtcaaaagcttcagtgagttacatctcattcaatctccagaagattgggattatcgtcttctaagaggttgctaatgcctttcatcttgaagttacacataacttcttactagccagtatggcaaaatcacatggaatctacatgtgtttgaactattgctttaggrtttaaaataggggagcctgtggtggcctggtgcacagggctagaacgagrgtgcctccccttcytgtgtcctggctggctgggatgctggtggctcttcagaggagcatcagctgtctgtcatctgctgcgatccggcagcctctcttcactgctacatgtgctggaaggacaaataaataattgtggttgtgttcttaatggggacragcagacacactgatctgaacatctggcccaagtgaagcatggcatatagtgcccttggaagaaaattaggcctcaaatgacagtagcattgaagtrtttgctgcagagttgagggaaacccccagccaccctcccggaatccgagatagggtggcacatctgtcctgacagacgaggagtgtaactgaaccaggaatatttcctccattcctgctctcccactgcacacagggtggtggcacattatccctctggggggtggggacgcctgttgttttggctcaatttgggtttgttggtcacatggagctcttccatttcgtttagctgaataatgagttgttcctagaggagacagcctgtctctccttgttgcccccaaagcccatgccctgccgtggtggcagctggggctgtggatgggaggggtccccaacatggatgtgttgcccctcctccgcatrccaacgcrgttcatgtactggakagaaaattaattcctatcccgtgagtggattgtgagaaattccacccacgtggagacagcttactgcagcactgttggtgttcggagctcttctgtgccctggctccatgctttcacctacacaarcatcaccttcctaatcaccgcggggyggggagcgtgtggctstgccccttctctttaatctcatttaatttttattaaacatgctcagtacctgtgttgagaaaaggctttctttatcctaaagattattacctttttaaagtgctcttatattttcatgagtttttattttgtctctgagattttgtattccacattctagggtattctgtaatttggctccttaccaatatta

SEQ ID NO: 883 - DNA, 1973 bp, Homo sapiens
acttccttccctgagcacggcggcggcggggacgagcaccggcctgcgcgcggagccggcaccggatggtgggcgggggccagccgtgcggacccaacatgagtgaagtttcctgcaagaaacgggacgactatttggaatggccagagtattttatggctgtggccttcttatcagcacagagaagcaaagatccaaattcccaggtcggygcctgcatcgtgaattcagaaaacaagattgtcgggattgggtacaatgggatgccaratgggtgcagtgatgacgtgttgccttggagaaggacagcagagaataagctggacaccaaatacccgtacgtgtgccatgcsgagctgaatgccatcatgaacaaaaattcgaccgatgtgaaaggctgtagtatgtatgtygccttgttcccttgtaatgaatgcgctaagctcatcatccaggcaggtataaaagaagtgattttcatgtctgataaataccatgatagtgacgaggcaactgctgcgaggctcctgtttaatatggccggggtgacattccggaaattcataccgaagtgcagcaagattgtcattgactttgattcaattaacagcagaccgagtcaaaagcttcagtgagttacatctcattcaatctccagaagattgggattatcgtcttctaagaggttgctaatgcctttcatcttgaagttacacataacttcttactagccagtatggcaaaagtaggcatctaaagaatataaagcctcaaatcttccttactgtctctcttgtcacatggaatctacatgtgtttgaactattgctttaggrtttaaaataggggagcctgtggtggcctggtgcacagggctagaacgagrgtgcctccccttcytgtgtcctggctggctgggatgctggtggctcttcagaggagcatcagctgtctgtcatctgctgcgatccggcagcctctcttcactgctacatgtgctggaaggacaaataaataattgtggttgtgttcttaatggggacragcagacacactgatctgaacatctggcccaagtgaagcatggcatatagtgcccttggaagaaaattaggcctcaaatgacagtagcattgaagtrtttgctgcagagttgagggaaacccccagccaccctcccggaatccgagatagggtggcacatctgtcctgacagacgaggagtgtaactgaaccaggaatatttcctccattcctgctctcccactgcacacagggtggtggcacattatccctctggggggtggggacgcctgttgttttggctcaatttgggtttgttggtcacatggagctcttccatttcgtttagctgaataatgagttgttcctagaggagacagcctgtctctccttgttgcccccaaagcccatgccctgccgtggtggcagctggggctgtggatgggaggggtccccaacatggatgtgttgcccctcctccgcatrccaacgcrgttcatgtacaaggcccctctgcaactggakagaaaattaattcctatcccgtgagtggattgtgagaaattccacccacgtggagacagcttactgcagcactgttggtgttcggagctcttctgtgccctggctccatgctttcacctacacaarcatcaccttcctaatcaccgcggggyggggagcgtgtggctstgccccttctctttaatctcatttaatttttattaaacatgctcagtacctgtgttgagaaaaggctttctttatcctaaagattattacctttttaaagtgctcttatattttcatgagtttttattttgtctctgagattttgtattccacattctagggtattctgtaatttggctccttaccaatattattaaaatcttattaaaatctaccctaccaaagcatgtacatttttatgttattataattatatg

SEQ ID NO: 884 - DNA, 4801 bp, Homo sapiens
gaggaaaaggcttctcttttacatcgtactcaggaagaaagaagaaagagagaggaagaaaggcgaaggttgaaaaatgcaataattatccagtcatttattcgaggctatagagacagaaaacagcaatattccatccaaagaagtgcatttgatcgctgtgctaccttgtcacagtccgggggcgcttttcccattgctaatggccccaaccttacccttttggtaaggcagcttctgtttttttacaaacaaaatgaagactcaaaacgtttgatatggctgtatcagaacttaattaaacacagctctctgtttgtcaagcagttggatggatctgagagacttacatgcttatttcagataaaaagattgatgagcctctgttgcaggttgctgcaaaactgtaatgatgacagtttgaatgttgcacttccaatgagaatgcttgaagtattttcgtctgagaatacttacttgcctgttttacaagatgctagctatgtggtgtcagtgattgaacaaattttgcactacatgattcacaatgggtattataggtctctatatttgttgattaacagcaagcttccatcaagtattgaatattctgatttatctcgagttcctatagcaaaaattttgctagagaatgttctaaaaccattgcactttacttacaactcctgtccrgaaggtgcgaggcaacaagtttttacagccttcacagaggagtttctggcagcaccttttacagatcagatttttcatttcatcattccggcgcttgcagatgcgcagaccgttttcccttacgagccctttctgaatgcactgttgttaatagagagtagatgttcaagaaagagtggtggagcaccctggcttttctatttcgttttaactgttggcgaaaattatttgggggccctctctgaggaagggctgctggtgtatttgcgggtgctgcagaccttcctctctcagttaccagtctctcctgccagcgcgagctgtcacgactcagccagtgactctgaggaggagagtgaagaagccgacaagccctcaagcccggaggatggcagactgtcagtatcatacrtaacagaggaatgcctgaagaagctggacacaaagcagcagaccaacaccctgctcaacctggtgtggaggractctgcgagcgaggaggtcttcaccaccatggcytccgtctgccacacgctgatggtgcagcaccgcatgatggtacccaaagtcaggcttctctacagtttagcctttaatgccaggtttctgagacatctttggtttctaatatcttccatgtcaacacggatgatcacagggkctatggtaccgttgcttcaggtgatatccaggggttctcctatgtcttttgaagattctagtcgaatcatcccactcttttayctttttagctccttgtttagtcattcactaatttccatacatgataacgaattcttcggtgatcccrtagaagttgtaggtcaaagacaatcatcaatgatgccttttactttagaagagctgataatgttgtctcgatgccttcgagatgcatgcctggggatcatcaagttggcttatccagaaaccaagccagaagttcgagaagaatatattacagcatttcagagtattggagttactactagctctgaaatgcaacaatgcatacagatggaacagaaaagatggattcagttatttaaggttatcaccaatctagtgaaaatgttgaagtccagagacacgaggagaaatttttgtcctccaaaccactggctgtcagaacaagaagatattaaagcagataaggtcactcagctctatgtgccagcatccagacatgtgtggaggttccggcggatggggaggataggcccgctgcagtccaccctggacgtgggtttggagtccccrccgctgtctgtgtctgaggaaagacagcttgctgtcctgacagagttgccttttgtggttccatttgaggaacgagtaaagatctttcagaggttgatttatgcagataagcaagaagttcaaggagatggtccatttctggatggaattaatgtcacaataagaagaaattacatttatgaagatgcttatgacaaactttctccagaaaatgagcctgatttgaaaaagcggatccgtgtgcacttgctcaatgcccatggcctggatgaagctggcattgatggtggtggtattttcagagagtttttaaatgaactactgaagtcaggatttaaccccaaccaggggttctttaagactactaatgaagggcttctgtaccccaacccggctgctcagatgcttgtgggagattcttttgccagacattactacttcctaggcagaatgcttggaaaggctctctatgagaacatgctggtggagctgccctttgcaggcttctttctttccaagttgcttggaaccagtgccgacgtggacattcaccacctcgcctccctagaccctgaggtgtataagaatttgctctttctgaagagctacgaagacgatgtggaggagcttgggctgaacttcactgtggtgaacaatgacctgggagaggcgcaggtagttgaactaaaattcggtgggaaagacatccctgtcaccagcgccaaccggattgcgtacatccacttggtggcagactacaggctgaacaggcagatccgccagcactgcctggctttccgccagggccttgccaatgtcgtcagcctcgagtggctccgaatgtttgatcagcaagaaattcaggtattaatttctggtgcacaagttcccataagcctagaggacctaaaatcctttacaaactattcaggaggctattctgcagaccatcctgttattaaggtcttctggagagttgtggaagggttcactgatgaagaaaagcgcaaactgctgaagtttgtaacaagctgctctcgaccccctctcttggggtttaaggagttgtatcccgcattttgtattcacaacggaggctccgaccttgagcggctccccacagccagcacctgcatgaacctgctgaagctccccgagttctatgacgagacacttttgcgaagtaaacttctctatgcgattgaatgtgccgctggctttgagctgagctgaagctgatgctggggtcagacccctacagagaaccagtgcttccttcgtcagcagcgcctccccagacccacgaggataytcacactgcacgcctgaggctctcctaagctccttctttcattctgccattcctccctcccttccttttttaaatgatttttattacggtgtggtcacttatttagatggacattgcttttcaaataacttaaaataacacgttatgtgccatgtggctactttagtaatattgccaagaagagcacagtttttacactagtggcatctcagtgaaattaaccaaagatgaagctttggctttgctggtgagatcagagccctcctgagcaggcagcgccactccagggttcagacagggctgcacaggcggcagagatacagggtctgagggctgagacgccatggggccgctgctgcttatgtggttggattgtttacaagcctcattattaaaactgaaggcattttttttttctgctgcctttcccaaagtggttaggtttggaaaagagatgatgatggtaatattttatttgtgctttttaagccatttccccaaatgggactagcatgcttgttttcagtataccgtggcctgcctcatgatggtttggagatactgtctgtggatgtgaggtggggacttcattcattgtcctatttctatctccactttgtgcctggagagctttcaggggaggtggaggaggagggtctgccaagctactgcaacatctgtcacccmctatacccagttacttgggggaggacagacactgtggtgtcattaaagttgtttgaaccaaagtggcggctgcatctttgtcccgatgctagccgtgccggtctcccatcatccgctcgccctcctttcccctgggctgcgcccacttgtcttcctggatatttgggggtgactcgccatgcttggcaccctctgcttcctggtgctgctctgactcgaagacgggacagtccctggtgcacatccagggaagaggagygtcggtagttcttgcagtaggcactttatcaggacctgacctgttgctgggtgattttagtctctacaaacagaaagcgtttcaaagcgtcagctgtgggagcagagtgaccctttgctgatgctggggggaggggatctaaatcctcatttatctcttctatgtctmgtattttactgtcactggaggctctgtgggctgtcatagttaattgaccataattagcaatatacttttaaagtgggaaagctgaatgacacttttaagacaatgaacattatcaaaacaaaatgtataatttcttaatttgaataataaattaagcgtttaaatgctatttgtagtcttgatatacagaaataaaataattagggttggtcttttttattttaggttgttttatgttgaatgttctatatcttattagttaatttgtatattttattagtattttggaaatagcatatctgagactgaagagaaattgacaattcacttatttgtggtttttttctcagctattctgagcttatttatttatttgtatgttctaatggctaaacatttacattaaatgttttttttcccaa

SEQ ID NO: 885 - DNA, 2422 bp, Homo sapiens
tgcagggccgcgcacgcactgacggctgaccgccatcttccctcccgaggcggcagttccaggtgcaagcgccgggtttgctgcccgctgggcgcccctgcagcggcccgagctgtggccggcgtggatgaggggcaggcgaggcagggccgcccctccagtattgccgcccctcccgccccagggcagggctgggagggtacagcccgggggcgggctcgggtcgcctcccggccgccgcgtcctcgctgccccgggccgggcgggcgggcgccgagagcctcccagcccgccccgtgccccgcccgcccggctgcttccgcggcggcgctgcccgcacatgggctaggctgccaggatgttcagcttcgaaggcgacttcaagacgcggcccaaggtgtcccttggcggcgcgagcaggaaggaggaaaaggcttctcttttacatcgtactcaggaagaaagaagaaagagagaggaagaaaggcgaaggttgaaaaatgcaataattatccagtcatttattcgaggctatagagacagaaaacagcaatattccatccaaagaagtgcatttgatcgctgtgctaccttgtcacagtccgggggcgcttttcccattgctaatggccccaaccttacccttttggtaaggcagcttctgtttttttacaaacaaaatgaagactcaaaacgtttgatatggctgtatcagaacttaattaaacacagctctctgtttgtcaagcagttggatggatctgagagacttacatgcttatttcagataaaaagattgatgagcctctgttgcaggttgctgcaaaactgtaatgatgacagtttgaatgttgcacttccaatgagaatgcttgaagtattttcgtctgagaatacttacttgcctgttttacaagatgctagctatgtggtgtcagtgattgaacaaattttgcactacatgattcacaatgggtattataggtctctatatttgttgattaacagcaagcttccatcaagtattgaatattctgatttatctcgagttcctatagcaaaaattttgctagagaatgttctaaaaccattgcactttacttacaactcctgtccrgaaggtgcgaggcaacaagtttttacagccttcacagaggagtttctggcagcaccttttacagatcagatttttcatttcatcattccggcgcttgcagatgcgcagaccgttttcccttacgagccctttctgaatgcactgttgttaatagagagtagatgttcaagaaagagtggtggagcaccctggcttttctatttcgttttaactgttggcgaaaattatttgggggccctctctgaggaagggctgctggtgtatttgcgggtgctgcagaccttcctctctcagttaccagtctctcctgccagcgcgagctgtcacgactcagccagtgactctgaggaggagagtgaagaagccgacaagccctcaagcccggaggatggcagactgtcagtatcatacrtaacagaggaatgcctgaagaagctggacacaaagcagcagaccaacaccctgctcaacctggtgtggaggractctgcgagcgaggaggtcttcaccaccatggcytccgtctgccacacgctgatggtgcagcaccgcatgatggtacccaaagtcaggcaagtgcttctctacagtttagcctttaatgccaggtttctgagacatctttggtttctaatatcttccatgtcaacacggatgatcacagggkctatggtaccgttgcttcaggtgatatccaggggttctcctatgtcttttgaagattctagtcgaatcatcccactcttttayctttttagctccttgtttagtcattcactaatttccatacatgataacgaattcttcggtgatcccrtagaagttgtaggtcaaagacaatcatcaatgatgccttttactttagaagagctgataatgttgtctcgatgccttcgagatgcatgcctggggatcatcaagttggcttatccagaaaccaagccagaagttcgagaagaatatattacagcatttcagagtattggagttactactagctctgaaatgcaacaatgcatacagatggaacagaaaagatggattcagttatttaaggttatcaccaatctagtgaaaatgttgaagtccagagacacgaggagaaatttttgtcctccaaaccactggctgtcagaacaagaagatattaaagcagataaggtgttattgaaagatctttttaatatttatcattaaaaaatacattcagcttgtgtctttctggagagaagaattaagcactttaaaattatttattttatgactcatatgactaaatagtaatgataaaccttattactaact

SEQ ID NO: 886 - DNA, 5225 bp, Homo sapiens
tgcagggccgcgcacgcactgacggctgaccgccatcttccctcccgaggcggcagttccaggtgcaagcgccgggtttgctgcccgctgggcgcccctgcagcggcccgagctgtggccggcgtggatgaggggcaggcgaggcagggccgcccctccagtattgccgcccctcccgccccagggcagggctgggagggtacagcccgggggcgggctcgggtcgcctcccggccgccgcgtcctcgctgccccgggccgggcgggcgggcgccgagagcctcccagcccgccccgtgccccgcccgcccggctgcttccgcggcggcgctgcccgcacatgggctaggctgccaggatgttcagcttcgaaggcgacttcaagacgcggcccaaggtgtcccttggcggcgcgagcaggaaggaggaaaaggcttctcttttacatcgtactcaggaagaaagaagaaagagagaggaagaaaggcgaaggttgaaaaatgcaataattatccagtcatttattcgaggctatagagacagaaaacagcaatattccatccaaagaagtgcatttgatcgctgtgctaccttgtcacagtccgggggcgcttttcccattgctaatggccccaaccttacccttttggtaaggcagcttctgtttttttacaaacaaaatgaagactcaaaacgtttgatatggctgtatcagaacttaattaaacacagctctctgtttgtcaagcagttggatggatctgagagacttacatgcttatttcagataaaaagattgatgagcctctgttgcaggttgctgcaaaactgtaatgatgacagtttgaatgttgcacttccaatgagaatgcttgaagtattttcgtctgagaatacttacttgcctgttttacaagatgctagctatgtggtgtcagtgattgaacaaattttgcactacatgattcacaatgggtattataggtctctatatttgttgattaacagcaagcttccatcaagtattgaatattctgatttatctcgagttcctatagcaaaaattttgctagagaatgttctaaaaccattgcactttacttacaactcctgtccrgaaggtgcgaggcaacaagtttttacagccttcacagaggagtttctggcagcaccttttacagatcagatttttcatttcatcattccggcgcttgcagatgcgcagaccgttttcccttacgagccctttctgaatgcactgttgttaatagagagtagatgttcaagaaagagtggtggagcaccctggcttttctatttcgttttaactgttggcgaaaattatttgggggccctctctgaggaagggctgctggtgtatttgcgggtgctgcagaccttcctctctcagttaccagtctctcctgccagcgcgagctgtcacgactcagccagtgactctgaggaggagagtgaagaagccgacaagccctcaagcccggaggatggcagactgtcagtatcatacrtaacagaggaatgcctgaagaagctggacacaaagcagcagaccaacaccctgctcaacctggtgtggaggractctgcgagcgaggaggtcttcaccaccatggcytccgtctgccacacgctgatggtgcagcaccgcatgatggtacccaaagtcaggcttctctacagtttagcctttaatgccaggtttctgagacatctttggtttctaatatcttccatgtcaacacggatgatcacagggkctatggtaccgttgcttcaggtgatatccaggggttctcctatgtcttttgaagattctagtcgaatcatcccactcttttayctttttagctccttgtttagtcattcactaatttccatacatgataacgaattcttcggtgatcccrtagaagttgtaggtcaaagacaatcatcaatgatgccttttactttagaagagctgataatgttgtctcgatgccttcgagatgcatgcctggggatcatcaagttggcttatccagaaaccaagccagaagttcgagaagaatatattacagcatttcagagtattggagttactactagctctgaaatgcaacaatgcatacagatggaacagaaaagatggattcagttatttaaggttatcaccaatctagtgaaaatgttgaagtccagagacacgaggagaaatttttgtcctccaaaccactggctgtcagaacaagaagatattaaagcagataaggtcactcagctctatgtgccagcatccagacatgtgtggaggttccggcggatggggaggataggcccgctgcagtccaccctggacgtgggtttggagtccccrccgctgtctgtgtctgaggaaagacagcttgctgtcctgacagagttgccttttgtggttccatttgaggaacgagtaaagatctttcagaggttgatttatgcagataagcaagaagttcaaggagatggtccatttctggatggaattaatgtcacaataagaagaaattacatttatgaagatgcttatgacaaactttctccagaaaatgagcctgatttgaaaaagcggatccgtgtgcacttgctcaatgcccatggcctggatgaagctggcattgatggtggtggtattttcagagagtttttaaatgaactactgaagtcaggatttaaccccaaccaggggttctttaagactactaatgaagggcttctgtaccccaacccggctgctcagatgcttgtgggagattcttttgccagacattactacttcctaggcagaatgcttggaaaggctctctatgagaacatgctggtggagctgccctttgcaggcttctttctttccaagttgcttggaaccagtgccgacgtggacattcaccacctcgcctccctagaccctgaggtgtataagaatttgctctttctgaagagctacgaagacgatgtggaggagcttgggctgaacttcactgtggtgaacaatgacctgggagaggcgcaggtagttgaactaaaattcggtgggaaagacatccctgtcaccagcgccaaccggattgcgtacatccacttggtggcagactacaggctgaacaggcagatccgccagcactgcctggctttccgccagggccttgccaatgtcgtcagcctcgagtggctccgaatgtttgatcagcaagaaattcaggtattaatttctggtgcacaagttcccataagcctagaggacctaaaatcctttacaaactattcaggaggctattctgcagaccatcctgttattaaggtcttctggagagttgtggaagggttcactgatgaagaaaagcgcaaactgctgaagtttgtaacaagctgctctcgaccccctctcttggggtttaaggagttgtatcccgcattttgtattcacaacggaggctccgaccttgagcggctccccacagccagcacctgcatgaacctgctgaagctccccgagttctatgacgagacacttttgcgaagtaaacttctctatgcgattgaatgtgccgctggctttgagctgagctgaagctgatgctggggtcagacccctacagagaaccagtgcttccttcgtcagcagcgcctccccagacccacgaggataytcacactgcacgcctgaggctctcctaagctccttctttcattctgccattcctccctcccttccttttttaaatgatttttattacggtgtggtcacttatttagatggacattgcttttcaaataacttaaaataacacgttatgtgccatgtggctactttagtaatattgccaagaagagcacagtttttacactagtggcatctcagtgaaattaaccaaagatgaagctttggctttgctggtgagatcagagccctcctgagcaggcagcgccactccagggttcagacagggctgcacaggcggcagagatacagggtctgagggctgagacgccatggggccgctgctgcttatgtggttggattgtttacaagcctcattattaaaactgaaggcattttttttttctgctgcctttcccaaagtggttaggtttggaaaagagatgatgatggtaatattttatttgtgctttttaagccatttccccaaatgggactagcatgcttgttttcagtataccgtggcctgcctcatgatggtttggagatactgtctgtggatgtgaggtggggacttcattcattgtcctatttctatctccactttgtgcctggagagctttcaggggaggtggaggaggagggtctgccaagctactgcaacatctgtcacccmctatacccagttacttgggggaggacagacactgtggtgtcattaaagttgtttgaaccaaagtggcggctgcatctttgtcccgatgctagccgtgccggtctcccatcatccgctcgccctcctttcccctgggctgcgcccacttgtcttcctggatatttgggggtgactcgccatgcttggcaccctctgcttcctggtgctgctctgactcgaagacgggacagtccctggtgcacatccagggaagaggagygtcggtagttcttgcagtaggcactttatcaggacctgacctgttgctgggtgattttagtctctacaaacagaaagcgtttcaaagcgtcagctgtgggagcagagtgaccctttgctgatgctggggggaggggatctaaatcctcatttatctcttctatgtctmgtattttactgtcactggaggctctgtgggctgtcatagttaattgaccataattagcaatatacttttaaagtgggaaagctgaatgacacttttaagacaatgaacattatcaaaacaaaatgtataatttcttaatttgaataataaattaagcgtttaaatgctatttgtagtcttgatatacagaaataaaataattagggttggtcttttttattttaggttgttttatgttgaatgttctatatcttattagttaatttgtatattttattagtattttggaaatagcatatctgagactgaagagaaattgacaattcacttatttgtggtttttttctcagctattctgagcttatttatttatttgtatgttctaatggctaaacatttacattaaatgttttttttcccaa

SEQ ID NO: 887 - DNA, 4950 bp, Homo sapiens
cgctgggcgcccctgcagcggcccgagctgtggccggcctgcttccgcggcggcgctgcccgcacatgggctaggctgccaggatgttcagcttcgaaggcgacttcaagacgcggcccaaggtgtcccttggcggcgcgagcaggaaggaggaaaaggcttctcttttacatcgtactcaggaagaaagaagaaagagagaggaagaaaggcgaaggttgaaaaatgcaataattatccagtcatttattcgaggctatagagacagaaaacagcaatattccatccaaagaagtgcatttgatcgctgtgctaccttgtcacagtccgggggcgcttttcccattgctaatggccccaaccttacccttttggtaaggcagcttctgtttttttacaaacaaaatgaagactcaaaacgtttgatatggctgtatcagaacttaattaaacacagctctctgtttgtcaagcagttggatggatctgagagacttacatgcttatttcagataaaaagattgatgagcctctgttgcaggttgctgcaaaactgtaatgatgacagtttgaatgttgcacttccaatgagaatgcttgaagtattttcgtctgagaatacttacttgcctgttttacaagatgctagctatgtggtgtcagtgattgaacaaattttgcactacatgattcacaatgggtattataggtctctatatttgttgattaacagcaagcttccatcaagtattgaatattctgatttatctcgagttcctatagcaaaaattttgctagagaatgttctaaaaccattgcactttacttacaactcctgtccrgaaggtgcgaggcaacaagtttttacagccttcacagaggagtttctggcagcaccttttacagatcagatttttcatttcatcattccggcgcttgcagatgcgcagaccgttttcccttacgagccctttctgaatgcactgttgttaatagagagtagatgttcaagaaagagtggtggagcaccctggcttttctatttcgttttaactgttggcgaaaattatttgggggccctctctgaggaagggctgctggtgtatttgcgggtgctgcagaccttcctctctcagttaccagtctctcctgccagcgcgagctgtcacgactcagccagtgactctgaggaggagagtgaagaagccgacaagccctcaagcccggaggatggcagactgtcagtatcatacrtaacagaggaatgcctgaagaagctggacacaaagcagcagaccaacaccctgctcaacctggtgtggaggractctgcgagcgaggaggtcttcaccaccatggcytccgtctgccacacgctgatggtgcagcaccgcatgatggtacccaaagtcaggcttctctacagtttagcctttaatgccaggtttctgagacatctttggtttctaatatcttccatgtcaacacggatgatcacagggkctatggtaccgttgcttcaggtgatatccaggggttctcctatgtcttttgaagattctagtcgaatcatcccactcttttayctttttagctccttgtttagtcattcactaatttccatacatgataacgaattcttcggtgatcccrtagaagttgtaggtcaaagacaatcatcaatgatgccttttactttagaagagctgataatgttgtctcgatgccttcgagatgcatgcctggggatcatcaagttggcttatccagaaaccaagccagaagttcgagaagaatatattacagcatttcagagtattggagttactactagctctgaaatgcaacaatgcatacagatggaacagaaaagatggattcagttatttaaggttatcaccaatctagtgaaaatgttgaagtccagagacacgaggagaaatttttgtcctccaaaccactggctgtcagaacaagaagatattaaagcagataaggtcactcagctctatgtgccagcatccagacatgtgtggaggttccggcggatggggaggataggcccgctgcagtccaccctggacgtgggtttggagtccccrccgctgtctgtgtctgaggaaagacagcttgctgtcctgacagagttgccttttgtggttccatttgaggaacgagtaaagatctttcagaggttgatttatgcagataagcaagaagttcaaggagatggtccatttctggatggaattaatgtcacaataagaagaaattacatttatgaagatgcttatgacaaactttctccagaaaatgagcctgatttgaaaaagcggatccgtgtgcacttgctcaatgcccatggcctggatgaagctggcattgatggtggtggtattttcagagagtttttaaatgaactactgaagtcaggatttaaccccaaccaggggttctttaagactactaatgaagggcttctgtaccccaacccggctgctcagatgcttgtgggagattcttttgccagacattactacttcctaggcagaatgcttggaaaggctctctatgagaacatgctggtggagctgccctttgcaggcttctttctttccaagttgcttggaaccagtgccgacgtggacattcaccacctcgcctccctagaccctgaggtgtataagaatttgctctttctgaagagctacgaagacgatgtggaggagcttgggctgaacttcactgtggtgaacaatgacctgggagaggcgcaggtagttgaactaaaattcggtgggaaagacatccctgtcaccagcgccaaccggattgcgtacatccacttggtggcagactacaggctgaacaggcagatccgccagcactgcctggctttccgccagggccttgccaatgtcgtcagcctcgagtggctccgaatgtttgatcagcaagaaattcaggtattaatttctggtgcacaagttcccataagcctagaggacctaaaatcctttacaaactattcaggaggctattctgcagaccatcctgttattaaggtcttctggagagttgtggaagggttcactgatgaagaaaagcgcaaactgctgaagtttgtaacaagctgctctcgaccccctctcttggggtttaaggagttgtatcccgcattttgtattcacaacggaggctccgaccttgagcggctccccacagccagcacctgcatgaacctgctgaagctccccgagttctatgacgagacacttttgcgaagtaaacttctctatgcgattgaatgtgccgctggctttgagctgagctgaagctgatgctggggtcagacccctacagagaaccagtgcttccttcgtcagcagcgcctccccagacccacgaggataytcacactgcacgcctgaggctctcctaagctccttctttcattctgccattcctccctcccttccttttttaaatgatttttattacggtgtggtcacttatttagatggacattgcttttcaaataacttaaaataacacgttatgtgccatgtggctactttagtaatattgccaagaagagcacagtttttacactagtggcatctcagtgaaattaaccaaagatgaagctttggctttgctggtgagatcagagccctcctgagcaggcagcgccactccagggttcagacagggctgcacaggcggcagagatacagggtctgagggctgagacgccatggggccgctgctgcttatgtggttggattgtttacaagcctcattattaaaactgaaggcattttttttttctgctgcctttcccaaagtggttaggtttggaaaagagatgatgatggtaatattttatttgtgctttttaagccatttccccaaatgggactagcatgcttgttttcagtataccgtggcctgcctcatgatggtttggagatactgtctgtggatgtgaggtggggacttcattcattgtcctatttctatctccactttgtgcctggagagctttcaggggaggtggaggaggagggtctgccaagctactgcaacatctgtcacccmctatacccagttacttgggggaggacagacactgtggtgtcattaaagttgtttgaaccaaagtggcggctgcatctttgtcccgatgctagccgtgccggtctcccatcatccgctcgccctcctttcccctgggctgcgcccacttgtcttcctggatatttgggggtgactcgccatgcttggcaccctctgcttcctggtgctgctctgactcgaagacgggacagtccctggtgcacatccagggaagaggagygtcggtagttcttgcagtaggcactttatcaggacctgacctgttgctgggtgattttagtctctacaaacagaaagcgtttcaaagcgtcagctgtgggagcagagtgaccctttgctgatgctggggggaggggatctaaatcctcatttatctcttctatgtctmgtattttactgtcactggaggctctgtgggctgtcatagttaattgaccataattagcaatatacttttaaagtgggaaagctgaatgacacttttaagacaatgaacattatcaaaacaaaatgtataatttcttaatttgaataataaattaagcgtttaaatgctatttgtagtcttgatatacagaaataaaataattagggttggtcttttttattttaggttgttttatgttgaatgttctatatcttattagttaatttgtatattttattagtattttggaaatagcatatctgagactgaagagaaattgacaattcacttatttgtggtttttttctcagctattctgagcttatttatttatttgtatgttctaatggctaaacatttacattaaatgttttttttcccaa

SEQ ID NO: 888 - DNA, 5231 bp, Homo sapiens
tgcagggccgcgcacgcactgacggctgaccgccatcttccctcccgaggcggcagttccaggtgcaagcgccgggtttgctgcccgctgggcgcccctgcagcggcccgagctgtggccggcgtggatgaggggcaggcgaggcagggccgcccctccagtattgccgcccctcccgccccagggcagggctgggagggtacagcccgggggcgggctcgggtcgcctcccggccgccgcgtcctcgctgccccgggccgggcgggcgggcgccgagagcctcccagcccgccccgtgccccgcccgcccggctgcttccgcggcggcgctgcccgcacatgggctaggctgccaggatgttcagcttcgaaggcgacttcaagacgcggcccaaggtgtcccttggcggcgcgagcaggaaggaggaaaaggcttctcttttacatcgtactcaggaagaaagaagaaagagagaggaagaaaggcgaaggttgaaaaatgcaataattatccagtcatttattcgaggctatagagacagaaaacagcaatattccatccaaagaagtgcatttgatcgctgtgctaccttgtcacagtccgggggcgcttttcccattgctaatggccccaaccttacccttttggtaaggcagcttctgtttttttacaaacaaaatgaagactcaaaacgtttgatatggctgtatcagaacttaattaaacacagctctctgtttgtcaagcagttggatggatctgagagacttacatgcttatttcagataaaaagattgatgagcctctgttgcaggttgctgcaaaactgtaatgatgacagtttgaatgttgcacttccaatgagaatgcttgaagtattttcgtctgagaatacttacttgcctgttttacaagatgctagctatgtggtgtcagtgattgaacaaattttgcactacatgattcacaatgggtattataggtctctatatttgttgattaacagcaagcttccatcaagtattgaatattctgatttatctcgagttcctatagcaaaaattttgctagagaatgttctaaaaccattgcactttacttacaactcctgtccrgaaggtgcgaggcaacaagtttttacagccttcacagaggagtttctggcagcaccttttacagatcagatttttcatttcatcattccggcgcttgcagatgcgcagaccgttttcccttacgagccctttctgaatgcactgttgttaatagagagtagatgttcaagaaagagtggtggagcaccctggcttttctatttcgttttaactgttggcgaaaattatttgggggccctctctgaggaagggctgctggtgtatttgcgggtgctgcagaccttcctctctcagttaccagtctctcctgccagcgcgagctgtcacgactcagccagtgactctgaggaggagagtgaagaagccgacaagccctcaagcccggaggatggcagactgtcagtatcatacrtaacagaggaatgcctgaagaagctggacacaaagcagcagaccaacaccctgctcaacctggtgtggaggractctgcgagcgaggaggtcttcaccaccatggcytccgtctgccacacgctgatggtgcagcaccgcatgatggtacccaaagtcaggcaagtgcttctctacagtttagcctttaatgccaggtttctgagacatctttggtttctaatatcttccatgtcaacacggatgatcacagggkctatggtaccgttgcttcaggtgatatccaggggttctcctatgtcttttgaagattctagtcgaatcatcccactcttttayctttttagctccttgtttagtcattcactaatttccatacatgataacgaattcttcggtgatcccrtagaagttgtaggtcaaagacaatcatcaatgatgccttttactttagaagagctgataatgttgtctcgatgccttcgagatgcatgcctggggatcatcaagttggcttatccagaaaccaagccagaagttcgagaagaatatattacagcatttcagagtattggagttactactagctctgaaatgcaacaatgcatacagatggaacagaaaagatggattcagttatttaaggttatcaccaatctagtgaaaatgttgaagtccagagacacgaggagaaatttttgtcctccaaaccactggctgtcagaacaagaagatattaaagcagataaggtcactcagctctatgtgccagcatccagacatgtgtggaggttccggcggatggggaggataggcccgctgcagtccaccctggacgtgggtttggagtccccrccgctgtctgtgtctgaggaaagacagcttgctgtcctgacagagttgccttttgtggttccatttgaggaacgagtaaagatctttcagaggttgatttatgcagataagcaagaagttcaaggagatggtccatttctggatggaattaatgtcacaataagaagaaattacatttatgaagatgcttatgacaaactttctccagaaaatgagcctgatttgaaaaagcggatccgtgtgcacttgctcaatgcccatggcctggatgaagctggcattgatggtggtggtattttcagagagtttttaaatgaactactgaagtcaggatttaaccccaaccaggggttctttaagactactaatgaagggcttctgtaccccaacccggctgctcagatgcttgtgggagattcttttgccagacattactacttcctaggcagaatgcttggaaaggctctctatgagaacatgctggtggagctgccctttgcaggcttctttctttccaagttgcttggaaccagtgccgacgtggacattcaccacctcgcctccctagaccctgaggtgtataagaatttgctctttctgaagagctacgaagacgatgtggaggagcttgggctgaacttcactgtggtgaacaatgacctgggagaggcgcaggtagttgaactaaaattcggtgggaaagacatccctgtcaccagcgccaaccggattgcgtacatccacttggtggcagactacaggctgaacaggcagatccgccagcactgcctggctttccgccagggccttgccaatgtcgtcagcctcgagtggctccgaatgtttgatcagcaagaaattcaggtattaatttctggtgcacaagttcccataagcctagaggacctaaaatcctttacaaactattcaggaggctattctgcagaccatcctgttattaaggtcttctggagagttgtggaagggttcactgatgaagaaaagcgcaaactgctgaagtttgtaacaagctgctctcgaccccctctcttggggtttaaggagttgtatcccgcattttgtattcacaacggaggctccgaccttgagcggctccccacagccagcacctgcatgaacctgctgaagctccccgagttctatgacgagacacttttgcgaagtaaacttctctatgcgattgaatgtgccgctggctttgagctgagctgaagctgatgctggggtcagacccctacagagaaccagtgcttccttcgtcagcagcgcctccccagacccacgaggataytcacactgcacgcctgaggctctcctaagctccttctttcattctgccattcctccctcccttccttttttaaatgatttttattacggtgtggtcacttatttagatggacattgcttttcaaataacttaaaataacacgttatgtgccatgtggctactttagtaatattgccaagaagagcacagtttttacactagtggcatctcagtgaaattaaccaaagatgaagctttggctttgctggtgagatcagagccctcctgagcaggcagcgccactccagggttcagacagggctgcacaggcggcagagatacagggtctgagggctgagacgccatggggccgctgctgcttatgtggttggattgtttacaagcctcattattaaaactgaaggcattttttttttctgctgcctttcccaaagtggttaggtttggaaaagagatgatgatggtaatattttatttgtgctttttaagccatttccccaaatgggactagcatgcttgttttcagtataccgtggcctgcctcatgatggtttggagatactgtctgtggatgtgaggtggggacttcattcattgtcctatttctatctccactttgtgcctggagagctttcaggggaggtggaggaggagggtctgccaagctactgcaacatctgtcacccmctatacccagttacttgggggaggacagacactgtggtgtcattaaagttgtttgaaccaaagtggcggctgcatctttgtcccgatgctagccgtgccggtctcccatcatccgctcgccctcctttcccctgggctgcgcccacttgtcttcctggatatttgggggtgactcgccatgcttggcaccctctgcttcctggtgctgctctgactcgaagacgggacagtccctggtgcacatccagggaagaggagygtcggtagttcttgcagtaggcactttatcaggacctgacctgttgctgggtgattttagtctctacaaacagaaagcgtttcaaagcgtcagctgtgggagcagagtgaccctttgctgatgctggggggaggggatctaaatcctcatttatctcttctatgtctmgtattttactgtcactggaggctctgtgggctgtcatagttaattgaccataattagcaatatacttttaaagtgggaaagctgaatgacacttttaagacaatgaacattatcaaaacaaaatgtataatttcttaatttgaataataaattaagcgtttaaatgctatttgtagtcttgatatacagaaataaaataattagggttggtcttttttattttaggttgttttatgttgaatgttctatatcttattagttaatttgtatattttattagtattttggaaatagcatatctgagactgaagagaaattgacaattcacttatttgtggtttttttctcagctattctgagcttatttatttatttgtatgttctaatggctaaacatttacattaaatgttttttttcccaa

SEQ ID NO: 889 - DNA, 2411 bp, Homo sapiens
caaggtggagaagcctcttccaactgcaggcagagcacaggtggccctgctactggctgcagctccagccctgcctccttctctagcatataaacaatccaacagcctcactgaatcactgctgtgcagggcaggaaagctccatgcacatagcccagcaaagagcaacacagagctgaaaggaagactcagagsagagagataagtaaggaaagtagtgatggctctcatcccagacttggccatggaaacctggcttctcctggctgtcagcctggtgctcctctatctatatggaacccattcacatggactttttaagaagcttggaattccagggcccacacctctgccttttttgggaaatattttgtcctaccataagggcttttgtatgtttgacatggaatgtcataaaaagtatggaaaagtgtggggcttttatgatggtcaacagcctgtgctggctatcacagatcctgacatgatcaaaacagtgctagtgaaagaatgttattctgtcttcacaaaccggaggccttttggtccagtgggatttatgaaaagtgccatctctatagctgaggatgaagaatggaagagattacgatcattgctgtctccaaccttcaccagtggaaaactcaaggagatggtccctatcattgcccagtatggagatgtgttggtgagaaatctgaggcrggaagcagagacaggcaagcctgtcaccttgaaagacgtctttggggcctacagcatggatgtgatcactagcacatcatytggagtgaacatcgactctctcaacaatccacaagacccctttgtggaaaacaccaagaagcttttaagatttgattttttggatccattctttctctcaataatctttccattcctcatcccaattcttgaagtattaaatatctgtgtgtttccaagagaagttacaaattttttaagaaaakctgtaaaaaggatgaaagaaagtcgcctcgaagatacacaaaagcaccgagtggatttccttcagctgatgattgactctcagaattcaaaagaaactgagtcccacaaagctctgtccgatcyggagctcgtggcccaatcaattatctttatttttgctggctatgaaaccacgagcagtgttctctccttcattatgtatgaactggccactcaccctgatgtccagcagaaactgcaggaggaaattgatgcagttttacccaataaggcaccacccacctatgatactgtgctacagatggagtatcttgacatggtggtgaatgaaacgctcagattattcccaattgctatgagacttgagagggtctgcaaaaaagatgttgagatcaatgggatgttcattcccaaaggggtggtggtgatgattccaagctatgctcttcaccgtgacccaaagtactggacagagcctgagaagttcctccctgaaagattcagcaagaagaacaaggacaacatagatccttacatatacacaccctttggaagtggacccagaaactgcattggcaygaggtttgctctcatgaacatgaaacttgctctaatcagagtccttcagaacttctccttcaaaycttgtaaagaaacacagatccccctgaaattaagcttaggaggacttcttcaaccagaaaaacccgttgttctaaaggttgagtcaagggatggcaccgtaagtggagcctgaattttcctaaggacttctgctttgctcttcaagaaatctgtgcctgagaacaccagagacctcaaattactttgtgaatagaactctgaaatgaagatgggcttcatccaatggactgcataaataaccggggattctgtacatgcattgagctctctcattgtctgtgtagagtgttatacttgggaatataaaggaggtgaccaaatcagtgtgaggaggtagatttggctcctytgcttctcacgggactatttccaccacccccagttagcaccattaactcctcctgagctctgataagagaatcaacatttctcaataatttcctccacaaattattaatgaaaataagaattattttgatggctctaacaatgacatttatatcacatgttttctctggagtattctataagttttatgttaaatcaataaagaccactttacaaaagtattatcagatgctttcctgcacattaaggagaaatctatagaactgaatgagaaccaacaagtaaatatttttggtcattgtaatcactgttggcgtggggcctttgtcagaactagaatttgattattaacataggtgaaagttaatccactgtgactttgcccattgtttagaaagaatattcatagtttaattatgccttttttgatcaggcacagtggctca

SEQ ID NO: 890 - DNA, 2884 bp, Homo sapiens
caaggtggagaagcctcttccaactgcaggcagagcacaggtggccctgctactggctgcagctccagccctgcctccttctctagcatataaacaatccaacagcctcactgaatcactgctgtgcagggcaggaaagctccatgcacatagcccagcaaagagcaacacagagctgaaaggaagactcagagsagagagataagtaaggaaagtagtgatggctctcatcccagacttggccatggaaacctggcttctcctggctgtcagcctggtgctcctctatctatatggaacccattcacatggactttttaagaagcttggaattccagggcccacacctctgccttttttgggaaatattttgtcctaccataagggcttttgtatgtttgacatggaatgtcataaaaagtatggaaaagtgtggggcttttatgatggtcaacagcctgtgctggctatcacagatcctgacatgatcaaaacagtgctagtgaaagaatgttattctgtcttcacaaaccggaggccttttggtccagtgggatttatgaaaagtgccatctctatagctgaggatgaagaatggaagagattacgatcattgctgtctccaaccttcaccagtggaaaactcaaggagatggtccctatcattgcccagtatggagatgtgttggtgagaaatctgaggcrggaagcagagacaggcaagcctgtcaccttgaaagacgtctttggggcctacagcatggatgtgatcactagcacatcatytggagtgaacatcgactctctcaacaatccacaagacccctttgtggaaaacaccaagaagcttttaagatttgattttttggatccattctttctctcaataacagtctttccattcctcatcccaattcttgaagtattaaatatctgtgtgtttccaagagaagttacaaattttttaagaaaakctgtaaaaaggatgaaagaaagtcgcctcgaagatacacaaaagcaccgagtggatttccttcagctgatgattgactctcagaattcaaaagaaactgagtcccacaaagctctgtccgatcyggagctcgtggcccaatcaattatctttatttttgctggctatgaaaccacgagcagtgttctctccttcattatgtatgaactggccactcaccctgatgtccagcagaaactgcaggaggaaattgatgcagttttacccaataaggcaccacccacctatgatactgtgctacagatggagtatcttgacatggtggtgaatgaaacgctcagattattcccaattgctatgagacttgagagggtctgcaaaaaagatgttgagatcaatgggatgttcattcccaaaggggtggtggtgatgattccaagctatgctcttcaccgtgacccaaagtactggacagagcctgagaagttcctccctgaaagattcagcaagaagaacaaggacaacatagatccttacatatacacaccctttggaagtggacccagaaactgcattggcaygaggtttgctctcatgaacatgaaacttgctctaatcagagtccttcagaacttctccttcaaaycttgtaaagaaacacagatccccctgaaattaagcttaggaggacttcttcaaccagaaaaacccgttgttctaaaggttgagtcaagggatggcaccgtaagtggagcctgaattttcctaaggacttctgctttgctcttcaagaaatctgtgcctgagaacaccagagacctcaaattactttgtgaatagaactctgaaatgaagatgggcttcatccaatggactgcataaataaccggggattctgtacatgcattgagctctctcattgtctgtgtagagtgttatacttgggaatataaaggaggtgaccaaatcagtgtgaggaggtagatttggctcctytgcttctcacgggactatttccaccacccccagttagcaccattaactcctcctgagctctgataagagaatcaacatttctcaataatttcctccacaaattattaatgaaaataagaattattttgatggctctaacaatgacatttatatcacatgttttctctggagtattctataagttttatgttaaatcaataaagaccactttacaaaagtattatcagatgctttcctgcacattaaggagaaatctatagaactgaatgagaaccaacaagtaaatatttttggtcattgtaatcactgttggcgtggggcctttgtcagaactagaatttgattattaacataggtgaaagttaatccactgtgactttgcccattgtttagaaagaatattcatagtttaattatgccttttttgatcaggcacagtggctcacgcctgtaatcctagcagtttgggaggctgagccgggtggatcgcctgaggtcaggagttcaagacaagcctggcctacatggttgaaaccccatctctactaaaaatacacaaattagctaggcatggtggactcgcctgtaatctcactacacaggaggctgaggcaggagaatcacttgaacctgggaggcggatgttgaagtgagctgagattgcaccactgcactccagtctgggtgagagtgagactcagtcttaaaaaaatatgcctttttgaagcacgtacattttgtaacaaagaactgaagctcttattatattattagttttgatttaatgttttcagcccatctcctttcatatttctgggagacagaaaacatgtttccctacacctcttgcattccatcctcaacacccaactgtctcgatgcaatgaacacttaataaaaaacagtcgattggtc

SEQ ID NO: 891 - DNA, 2741 bp, Homo sapiens
gagatctggaaaccggaagtgaattattttgcaggagtctacacccaggmggtggctatacttattaaagttggcgggagctgagcgatcagtcggtcctgggctggytgtggtgtagggcgttgcaggcagcgctcaccycctcaggccggcagaatgcgggtggctgtggctggctgctgccacggcgagctggataagatctatgagacgctggcgctggcagagcggcgcggcccggggcctgtcgacctcttgctgtgctgcggcgacttccaggcggtgcgcaacgaggcggatctacgctgcatggccgtgccgcccaagtatcgtcacatgcaaaccttctacaggtattactctggagagaaaaaggctccagttctcacgctyttcattgggggaaaccatgaagcctcaaatcatttgcaagagttaccctatggtggctgggtggcaccaaacatttattatttaggtttggctggtgtggtaaaataccgaggtgtaaggatcggtggaatctctggtatctttaaatctcatgactatcgaaaaggtcattttgagtgccccccttataattcatctacaatcaggagtatatatcatgtgagaaatattgaagtctataaattaaaacagctgaagcagcctatagatatattcttgtctcatgattggccaagaagtatatatcattatggaaataagaagcaacttcttaagactaaatcttttttccgacaagaagtggaaaataacacattaggaagtccagctgcctcagagcttttagagcatctcaaacctacttattggttttctgcccaccttcatgtgaagtttgccgccttgatgcagcatcaggcaaaggataaaggacagacagccagagcaaccaaatttttagccttggacaaatgcttaccacatagagattttcttcagatattagagatagaacatgaccccagtgctcctgattacttggaatatgatattgaatggctcactattctcagggctacggatgatcttattaatgtgactgggcgcctgtggaatatgccagaaaataatggcctgcatgcaaggtgggattatagtgcaacagaagaaggtatgaaagaagtattggaaaaattgaatcatgatctcaaggttccatgtaactttagtgtaacagctgcttgttatgatcctagcaagccacagacacaaatgcagctgattcataggatcaatcctcagacwactgaattttgtgcccaacttggcatcatagacatcaatgttaggcttcagaagtccaaggaagaacatcatgtgtgtggtgaatatgaagaacaggatgatgtggagagtaatgactctggagaagaccagagtgaatataatacagacacatctgctctgtcttctattaatccagatsaaataatgttagatgaagaagaagatgaagatagtattgtaagtgcacatagtgrcatgaatacaccatcggtagaaccttctgatcaagcttctgagttttctgcaagtttctctgatgtcaggatcttgccaggctctatgattgtatcttctgatgatacggtggattccacaattgatagagaggggaaacctggtgggactgtggartcagggaatggagaggacttaaccaaggtgccattgaagaggctgagtgatgaacatgaacctgaacaaagaaagaaaattaagaggaggaatcaagccatttacgctgcagtggatgatgatgatgaygatgcagcttaagatgatttacttgttttgtttttgtgtttgttttgtttttttgagatggagtttcactcttgtcacctagactggagtgcaatggcgtgatctcggctcaccgcaacctccgcctcccaggttcaagcaattctcctgcctcagcctcccaagtaggtgggactacaggtgcccgccaccacacccggctaatttttgcatttttagtaatgacagggtttcaccrtgttggccaggctggtctccaactcctgacctcaggcgatccacctgtcttggccttctaaagtgctgggattacaggcgtgagccactgtgcctggccgacaatttacttgtcttagtattatatgtagatatgtgattttttgagactgtatttttagagctgaatttttgactaaagacttaactttataataatgaagatacattagagaattttagttagatattgactttatctttaggcttttgtatgtttcagatgcaaacatattaaagtttcatatatttacttgactgggtatctttttttttgaagacatacattattcacttccatttttacaataaacacttacttaacatctactctgtgccaagcactctgctataatatgggaccataaagatgagtaagacaaggatttttgcctccaaggacttgttatcactgtaaacattttgatgtatacaatatggctatattatattttgttttataaaatcaagtcwttgtatatattatgatgtatgctttcttttcatttattataaatatttttcctgatcagcttttaatatctgtcaaataaaaattgaaattgaagatggtatataagatttcaggaaataaactactctgaatactaaacattggtaaacgtacaatcttaatttgctgagattagtataaccctgctgacttttgcatattgagttttttt

SEQ ID NO: 892 - DNA, 3643 bp, Homo sapiens
tgcgcctgtgcatgcgcagggaggggagaccttggcggagcggcggaggcgcccagcggaggtgaaagtattggcggaaaggaaaatacagcggaaaaatgcagagctggagtcgtgtgtactgctccttggccaagagaggccatttcaatcgaatatctcatggcctacagggactttctgcagtgcctctgagaacttacgcagatcagccgattgatgctgatgtaacagttataggttctggtcctggaggatatgttgctgctattaaagctgcccagttaggcttcaagacagtctgcattgagraaaatgaaacacttggtggaacatgcttgaatgttggttgtattccttctaaggctttattgaacaactctcattattaccatatggcccatggaaaagattttgcatctagaggaattgaaatgtccgaagttygcttgaatttagacaagatgatggagcagaagagtactgcagtaaaagctttaacaggtggaattgcccacttattcaaacagaataaggttgttcatgtcaatggatatggaaagataactggcaaaaatcaagtcactgctacgaaagctgatggcggcactcaggttattgatacaaagaacattcttatwgccacgggttcagaagttactccttttcctggaatcacgatagatgaagatacaatagtgtcatctacaggtgctttatctttaaaaaaagttccagaaaagatggttgttattggtgcaggagtaataggtgtagaattgggttcagtttggcaaagacttggtgcagatgtgacagcagttgaatttttaggtcatgtaggtggagttggaattgatatggagatatctaaraactttcaacgcatccttcaaaaacaggggtttaaatttaaattgaatacaaaggttactggtgctaccaagaagtcagatggaaaaattgatgtttctattgaagctgcttctggtggtaaagctgaagttatcacttgtgatgtactcttggtttgcattggccgacgaccctttactaagaatttgggactagaagagctgggaattgaastagatccyagaggtagaattccagtcaataccagatttcaaactaaaattccaaatatctatgccattggtgatgtagttgctggtccaatgctggctcacaaagcagaggatgaaggcattatctgtgttraaggaatggctggtggtgctgtgcacattgactacaattgtgtgccatcagtgatttacacacaccctgaagttgcttgggttggcaaatcagaagagcagttgaaagaagagggtattgagtacaaagttgggaaattcccatttgctgctaacagcagagctaagacaaatgctgacacagatggcatggtgaagatccttgggcagaaatcgacagacagagtaytgggagcacatattcttggaccaggtgctggagaaatggtaaatgaagctgctcttgctttggaatatggmgcatcctgtgaagatatagctagagtctgtcatgcacatcygaccttatcagaagcttttrgagaagcaamtcttgctgcgtcatttggcaaatcaatcaacttttgaattagaagattatatatdtttttttctkaaatttcctgggagcttttgtagaagtcacattcctgaacaggatattctcacagctccaagaatttctaggactgaattatgaaacttttggaaggtatttaataggtttggacaaaatggaatactcttatatctatattttacataaatttagtattttgtttcagtgcactaatrtgtaagacaaaaarrtacttattgtagcatcmtggaatatctccgtcaactcatattttcatgctgttcatgaaagattcaatgcccctgaatttaaatagcttttttctctgatacagaaaagttgaattttacatggctggagctagaatttgatatgtgaacagttgtgtttgaagcacagtgatcaagttatttttaatttggttttcacattggaaacaagtcagtcattcagatatgattcaaatgtctataaaccgaactgatgyaagtaaayggtctctcacttgttttatttaaccyctaaattctttcattttagkggtagcatttgtgttgaagaggttttaaagcttccattgttgtctgcaactctgaagggtaattatatagttacccaaattaagagagtctatttacggaactcaaatacgtgggcattcaaatgtattacagtggggaatgaagatactgaaataaacgtcttaaatattcatttactggttatcatgagtacgtgttgagatggtcatagttttttttatgactacttctagtgtatattctaatttcttttctaggcctgaatktatctttattttcatgttataggacaatattaaggcattttaaaggtcatcatcctttcatctattttagatacacctactaaatgtttaatatatacttttggagaagtacaacataagggagtctttaatctgtgttttccttgkctgggttaatgactgtttatttaaagagtgytgtaaaattggatgtgtggtgtttaaaatggccatgtcctgaggaaacttaagtaacaaagtactaaatgctaagtaggcttttgcatattgtaactaaatttaagaataattcagattaagtagttctgaaatttggtatagatagcatagattgtctcatgctcatgagtgacataatgaccctggattctgttacatactttccacactctgtcttgtttgtaggtggcagcagctgaaatctcttctcagttgttttagctttagctatgctgctggaagtctttcccatgcaagtgtgtagttcaggggtcaaccagagtttgggcagaaggaagtctgccccttctgtgcctcctgttttttgggggtttcccctttatgttccagctgttgtggttgccccatattctgccytctgatccttaaccaataaaacttggcttttgtttccccctcaagtgagaacccgttaaaaatgagacattgagccagtgctgttcactttttaagtgccaacttccctctactttccacttgtttatagttgtttccagtgcctttagttttttctaaaatatatttgttcagagtttgcagttgctatcagcaggagggttggtctgatatctgtgtgctactttgccattattrgaagtgaactctgcatctttttaaaaatttgaaatcccggtatcatgtgaagtgctgtttatgtaaatctcaacatatcccttactcagggaaaaaaaagtttttagttagggaatagtgaaatataatttaatatggaattctagctgtagagttaaatccatctttaagtgtttacattcagtatgagaatgcaaatttatctgtatggggaataaagtcctaggaataaaacaagttttaagtgttcacttactgttatctactaagctgtcaatatttttgtggcttgtgaagagtgaaattaattgtccacttcattgaactgattaaaattagtaatttcaactggctgggagcggtggctcactcctgtaatcc

SEQ ID NO: 893 - DNA, 3095 bp, Homo sapiens
tgcgcctgtgcatgcgcagggaggggagaccttggcggagcggcggaggcgcccagcggaggtgaaagtattggcggaaaggaaaatacagcggaaaaatgcagagctggagtcgtgtgtactgctccttggccaagagaggccatttcaatcgaatatctcatggcctacagggactttctgcagtgcctctgagaacttacgcagatcagccgattgatgctgatgtaacagttataggttctggtcctggaggatatgttgctgctattaaagctgcccagttaggcttcaagacagtctgcattgagraaaatgaaacacttggtggaacatgcttgaatgttggttgtattccttctaaggctttattgaacaactctcattattaccatatggcccatggaaaagattttgcatctagaggaattgaaatgtccgaagttygcttgaatttagacaagatgatggagcagaagagtactgcagtaaaagctttaacaggtggaattgcccacttattcaaacagaataaggttgttcatgtcaatggatatggaaagataactggcaaaaatcaagtcactgctacgaaagctgatggcggcactcaggttattgatacaaagaacattcttatwgccacgggttcagaagttactccttttcctggaatcacgatagatgaagatacaatagtgtcatctacaggtgctttatctttaaaaaaagttccagaaaagatggttgttattggtgcaggagtaataggtgtagaattgggttcagtttggcaaagacttggtgcagatgtgacagcagttgaatttttaggtcatgtaggtggagttggaattgatatggagatatctaaraactttcaacgcatccttcaaaaacaggggtttaaatttaaattgaatacaaaggttactggtgctaccaagaagtcagatggaaaaattgatgtttctattgaagctgcttctggtggtaaagctgaagttatcacttgtgatgtactcttggtttgcattggccgacgaccctttactaagaatttgggactagaagagctgggaattgaastagatccyagaggtagaattccagtcaataccagatttcaaactaaaattccaaatatctatgccattggtgatgtagttgctggtccaatgctggctcacaaagcagaggatgaaggcattatctgtgttraaggaatggctggtggtgctgtgcacattgactacaattgtgtgccatcagtgatttacacacaccctgaagttgcttgggttggcaaatcagaagagcagttgaaagaagagggtattgagtacaaagttgggaaattcccatttgctgctaacagcagagctaagacaaatgctgacacagatggcatggtgaagatccttgggcagaaatcgacagacagagtaytgggagcacatattcttggaccaggtgctggagaaatggtaaatgaagctgctcttgctttggaatatggmgcatcctgtgaagatatagctagagtctgtcatgcacatcygaccttatcagaagcttttrgagaagcaamtcttgctgcgtcatttggcaaatcaatcaacttttgaattagaagattatatatdtttttttctkaaatttcctgggagcttttgtagaagtcacattcctgaacaggatattctcacagctccaagaatttctaggactgaattatgaaacttttggaaggtatttaataggtttggacaaaatggaatactcttatatctatattttacataaatttagtattttgtttcagtgcactaatrtgtaagacaaaaarrtacttattgtagcatcmtggaatatctccgtcaactcatattttcatgctgttcatgaaagattcaatgcccctgaatttaaatagcttttttctctgatacagaaaagttgaattttacatggctggagctagaatttgatatgtgaacagttgtgtttgaagcacagtgatcaagttatttttaatttggttttcacattggaaacaagtcagtcattcagatatgattcaaatgtctataaaccgaactgatgyaagtaaayggtctctcacttgttttatttaaccyctaaattctttcattttagkggtagcatttgtgttgaagaggttttaaagcttccattgttgtctgcaactctgaagggtaattatatagttacccaaattaagagagtctatttacggaactcaaatacgtgggcattcaaatgtattacagtggggaatgaagatactgaaataaacgtcttaaatattcatttactggttatcatgagtacgtgttgagatggtcatagttttttttatgactacttctagtgtatattctaatttcttttctaggcctgaatktatctttattttcatgttataggacaatattaaggcattttaaaggtcatcatcctttcatctattttagatacacctactaaatgtttaatatatacttttggagaagtacaacataagggagtctttaatctgtgttttccttgkctgggttaatgactgtttatttaaagagtgytgtaaaattggatgtgtggtgtttaaaatggccatgtcctgaggaaacttaagtaacaaagtactaaatgctaagtaggcttttgcatattgtaactaaatttaagaataattcagattaagtagttctgaaatttggtatagatagcatagattgtctcatgctcatgagtgacataatgaccctggattctgttacatacttctaaagaaaattgattgttgtcttaggaggcagttaacttggctgaacaccaactccacactctgtcttgtttgtaggtggcagcagctgaaatctcttctcagttgttttagctttagctatgctgctggaagtctttcccatgcaagtgtgtagttcaggggtcaaccagagtttgggcagaaggaagtctgccccttctgtgcctcctgttttttgggggtttcccctttatgttccagctgttgtggttgccccatattctgccytctgatccttaaccaa

SEQ ID NO: 894 - DNA, 3865 bp, Homo sapiens
gcggccgcgccgggcaccaccctccaagagactggtatcgcagcccccagctccaaggaactcagcgcaggcaggggcttcagggacgcggagagggaggcttatctctgctgaaagggaatagcggcccgcaaacaagcaaaccaggacactgctccgaggtcccgcccaggaaggcaaaacgaagtcccaccgctctcacacccggcaaccaaccaaggcacagcacgccccaccrgcaagccacgcctcgcgcatcacgcacgcacgcacgcacgcacacacgyctgtcgcggcttcccgccttgcgctccgtcatgctctattgcgcatatctcggggcgggggaggaacggagattgacaaggaggcagaggcctgagcgaggcggaaaatcctcaccccggcccgcgggtagacccaaacttctagcgcgtcacttccgctgggggcggagcggggcggggctgagtgggtggcgacctagctgctgcgccagtgtttgtgttggaagctcagctgatgcaggccggttggagtggacgtcattgccgggaacgagcgagtcgccgctgcagccctagtgactgcggcctgcatcccgattgtcttctcctccaaggtctacatgattacctgaagtttaataagtaagaccatgaattatggcatttcttwaatgaagcgttcaagaagtgagagaatgtcatagaaaataaatgatttttaagttatgtctattaatctgactgtagatatatatatttacctccttagtaatgcaagaagtgtttgtgggaagcagagaagcaagcaactgtatttcttgttctcacctaagcattactggaggataagccacatcagtctacaaagaggttttcatacaaacataataagatgtaaatggaccaaaagtgaagcacattcttgcagtaagcactgttactctccaagcaaccatggtttacatattgggattttgaaacttagcacttctgctcccaagggacttacaaaagtgaacatttgtatgtcccgtattaaaagtactttgaactctgtttcaaaggctgtttttggcaatcaaaatgaaatgatttcacgtttagctcaatttaagccaagttcccaaattttaagaaaagtatcggatagtggctggttaaaacagaaaaacatcaaacaagccatcaaatctctgaaaaaatatagtgacaaatcagcagaaaagagtccttttccagaagagaaaagtcacattatagacaaagaagaagatataggtaaacgcagtctttttcattacacaagttctataaccacaaaatttggagactcattctactttttatcaaatcatattaattcatatttcaaacstaaggaaaaaatgtctcaacaaaaggaaaatgaacatttccgggacaaatcagaacttgaagataaaaaggtagaagaggggaaattaagatctccagatcctggcatcctggcttataagccaggctcagaatctgtacatacggtggacaagcctacaagtccttctgcgatacctgatgttcttcaagtttcaactaaacaragtattgctaactttctttctcgtccyacrgaaggtgtacaagctttagtaggtggttatattggtggacttgtccccaaattaaagtatgattcaaagagtcagtcagaagaacaggaagagcctgctaaaactgatcaggctgtcagcaaagacagaaatgcagaggagaaaaagcgtttatctcttcagcgagaaaagattatcgcaagggtgagtattgataacaggacccgggcattagttcaggcattaagaagaacaactgacccaaagctctgcattactagggttgaagaactgacttttcatcttctagaatttcctgaaggaaaaggagtggctgtcaaggaaagaattattccatatttattacgactgagacaaattaaggatgaaactcttcaggctgcagttagagaaattttggccctaattggctatgtggatccagtgaaagggagaggaatccgaattctctcaattgatggtggaggaacaaggggcgtggttgctctccagaccctacgaaaattagttgaacttactcagaagccagttcatcagctctttgattacatttgtggtgtaagcacaggtgccatattagctttcatgttggggttgtttcatatgcccttggatgaatgtgaggaactttatcgaaaattaggatcagatgtattttcacaaaatgtcattgttggaacagtaaaaatgagttggagccatgcattttatgacagtcaaacatgggaaracattcttaaggataggatgggatctgcactgatgattgaaacagcaagaaaccccacatgtcctaaggtagctgctgtaagtaccatagtaaatagagggataacacccaaagcttttgtgttcagaaactatggtcattttcctggaatcaactctcattatttgggaggctgtcagtataaaatgtggcaggccattagagcctcatctgctgctccaggctactttgcagaatatgcattgggaaatgatcttcatcaagatggaggtttgcttctgaataacccttcggcattagctatgcatgagtgtaaatgtctttggccagatgtgccgttagagtgcatagtatccctgggcactggacgttatgagagtgatgtgagaaacacrgtaacatacacaagcttgaaaactaaactttctaatgttatcaacagtgctacagatacagaagaagtccatataatgcttgatggcctgttacctcctgacacctattttagattcaatcctgtaatgtgtgaaaacatacctctagatgaaagtcgaaatgaaaagctggatcagctgcagttggaagggttgaaatacatagaaagaaatgaacaaaaaatgaaaaaagttgcaaaaatattaagtcaagaaaaaacaactctgcagaaaattaatgattggataaaattaaaaactgatatgtatgaaggacttccattcttttcaaaattgtgatgagtatatgcttatgttctcataaatgaaggtctgtttagaagatcaaccacattcaataaggaattgtggggttcgacatgagttaactttgaaatacgtatgaattctggagaatcctgaaaaagacggtgcttcaaccagcttgcatagcacagagaatattcttggttacagaattcatatgggaactaggcttttaagatgttaataattagctaagctttagtaacccttactgtgctagtagattttagtagatattggtgttatattgtttgatgtttgaaaatatattaatatatgtgccgaacaagaaaccgaaagctatattgtactgtgtatttttactttagtcctcataatcatgttgaatttatgtgatcattgattttatttcatatggaaaagctaatttcttcttaaatttacattacctaatattctcactagctatgttctccaatccacactgccttttattgtaatatcatctaaatagatgcagaaaaatggaattttctctattaaagtattttacatttgacataaaaaagaaccagatacagttttctattcagatatgtttattttaacattgtttggttaaaaaaggtgaagttccagtcaaccactttttacccctgaaatttcaagataatgctatattaacttttccagatctaacactagcttattcttccctgttataaaatggtttgaacttactgaggagatattcctatcattaacaaaaataaactatttaaataatctgttgtt

SEQ ID NO: 895 - DNA, 1559 bp, Homo sapiens
ccaggcacttccggcggcgcgctgcaggcgcggggaacaccaatggcggggtacttgaagctggtgtgtgtttyctttcagcgtcaagggttccacactgttgggagtcgctgcaagaatcggacaggcgctgagcacctgtggctgacccgacatctcagggacccatttgtgaaggctgcgaaggtggagagttaccggtgtcgaagcgccttcaagctcctggaggtgaacgagaggcaccagattctgcggcccggccttcgggtgttagactgtggggcagctcctggggcctggagtcaggtggcggtgcagaaggtcaacgccgcaggcacagatcccagctctcctgttggcttygtgcttggggtagatcttcttcacatattccccctggaaggagcaacttttctgtgccctgctgacgtgactgacccgagaacctcacagagaatcctcgaggtgcttcctggcaggagagcagatgtgattctgagcgacatggcgcccaatgccacagggttccgggacctcgatcatgacaggctcatcagcctgtgcctgacccttctcagcgtgaccccagacatcctgcaacctggggggacattcctttgtaaaacctgggctggaagtcaaagccgtcggttacagaggagactgacagaggaattccagaatgtaaggatcatcaaacctgaagccagcaggaaagagtcatcagaagtgtacttcttggccacacagtaccacggaaggaagggcactgtgaagcagtgaggatttcttgtgccattttcataatggtcattagctccttttaagctagaaacgtagcctgagctcctggtctctctctctctttctctctctctctttttaaccaaaaagagatgacaaaactaagttcaggggccatggaaaatgaaaaagtccgctatattgtgatttgggaagagaaagttatcaagagaaagaggtgaggatggaaggatggagaaaaacagactgtgggaaggatcagaaggaatccgccgaggcagggatgggtgtgcccatgtgtgccttgacgggacttcatcttatagactgttaaactgtcacacacaaacaggctttccacccctgctctgagagcaccacgcacagatttccagttcttagtgtggctgtttaaagtagaaaatctgggggctgggtgaggccactcatgcctgtaaacccagggctttagaaggctgaggctgggggattgcttgaagtcaggagttcaagaccaacctgggcaacatagcaacaccccccatgtctacaaaaatgaaaaaccaaaaagcaaaccaaaagaaaaatctgaaatttccatctggggattaacttctgtctttctggtgaacaatatagcaattcacgcattcttcaagcagcaaaagttcccggaacaattagggaagacgtatggtctgaatttatccaggcagtgggtctgctttggtttttgctggaaatttatatcagtgtctgggctcccaagaacataaatgtaattgccaaagcaa

SEQ ID NO: 896 - DNA, 1709 bp, Homo sapiens
ccaggcacttccggcggcgcgctgcaggcgcggggaacaccaatggcggggtacttgaagctggtgtgtgtttyctttcagcgtcaagggttccacactgttgggagtcgctgcaagaatcggacaggcgctgagcacctgtggctgacccgacatctcagggacccatttgtgaaggctgcgaaggtggagagttaccggtgtcgaagcgccttcaagctcctggaggtgaacgagaggcaccagattctgcggcccggccttcgggtgttagactgtggggcagctcctggggcctggagtcaggtggcggtgcagaaggtcaacgccgcaggcacagatcccagctctcctgttggcttygtgcttggggtagatcttcttcacatattccccctggaaggagcaacttttctgtgccctgctgacgtgactgacccgagaacctcacagagaatcctcgaggtgcttcctggcaggagagcagatgtgattctgagcgacatggcgcccaatgccacagggttccgggacctcgatcatgacaggctcatcagcctgtgcctgacccttctcagcgtgaccccagacatcctgcaacctggggggacattcctttgtaaaacctgggctggaagtcaaagccgtcggttacagaggagactgacagaggaattccagaatgtaaggatcatcaaacctgaagccagcaggaaagagtcatcagaagtgtacttcttggccacacagtaccacggaaggaagggcactgtgaagcagtgaggatttcttgtgccattttcataatggtcattagctccttttaagctagaaacgtagcctgagctcctgaagagttcctgggagatttgagctgattttggagatggagcaggacaagtggggagtctctctctctctttctctctctctctttttaaccaaaaagagatgacaaaactaagttcaggggccatggaaaatgaaaaagtccgctatattgtgatttgggaagagaaagttatcaagagaaagaggtgaggatggaaggatggagaaaaacagactgtgggaaggatcagaaggaatccgccgaggcagggatgggtgtgcccatgtgtgccttgacgggacttcatcttatagactgttaaactgtcacacacaaacaggctttccacccctgctctgagagcaccacgcacagatttccagttcttagtgtggctgtttaaagtagaaaatctgggggctgggtgaggccactcatgcctgtaaacccagggctttagaaggctgaggctgggggattgcttgaagtcaggagttcaagaccaacctgggcaacatagcaacaccccccatgtctacaaaaatgaaaaaccaaaaagcaaaccaaaagaaaaatctgaaatttccatctggggattaacttctgtctttctggtgaacaatatagcaattcacgcattcttcaagcagcaaaagttcccggaacaattagggaagacgtatggtctgaatttatccaggcagtgggtctgctttggtttttgctggaaatttatatcagtgtctgggctcccaagaacataaatgtaattgccaaagcaagcagtgatgtggtgtgtttattttcttttactcatctaggaacttgacgcagctttatatttaataaaataatagagattgcattattttaaggt

SEQ ID NO: 897 - DNA, 649 bp, Homo sapiens
ctcttccggtttcatatgaactctcccgccacccgggaacagtggctgccaccgtttgtgttttcccgagtttgaattcttgcaggtgaccaagatggagttttctggaagaaagtggaggaagctgaggttggcaggtgaccagaggaatgcttcctaccctcattgccttcagttttacttgcagccaccttctgaaaacatatctttaatagaatttgaaaacttggctattgatagagttaaattgttaaaatcagttgaaaatcttggagtgagctatgtgaaaggaactgaacaataccagagtaagttggagagtgagcttcggaagctcaagttttcctacagagaaaacttagaagatgaatatgaaccacgaagaagagatcatatttctcattttattttgcggcttgcttattgccagtctgaagaacttagacgctggttcattcaacaagaaatggatctccttcgatttagatttagtattttacccaaggataaaattcaggatttcttaaaggatagccaattgcagtttgaggctataagtgatgaagagaagactcttcgagaacaggagattgttgcctcatcaccaagtttaagtggacttaagttggggttcragtccatttataag

SEQ ID NO: 898 - DNA, 719 bp, Homo sapiens
gagcacttcacgcccttactggtgtctggcccagcccgggtcgccccttccccagtcgggacttggggcaggcaaaaagccgaacgttcggccagactggggacgcagcgccgccctcgctccacccctctttcccgcccaccaggcaattccaggtgaccaagatggagttttctggaagaaagtggaggaagctgaggttggcaggtgaccagaggaatgcttcctaccctcattgccttcagttttacttgcagccaccttctgaaaacatatctttaatagaatttgaaaacttggctattgatagagttaaattgttaaaatcagttgaaaatcttggagtgagctatgtgaaaggaactgaacaataccagagtaagttggagagtgagcttcggaagctcaagttttcctacagagaaaacttagaagatgaatatgaaccacgaagaagagatcatatttctcattttattttgcggcttgcttattgccagtctgaagaacttagacgctggttcattcaacaagaaatggatctccttcgatttagatttagtattttacccaaggataaaattcaggatttcttaaaggatagccaattgcagtttgaggctataagtgatgaagagaagactcttcgagaacaggagattgttgcctcatcaccaagtttaagtggacttaagttggggttcragtccatttataag

SEQ ID NO: 899 - DNA, 552 bp, Homo sapiens
gagcacataccgrgagagtgaggagccagatgacaagcacatactatggcactaagacagattaataaggaacttagtgatttggcccatgaccctccagcacaatgttctgcaggtccagttgaggatggtatgtttcattggcaagccacaattatgggacctaatgacagcccatatcaaagcggtgtattctttttggcaattcattttcctacagactgctccttcaaaccacctaaggttgcrtgtacaacaaggatttgtcatccaaatattaacagtaatggcagcatttgtctcgatattctaagatcacagtggttgcctgctttaaaactatttctaaagttcttttatccatttgttcactgctatgtgatccaaacccagatgaccccctagtgccagagagcacacggatccataaaatagacagacgtaaaagtacaacagaatatctcgggaatggactcagaagaatgccatatgatgctaccttaaagtcagaataacctgcattatagctggaataaactttaaattactgtt

SEQ ID NO: 900 - DNA, 4513 bp, Homo sapiens
accgaggcttttattgctgtagtttatttccacccccttccctcctgtttctctctctccttctctctctctctctctctctctcttttttttccgccctagctggggctgtgttggaggagaggaagaaagagagacagaggattgcattcatccgttacgttcttgaaatttcctaatagcaagaccagcgaagcggttgcacccttttcaatcttgcaaaggaaaaaaacaaaacaaaacaaaaaaaacccaagtccccttccyggcagtttttgccttaaagctgccctcttgaaattaattttttcccaggagagagatgtcttatcaggggaagaaaaatattccacgcatcacgagcgatcgtcttctgatcaaaggaggtaaaattgttaatgatgaccagtcgttctatgcagacatatacatggaagatgggttgatcaagcaaataggagaaaatctgattgtgccaggaggagtgaagaccatcgaggcccactcccggatggtgatccccggaggaattgacgtccacactcgtttccagatgcctgatcagggaatgacgtctgctgatgatttcttccaaggaaccaaggcggccctrgctgggggaaccactatgatcattgaccacgttgttcctgagcctgggacaagcctgctcrctgcctttgaccagtggagggaatgggccgacagcaagtcctgctgtgactactctctgcatgtggacatcagygagtggcataagggcatccaggaggagatggaagcgcttgtgaaggatcacggggtaaattccttcctcgtgtacatggctttcaaagatcgcttccagctaacggattgccagatttatgaagtactgagtgtgatccgggatattggygccatagcccaagtccacgcagaaaatggcgacatcattgcagaggagcagcagaggatcctggatctgggcatcacgggccccgagggacatgtgctgagccgacctgaggaggtcgaggccgaagccgtgaatcgtgccatcaccatygccaaccagaccaactgcccgctgtatatcaccaaggtgatgagcaaaagctctgctgaggtcatcgcccaggcacggaagaagggaactgtggtgtatggcgagcccatcactgccagcttgggaacggacggctcccattactggagcaagaactgggccaaggctgctgcctttgtcacctccccacccttgagccctgatccaaccactccagactttctcaactccttgctgtcctgtggagacctccaggtcacgggcagtgcccattgcacgtttaacactgcccagaaggctgtaggaaaggacaacttcaccctgattccggagggcaccaatggcactgaggagcggatgtccgtcatctgggacaaggctgtggtcactgggaagatggatgagaaccagtttgtggctgtgaccagcaccaatgcagccaaagtcttcaacctttacccccggaaaggccgcattgctgtgggatccgatgccgacctggtcatctgggaccccgacagcgttaaaaccatctctgccaagacacacaacagctctctcgagtacaacatctttgaaggcatggagtgccgcggctccccactggtggtcatcagccaggggaagattgtcctggaggacggcaccctgcatgtcaccgaaggctctggacgctacattccccggaagcccttccctgattttgtttacaagcgtatcaaggcaaggagcaggctggctgagctgagaggggttcctcgtggcctgtatgacggaccygtgtgtgaagtgtctgtgacgcccaagacagtcactccagcctcctcggccaagacgtctcctgccaagcagcaggccccacctgtccggaacctgcaccagtctggattcagtttgtctggtgctcagattgatgacaacattccccgccgcaccacccagcgtatcgtggcgccccccggtggccgtgccaacatcaccagcctgggctagagctcctgggctgtgccgtccactggggactggggatgggacacctgaggacattctgagacttctttcttccttcctttttttttttttgtttttttttttaagagcctgtgatagttactgtggagcagccagttcatggggtcccccttggggccccacmccccgtctctcaccaagagttactgattttgctcatccacttccctacacatctatgggtatcacacccaagactacccaccaagctcatacagggaaccacacccaacacttagacatgcgaacaagcagcccccagcgagggtctccttcgccttcaacctcctagtgtctgttagcatcttccttttcatggggggagggaagataaagtgaattgcccagagctgcctttttcttttctttttaaaaattttaagaagttttcyttgtggggctggggaggggccggggtcagggagagtcttttttttttttttttttaaatactaaattggaacatttaattccatattaatacaaggggtttgaactggacatcctaatgatgcaattacgtcatcacccagctgattccgggtggttggcaaactcatcgtgtctgtcctgagaggctccacaatgcccacccgcatcgccattctgtagtcttcagggtcagctgttgataaaggggcaggcttgcgttattggcctagattttgctgcagattaaatcctttgaggattctcttctcttttaccatttttctgcgtgctctcactctctctttctctctctagctttttaattcatgaatattttcgtgtctgtctctctctctctctgtgtttcctccagcccttgtctcggagacggtgttttcctcccttgccccattatcttttcacctcccaggtctaccatttcatggtggtcgttgggtccgcctaaaggatttgagcgtttgccattgcaagcatagtgctgtgtcatcctggtccatgtaggactggtgctaaccacctgccatcatgaggatgtgtgctagagtgtgggaccctggccaagtgcaggaatgggccatrccgtctcacccacagtatcacaygtggaaccgcagacagggcccagaagctttagaggtatgaggctgcagaaccggagagattttcctctgtgcagtgctctctggctaaagtcacggtcaaacctaaacaccgagcctcattaacccaagtgaaccaaccaaagtcaccagttcagaagtgctaagctaataggagtctgacccgagggcctgctgcttcctggttaagtatcttttgagattctagaacacatgggagctttttattttcggggaaaaaccgtatttttttyttgtccaattatttctaaagacacactacatagaaagaggccctataaactcaaaaagtcattgggaaacttaaagtctattctactttgcaagaggagaaatgtgttttatgaacgatagatcacatcagaactcctgtggggaggaaaccttataaattaaacacatggcccccttagagaccacaggygatgtctgtctccatccttccctctccttttctgtcacctttccccctagctggctcctttggacctacccctgtccttgctgacttgtgttgcattgtattccaaacgtgtttacaggttctcttaagcaatgttgtatttgcaggcttttctgaataccaaatctgctttttgtaaagcgtaaaaacatcacaaagtaggtcattccatcaccacccttgtctctctacacattttgcctttggggatctggttggggttttgggttttttgttgttgttgtttatttgttattttaaaggtaaattgcacttttaaaaaaataattggttgacttaatatatttgctttttttctcacctgcacttagaggaaatttgaacaagttggaaaaaaacaatttttgtttcaattctaagaaacacttgcagctctagtattcacttgagtcttcctgtttttcctgtaccgrgtcatggtaatttttggttgttttggttgttttcttaaaaaacaagttaaaacctgacgatttctgcaggctgtgtaagcatgtttacctgttggcttgctttgtgtgtctgttaaatgaatgtcatatgtaaatgctaaaataaatcgacagtgtctcagaactgaataactgcagtgacttgatgctctaaaacagtgtaggayttaagaatagatgrtttttaatcctggaaattgtgattgtgacccatgagtggaggaactttcagttctaaagctgataaagtgtgtagccagaagagtacttttttttttgtaaccmctgtcttgatggcaaaataatwatggtaaaaaacaagtctcgtgtttattattccttaagaactctgtgttatattaccatggaacrcctaataaagcaaaatgtggttgtttcaggg

SEQ ID NO: 901 - DNA, 4286 bp, Homo sapiens
accgaggcttttattgctgtagtttatttccacccccttccctcctgtttctctctctccttctctctctctctctctctctctcttttttttccgccctagctggggctgtgttggaggagaggaagaaagagagacagaggattgcattcatccgttacgttcttgaaatttcctaatagcaagaccagcgaagcggttgcacccttttcaatcttgcaaaggaaaaaaacaaaacaaaacaaaaaaaacccaagtccccttccyggcagtttttgccttaaagctgccctcttgaaattaattttttcccaggagagagatgtcttatcaggggaagaaaaatattccacgcatcacgagcgatcgtcttctgatcaaaggaggtaaaattgttaatgatgaccagtcgttctatgcagacatatacatggaagatgggttgatcaagcaaataggagaaaatctgattgtgccaggaggagtgaagaccatcgaggcccactcccggatggtgatccccggaggaattgacgtccacactcgtttccagatgcctgatcagggaatgacgtctgctgatgatttcttccaaggaaccaaggcggccctrgctgggggaaccactatgatcattgaccacgttgttcctgagcctgggacaagcctgctcrctgcctttgaccagtggagggaatgggccgacagcaagtcctgctgtgactactctctgcatgtggacatcagygagtggcataagggcatccaggaggagatggaagcgcttgtgaaggatcacggggtaaattccttcctcgtgtacatggctttcaaagatcgcttccagctaacggattgccagatttatgaagtactgagtgtgatccgggatattggygccatagcccaagtccacgcagaaaatggcgacatcattgcagaggagcagcagaggatcctggatctgggcatcacgggccccgagggacatgtgctgagccgacctgaggaggtcgaggccgaagccgtgaatcgtgccatcaccatygccaaccagaccaactgcccgctgtatatcaccaaggtgatgagcaaaagctctgctgaggtcatcgcccaggcacggaagaagggaactgtggtgtatggcgagcccatcactgccagcttgggaacggacggctcccattactggagcaagaactgggccaaggctgctgcctttgtcacctccccacccttgagccctgatccaaccactccagactttctcaactccttgctgtcctgtggagacctccaggtcacgggcagtgcccattgcacgtttaacactgcccagaaggctgtaggaaaggacaacttcaccctgattccggagggcaccaatggcactgaggagcggatgtccgtcatctgggacaaggctgtggtcactgggaagatggatgagaaccagtttgtggctgtgaccagcaccaatgcagccaaagtcttcaacctttacccccggaaaggccgcattgctgtgggatccgatgccgacctggtcatctgggaccccgacagcgttaaaaccatctctgccaagacacacaacagctctctcgagtacaacatctttgaaggcatggagtgccgcggctccccactggtggtcatcagccaggggaagattgtcctggaggacggcaccctgcatgtcaccgaaggctctggacgctacattccccggaagcccttccctgattttgtttacaagcgtatcaaggcaaggagcaggctggctgagctgagaggggttcctcgtggcctgtatgacggaccygtgtgtgaagtgtctgtgacgcccaagacagtcactccagcctcctcggccaagacgtctcctgccaagcagcaggccccacctgtccggaacctgcaccagtctggattcagtttgtctggtgctcagattgatgacaacattccccgccgcaccacccagcgtatcgtggcgccccccggtggccgtgccaacatcaccagcctgggctagagctcctgggctgtgccgtccactggggactggggatgggacacctgaggacattctgagacttctttcttccttcctttttttttttttgtttttttttttaagagcctgtgatagttactgtggagcagccagttcatggggtcccccttggggccccacmccccgtctctcaccaagagttactgattttgctcatccacttccctacacatctatgggtatcacacccaagactacccaccaagctcatacagggaaccacacccaacacttagacatgcgaacaagcagcccccagcgagggtctccttcgccttcaacctcctagtgtctgttagcatcttccttttcatggggggagggaagataaagtgaattgcccagagctgcctttttcttttctttttaaaaattttaagaagttttcyttgtggggctggggaggggccggggtcagggagagtcttttttttttttttttttaaatactaaatgcccacccgcatcgccattctgtagtcttcagggtcagctgttgataaaggggcaggcttgcgttattggcctagattttgctgcagattaaatcctttgaggattctcttctcttttaccatttttctgcgtgctctcactctctctttctctctctagctttttaattcatgaatattttcgtgtctgtctctctctctctctgtgtttcctccagcccttgtctcggagacggtgttttcctcccttgccccattatcttttcacctcccaggtctaccatttcatggtggtcgttgggtccgcctaaaggatttgagcgtttgccattgcaagcatagtgctgtgtcatcctggtccatgtaggactggtgctaaccacctgccatcatgaggatgtgtgctagagtgtgggaccctggccaagtgcaggaatgggccatrccgtctcacccacagtatcacaygtggaaccgcagacagggcccagaagctttagaggtatgaggctgcagaaccggagagattttcctctgtgcagtgctctctggctaaagtcacggtcaaacctaaacaccgagcctcattaacccaagtgaaccaaccaaagtcaccagttcagaagtgctaagctaataggagtctgacccgagggcctgctgcttcctggttaagtatcttttgagattctagaacacatgggagctttttattttcggggaaaaaccgtatttttttyttgtccaattatttctaaagacacactacatagaaagaggccctataaactcaaaaagtcattgggaaacttaaagtctattctactttgcaagaggagaaatgtgttttatgaacgatagatcacatcagaactcctgtggggaggaaaccttataaattaaacacatggcccccttagagaccacaggygatgtctgtctccatccttccctctccttttctgtcacctttccccctagctggctgaataccaaatctgctttttgtaaagcgtaaaaacatcacaaagtaggtcattccatcaccacccttgtctctctacacattttgcctttggggatctggttggggttttgggttttttgttgttgttgtttatttgttattttaaaggtaaattgcacttttaaaaaaataattggttgacttaatatatttgctttttttctcacctgcacttagaggaaatttgaacaagttggaaaaaaacaatttttgtttcaattctaagaaacacttgcagctctagtattcacttgagtcttcctgtttttcctgtaccgrgtcatggtaatttttggttgttttggttgttttcttaaaaaacaagttaaaacctgacgatttctgcaggctgtgtaagcatgtttacctgttggcttgctttgtgtgtctgttaaatgaatgtcatatgtaaatgctaaaataaatcgacagtgtctcagaactgaataactgcagtgacttgatgctctaaaacagtgtaggayttaagaatagatgrtttttaatcctggaaattgtgattgtgacccatgagtggaggaactttcagttctaaagctgataaagtgtgtagccagaagagtacttttttttttgtaaccmctgtcttgatggcaaaataatwatggtaaaaaacaagtctcgtgtttattattccttaagaactctgtgttatattaccatggaacrcctaataaagcaaaatgtggttgtttcaggg

SEQ ID NO: 902 - DNA, 2559 bp, Homo sapiens
tcactggccaggccagccggcgccattttgaaagtggagtcgcctgcccctgccgctgccgccgccgccgtcgctgtcgtagtcgccgccgccgctgccggagaaagagcacgagcggggaagccccagagtgaaatctagcatcctgccggctggtctgcccgcccctccttccttttccccccggcccccgtcccctccccccgcaggtgccatccgccgccatccgccctctctacccccccatccccaggtgaggggggtgagttcaggaagcggagaccccgaggaacccagcagggtcaccatttgcagcgcaacatggcaggagctggaggagggaatgatattcagtggtgtttttctcaggtgaaaggagcagtagatgatgatgtagcagaagcagatataatttctacagtagaatttaatcattctggagaattactagcaacaggagataaaggtggtagagttgtcatctttcaacaggagcaggagaacaaaatccagtctcatagcagaggagaatataatgtttacagcaccttccagagccatgaaccagagtttgactacttgaaaagtttagaaatagaagaaaagatcaayaaaattaggtggttaccccagaaaaatgctgctcagtttttattgtctaccaatgataaaacaataaaattatggaaaatcagtgaaagggacaaaagaccagaagggtataacttgaaagaggaggatggaaggtatagagatcctactacagttactacactacgagtgccagtctttaggcctatggatctaatggttgaggccagtccacgaagaatatttgccaatgctcatacatatcacatcaactcaatttctattaatagtgattatgaaacatatttatctgcagatgatttgcggattaatctttggcatctggaaattacagacaggagttttaacattgtggatatcaagcctgccaatatggaagagctaacagaggtgattacagcagcagaatttcatccaaacagctgtaacacatttgtatacagcagcagtaaaggaactattcggctatgtgacatgagggcatctgccctctgtgatagacattctaaattgtttgaagaacctgaagatcccagtaacaggtcatttttttccgaaatcatctcctctatttcggatgtaaaattcagccatagtggtcgatayatgatgactagagactatttgtcagtcaaaatttgggacttaaatatggaaaacaggcctgtggaaacataccaggtgcatgaatacctcagaagtaaactytgttcactgtatgaaaatgactgcatatttgacaaatttgaatgttgttggaatggatctgacagtgttgtcatgactggatcttacaataatttcttcagaatgtttgacagaaacacaaagcgagacataaccctagaagcatcgcgggaaaacaataagcctcgcacagttctgaagcctcgcaaagtctgtgcaagtggcaagcgaaagaaagatgaaataagtgttgacagcctagacttcaataagaaaatccttcacacagcctggcaccccaaggaaaatatcattgccgtagctactacaaacaatctgtatatatttcaagacaaagtgaattagggttggcattcctagcagaagaacccacttcctgcttagttgagatagttgaatctagcattcgttcctataaaagagagaggtccattgtggcgcccctttccagtgtttgacagtgtgccattcgacaacacattgttatagctacatggagaaagctctgtggattcatcactgtggtgttctccatgtctgctagccatttaggtaagggtagggcacttttaatttaaatgacttcttgcaccatcttgcctaatggactagattggactgtatcaacattgatwtactccactttttatgccttccattgtgatgacgtcaaacacagtgaaagccttcagtcatgctatgggatttaattgtgtatcctcattactgtatcatttgtggggtacaccccttccccctttttttaaattaaatacagctcattcttactgtggcttgtagcattcctcctcttctggcctcctggactgctccccttcatctcttacccttgccccctccacccggtcttggtggtggtatattamaaaaagaaagaatgaaagcacacaaaatgagtcagtttggggtcagtggtataaagggggtatatgttgcaaacaaatgttttagtaacagttggctgtaatcactcctcgccgtgtctggcactgaaaataaggaaaaaaaacctactactgaataaaagtgacaaagaatggagaatctggttttctttttctttttaacctacctcttgtagccaatattttgtgtcatacctttgggcacagtgaaacaaaatgggttttcattgtttattggtatttttgttaattatttttaacaagtgttcttttacatgcaggaggagaggtattggttctctatgaacatatt

SEQ ID NO: 903 - DNA, 2354 bp, Homo sapiens
tcactggccaggccagccggcgccattttgaaagtggagtcgcctgcccctgccgctgccgccgccgccgtcgctgtcgtagtcgccgccgccgctgccggagaaagagcacgagcggggaagccccagagtgaaatctagcatcctgccggctggtctgcccgcccctccttccttttccccccggcccccgtcccctccccccgcaggtgccatccgccgccatccgccctctctacccccccatccccaggtgaggggggtgagttcaggaagcggagaccccgaggaacccagcagggtcaccatttgcagcgcaacatggcaggagctggaggagggaatgatattcagtggtgtttttctcaggtgaaaggagcagtagatgatgatgtagcagaagcagatataatttctacagtagaatttaatcattctggagaattactagcaacaggagataaaggtggtagagttgtcatctttcaacaggagcaggagaacaaaatccagtctcatagcagaggagaatataatgtttacagcaccttccagagccatgaaccagagtttgactacttgaaaagtttagaaatagaagaaaagatcaayaaaattaggtggttaccccagaaaaatgctgctcagtttttattgtctaccaatgataaaacaataaaattatggaaaatcagtgaaagggacaaaagaccagaagggtataacttgaaagaggaggatggaaggtatagagatcctactacagttactacactacgagtgccagtctttaggcctatggatctaatggttgaggccagtccacgaagaatatttgccaatgctcatacatatcacatcaactcaatttctattaatagtgattatgaaacatatttatctgcagatgatttgcggattaatctttggcatctggaaattacagacaggagttttaacattgtggatatcaagcctgccaatatggaagagctaacagaggtgattacagcagcagaatttcatccaaacagctgtaacacatttgtatacagcagcagtaaaggaactattcggctatgtgacatgagggcatctgccctctgtgatagacattctaaattgtttgaagaacctgaagatcccagtaacaggtcatttttttccgaaatcatctcctctatttcggatgtaaaattcagccatagtggtcgatayatgatgactagagactatttgtcagtcaaaatttgggacttaaatatggaaaacaggcctgtggaaacataccaggtgcatgaatacctcagaagtaaactytgttcactgtatgaaaatgactgcatatttgacaaatttgaatgttgttggaatggatctgacagtgttgtcatgactggatcttacaataatttcttcagaatgtttgacagaaacacaaagcgagacataaccctagaagcatcgcgggaaaacaataagcctcgcacagttctgaagcctcgcaaagtctgtgcaagtggcaagcgaaagaaagatgaaataagtgttgacagcctagacttcaataagaatatcattgccgtagctactacaaacaatctgtatatatttcaagacaaagtgaattagggttggcattcctagcagaagaacccacttcctgcttagttgagatagttgaatctagcattcgttcctataaaagagagaggtccattgtggcgcccctttccagtgtttgacagtgtgccattcgacaacacattgttatagctacatggagaaagctctgtggattcatcactgtggtgttctccatgtctgctagccatttaggtaagggtagggcacttttaatttaaatgacttcttgcaccatcttgcctaatggactagattggactgtatcaacattgatwtactccactttttatgccttccattgtgatgacgtcaaacacagtgaaagccttcagtcatgctatgggatttaattgtgtatcctcattactgtatcatttgtggggtacaccccttccccctttttttaaattaaatacagctcattcttactgtggcttgtagcattcctcctcttctggcctcctggactgctccccttcatctcttacccttgccccctccacccggtcttggtggtggtatattamaaaaagaaagaatgaaagcacacaaaatgagtcagtttggggtcagtggtataaagggggtatatgttgcaaacaaatgttttagtaacagttggctgtaatcactcctcgccgtgtctggcactgaaaataaggaaaaaaaacctactactgaataaaagtgacaaagaatggagaatc

SEQ ID NO: 904 - DNA, 2468 bp, Homo sapiens
tcactggccaggccagccggcgccattttgaaagtggagtcgcctgcccctgccgctgccgccgccgccgtcgctgtcgtagtcgccgccgccgctgccggagaaagagcacgagcggggaagccccagagtgaaatctagcatcctgccggctggtctgcccgcccctccttccttttccccccggcccccgtcccctccccccgcaggtgccatccgccgccatccgccctctctacccccccatccccaggtgaggggggtgagttcaggaagcggagaccccgaggaacccagcagggtcaccatttgcagcgcaacatggcaggagctggaggagggaatgatattcagtggtgtttttctcaggtgaaaggagcagtagatgatgatgtagcagaagcagatataatttctacagtagaatttaatcattctggagaattactagcaacaggagataaaggtggtagagttgtcatctttcaacaggagcaggagagtcacaagaattgctaatactatatgcagtttgttacctatgcccataatcaaaagaaatgctgaaatttagctggagaacaaaatccagtctcatagcagaggagaatataatgtttacagcaccttccagagccatgaaccagagtttgactacttgaaaagtttagaaatagaagaaaagatcaayaaaattaggtggttaccccagaaaaatgctgctcagtttttattgtctaccaatgataaaacaataaaattatggaaaatcagtgaaagggacaaaagaccagaagggtataacttgaaagaggaggatggaaggtatagagatcctactacagttactacactacgagtgccagtctttaggcctatggatctaatggttgaggccagtccacgaagaatatttgccaatgctcatacatatcacatcaactcaatttctattaatagtgattatgaaacatatttatctgcagatgatttgcggattaatctttggcatctggaaattacagacaggagttttaacattgtggatatcaagcctgccaatatggaagagctaacagaggtgattacagcagcagaatttcatccaaacagctgtaacacatttgtatacagcagcagtaaaggaactattcggctatgtgacatgagggcatctgccctctgtgatagacattctaaatgtgcatgaatacctcagaagtaaactytgttcactgtatgaaaatgactgcatatttgacaaatttgaatgttgttggaatggatctgacagtgttgtcatgactggatcttacaataatttcttcagaatgtttgacagaaacacaaagcgagacataaccctagaagcatcgcgggaaaacaataagcctcgcacagttctgaagcctcgcaaagtctgtgcaagtggcaagcgaaagaaagatgaaataagtgttgacagcctagacttcaataagaaaatccttcacacagcctggcaccccaaggaaaatatcattgccgtagctactacaaacaatctgtatatatttcaagacaaagtgaattagggttggcattcctagcagaagaacccacttcctgcttagttgagatagttgaatctagcattcgttcctataaaagagagaggtccattgtggcgcccctttccagtgtttgacagtgtgccattcgacaacacattgttatagctacatggagaaagctctgtggattcatcactgtggtgttctccatgtctgctagccatttaggtaagggtagggcacttttaatttaaatgacttcttgcaccatcttgcctaatggactagattggactgtatcaacattgatwtactccactttttatgccttccattgtgatgacgtcaaacacagtgaaagccttcagtcatgctatgggatttaattgtgtatcctcattactgtatcatttgtggggtacaccccttccccctttttttaaattaaatacagctcattcttactgtggcttgtagcattcctcctcttctggcctcctggactgctccccttcatctcttacccttgccccctccacccggtcttggtggtggtatattamaaaaagaaagaatgaaagcacacaaaatgagtcagtttggggtcagtggtataaagggggtatatgttgcaaacaaatgttttagtaacagttggctgtaatcactcctcgccgtgtctggcactgaaaataaggaaaaaaaacctactactgaataaaagtgacaaagaatggagaatctggttttctttttctttttaacctacctcttgtagccaatattttgtgtcatacctttgggcacagtgaaacaaaatgggttttcattgtttattggtatttttgttaattatttttaacaagtgttcttttacatgcaggaggagaggtattggttctctatgaacatatt

SEQ ID NO: 905 - DNA, 2338 bp, Homo sapiens
tacccaggcagtaatgttcccgaagttttctcttcgttctatgtttcatggagctggaggagggaatgatattcagtggtgtttttctcaggtgaaaggagcagtagatgatgatgtagcagaagcagatataatttctacagtagaatttaatcattctggagaattactagcaacaggagataaaggtggtagagttgtcatctttcaacaggagcaggagaacaaaatccagtctcatagcagaggagaatataatgtttacagcaccttccagagccatgaaccagagtttgactacttgaaaagtttagaaatagaagaaaagatcaayaaaattaggtggttaccccagaaaaatgctgctcagtttttattgtctaccaatgataaaacaataaaattatggaaaatcagtgaaagggacaaaagaccagaagggtataacttgaaagaggaggatggaaggtatagagatcctactacagttactacactacgagtgccagtctttaggcctatggatctaatggttgaggccagtccacgaagaatatttgccaatgctcatacatatcacatcaactcaatttctattaatagtgattatgaaacatatttatctgcagatgatttgcggattaatctttggcatctggaaattacagacaggagttttagtatccatttggttttctttggtgtttgtggaaattccttaataaaatgttatctagacattgtggatatcaagcctgccaatatggaagagctaacagaggtgattacagcagcagaatttcatccaaacagctgtaacacatttgtatacagcagcagtaaaggaactattcggctatgtgacatgagggcatctgccctctgtgatagacattctaaattgtttgaagaacctgaagatcccagtaacaggtcatttttttccgaaatcatctcctctatttcggatgtaaaattcagccatagtggtcgatayatgatgactagagactatttgtcagtcaaaatttgggacttaaatatggaaaacaggcctgtggaaacataccaggtgcatgaatacctcagaagtaaactytgttcactgtatgaaaatgactgcatatttgacaaatttgaatgttgttggaatggatctgacagtgttgtcatgactggatcttacaataatttcttcagaatgtttgacagaaacacaaagcgagacataaccctagaagcatcgcgggaaaacaataagcctcgcacagttctgaagcctcgcaaagtctgtgcaagtggcaagcgaaagaaagatgaaataagtgttgacagcctagacttcaataagaaaatccttcacacagcctggcaccccaaggaaaatatcattgccgtagctactacaaacaatctgtatatatttcaagacaaagtgaattagggttggcattcctagcagaagaacccacttcctgcttagttgagatagttgaatctagcattcgttcctataaaagagagaggtccattgtggcgcccctttccagtgtttgacagtgtgccattcgacaacacattgttatagctacatggagaaagctctgtggattcatcactgtggtgttctccatgtctgctagccatttaggtaagggtagggcacttttaatttaaatgacttcttgcaccatcttgcctaatggactagattggactgtatcaacattgatwtactccactttttatgccttccattgtgatgacgtcaaacacagtgaaagccttcagtcatgctatgggatttaattgtgtatcctcattactgtatcatttgtggggtacaccccttccccctttttttaaattaaatacagctcattcttactgtggcttgtagcattcctcctcttctggcctcctggactgctccccttcatctcttacccttgccccctccacccggtcttggtggtggtatattamaaaaagaaagaatgaaagcacacaaaatgagtcagtttggggtcagtggtataaagggggtatatgttgcaaacaaatgttttagtaacagttggctgtaatcactcctcgccgtgtctggcactgaaaataaggaaaaaaaacctactactgaataaaagtgacaaagaatggagaatctggttttctttttctttttaacctacctcttgtagccaatattttgtgtcatacctttgggcacagtgaaacaaaatgggttttcattgtttattggtatttttgttaattatttttaacaagtgttcttttacatgcaggaggagaggtattggttctctatgaacatatt

SEQ ID NO: 906 - DNA, 6158 bp, Homo sapiens
aggaaaaaaaatcataattttaataattcacacttattgcactattgttatttcaattttacagagaaaaacaggcatagagtgatgaaatagcaagtacatatataaacaacaaatggcagagctggaacgccaatcctagcaatctgaaccagcatttaaaaacgaggaattaaagcacatagggtgagaaaaattayagggaagggacaagagctcaaggggacacctggaaaagaaatactataatttaaaaaattaccaacgggctaattatacttgtgttttactggcagagcgctttgtctgttagctcttttaatcccgctaataattctgtgaggttggtactataagttccatttttcagacaaggacgcttaatagatgataacggacacattccctgcttgctctgatctgcatctcaacagctggctctggagcaagcaaagggagactaagggaaacagagcggagcagggcaaagaaagccgactgaaagtgagaaatgcaggaaatgtttcccatctaggcagaagctggttccagcattcaaatctctccagccggcccgccaccacgtcacaaagcccgcctctcagtgacaaagccccgccccgttcccttggctgttctctgagctcccaatacttccctccttctctttggcccctgctaccccgcctagcatcatttcctgtgcgctggatgctgattggtccgacagtcggaagtgagggcgggcggtgggggccgttgccgcagtgacagtgctaggggagtccgaagatggcggcgtcgcgtcgctctcagcatcatcaccaccatcatcaacaacagctccagcccgccccaggggcttcagcgccgccgccgccacctcctcccccactcagccctggcctggccccggggaccaccccagcctctcccacggccagcggcctggcccccttcgcctccccgcggcacggcctagcgctgccggagggggatggcagtcgggatccgcccgacaggccccgatccccggacccggttgacggtaccagctgttgcagtaccaccagcacaatctgtaccgtcgccgccgctcccgtggtcccagcggtttctacttcatctgccgctggggtcgctcccaacccagccggcagtggcagtaacaattcaccgtcgtcctcttcttccccgacttcttcctcatcttcctcyccatcctcccctggatcragcttggcggagagccccgaggcggccggagttagcagcacagcaccactggggcctggggcagcaggacctgggacaggggtcccagcagtgagcggggccctacgggaactgctggaggcctgtcgcaatggggacgtgtcccgggtaaagagrctggtggacgcggcaaacgtaaatgcaaaggacatggccggccggaagtcttctcccctgcacttcgctgcaggttttggaaggaaggatgttgtagaacacttactacagatgggtgctaatgtccacgctcgtgatgatggaggtctcatcccgcttcataatgcctgttcttttggccatgctgaggttgtgagtctgttattgtgccaaggagctgatccaaatgccagggataactggaactatacacctctgcatgaagctgctattaaagggaagatcgatgtgtgcattaacatccggaacactgatgggaaatcagctctggacctggcagatcattcagcaagaagctgtccttacaggtgaatacaagaaagacgaactcctagaagctgctaggagtggtaatgaagaaaaactaatggctttactgactcctctaaatgtgaattgccatgcaagtgatgggcgaaagtcgactcctttacatctagcagcgggctacaacagagttcgaatagttcagcttcttcttcagcatggtgctgatgttcatgcaaaagacaaaggtggacttgtgcctcttcataatgcatgttcatatggacattatgaagtcacagaactgctactaaagcatggagcttgtgttaatgccatggatctctggcagtttactccactgcacgaggctgcttccaagaaccgtgtagaagtctgctctttgttacttagycatggcgctgatcctacrttagtcaactgccatggcaaaagtgctgtggatatggctccaactccrgagcttagggagagattgacttatgaatttaaaggtcattctttactacaagcagccagagaagcagacttagctaaagttaaaaaaacactcgctctggaaatcattaatttcaaacaaccgcagtctcatgaaacagcactgcactgtgctgtggcctctctgcatcccaaacgtaaacaagtgacagaattgttacttagaaaaggagcaaatgttaatgaaaaaaataaagatttcatgactcccctgcatgttgcagccgaaagagcccataatgatgtmatggaagttctgcataagcatggcgccaagatgaatgcactggacacccttggtcagactgctttgcatagagccgccctagcaggycacctgcagacctgccgcctcctgctgagttacggctctgacccctccatcatctccttacaaggcttcacagcagcacagatgggcaatgaagcagtgcagcagattctgagtgagagtacacctatacgtacttctgatgttgattatcgactcttagaggcatctaaagctggagacttggaaactgtgaagcaactttgcagctctcaaaatgtgaattgtagagacttagagggccggcattccacgcccttacacttcgcagcaggctacaaccgcgtgtctgttgtagagtacctgctacaccacggtgccgatgtccatgccaaagacaagggtggcttggtgccccttcataatgcctgttcatatggacactatgaggtggctgagcttttagtaaggcatggggcttctgtcaatgtggcggacttatggaaatttacccctctccatgaagcagcagctaaaggaaagtatgaaatctgcaagmtccttttaaaacatggagcagatccaactaaaaagaacagagatggaaatacmcctttggatttggtaaaggaaggagacacagatattcaggacttactgagaggggatgctgctttgttggatgctgccaagaagggctgcctggcaagagtgcagaagctctgtaccccagagaatatcaactgcagagacacccagggcagaaattcaacccctctgcacctggcagcaggctataataacctggaartagctgaatatcttctagagcatggagctgatgttaatgcccaggacaagggtggtttaattcctcttcataatgcggcatcttatgggcatgttgacatagcggctttattgataaaatacaacacgtgtgtaaatgcaacagataagtgggcgtttactcccctccatgaagcagcccagaaaggaaggacgcagctgtgcgccctcctcctagcgcatggtgcagaccccaccatgaagaaccaggaaggccagacgcctctggatctggcaacagctgacgatatcagagctttgctgatagatgccatgcccccagaggccttacctacctgttttaaacctcaggctactgtagtgagtgcctctctgatctcaccagcatccaccccctcctgcctctcggctgccagcagcatagacaacctcactggccctttagcagagttggccgtaggaggagcctccaatgcaggggatggcgccgcrggaacagaaaggaaggaaggagaagttgctggtcttgacatgaatatcagccaatttctaaaaagccttggccttgaacaccttcgggatatctttgaaacagaacagattacactagatgtgttggctgatatgggtcatgaagagttgaaagaaataggcatcaatgcatatgggcaccgccacaaattaatcaaaggagtagaaagactcttaggtggacaacaaggcaccaatccttatttgacttttcactgtgttaatcagggaacgattttgctggatcttgctccagaagataaagaatatcagtcagtggaagaagagatgcaaagtactattcgagaacacagagatggtggtaatgctggcggcatcttcaacagatacaatgtcattcgaattcaaaaagttgtcaacaagaagttgagggagcggttctgccaccgacagaaggaagtgtctgaggagaatcacaaccatcacaatgagcgcatgttgtttcatggttctcctttcattaatgccattattcataaagggtttgatgagcgacatgcatacataggaggaatgtttggggccgggatttattttgctgaaaactcctcaaaaagcaaccaatatgtttatggaattggaggaggaacaggctgccctacacacaaggacaggtcatgctatatatgtcacagacaaatgctcttctgtagagtgacccttgggaaatcctttctgcagtttagcaccatgaaaatggcccacgcgcctccagggcaccactcagtcattggtagaccgagcgtcaatgggctggcatatgctgaatatgtcatctacagaggagaacaggcatacccagagtatcttatcacttaccagatcatgaagccagaagccccttcccagaccgcaacagccrcagagcagaagacctagtgaatgcctgctggtgaaggccagatcagatttcaacctgggactggattacagaggattgtttctaataacaacatcaatattctagaagtccctgacagcctagaaataagctgtttgtcttctataaagcattgctatagtgatgaatagtatgagtaactgatacatactcaactgctactgttccctttgaggaaatgtttacaggggcggccttttaacatatctcaggctcattttcattgcaattatccatttctaaaacaagattgcttcgatctagacttggaaatggaaaataagaaaaccaatgctttttcaaatgttcacaattcacacactacatttgttttgttatgcatgacgtgtctataacaaatatacacatacgacaggcaacaagcttgtttttgatttgccagacatgcatcattggctattgtttgtttgttttttgtttttttgtgttttttgggttactttgaaaatgagccagagccttcttgaggatattttgcacaaagtcacgctgacaaaatcattagcagtgcaacccaagcttctggctgagcaagattcagtttccactttttaaaatttttttattttgctctgtagctgcacttctcgttatcataaattgagatgaaaaggaaaaaacatcaagttttagtacctttttatgaattggcctatcttacaagagaagggcacaaacaccaacctgacttaggaacgcctaaattcagagaagtcaaagccggtgaaggccacttgctctttccaacacaagcctgccacagaggtcttcgggacagtactggagatgcaggttgacacrggcttgagttccaaggtgaaaaaactggggaggctgtgaaggaagagctgcattaaggagggtgaggagcgtgtggttctgtatcatggcagccccaatggatccaggggatgcctccaaaaaatacatgcttcccttcccttaatctgtactgttgggattgttacccctccaaattagctgccttatttcaaaagtcagtgaaattactgcacttgatgagggtcacaaaaataccacttgattgtttctttagttgagaatgctgggattcagactcgaatagtggatagatacacacaaatgcaaggacttttttgtttactccagatttggggtttattttgagtggcatgcttcaaatagttcataaagatccttgcattaaatttctgaaccatttcttcaaacttcttagtgtgtttagacaaggagaacaaaaattgaaaccaaagccctttctgttattttttcaatgaaggtgagaaagaaataccatacaattttctttgtgaaattactgtttattttcatcaacatttaccaagtgccattgacatttat

SEQ ID NO: 907 - DNA, 6160 bp, Homo sapiens
aggaaaaaaaatcataattttaataattcacacttattgcactattgttatttcaattttacagagaaaaacaggcatagagtgatgaaatagcaagtacatatataaacaacaaatggcagagctggaacgccaatcctagcaatctgaaccagcatttaaaaacgaggaattaaagcacatagggtgagaaaaattayagggaagggacaagagctcaaggggacacctggaaaagaaatactataatttaaaaaattaccaacgggctaattatacttgtgttttactggcagagcgctttgtctgttagctcttttaatcccgctaataattctgtgaggttggtactataagttccatttttcagacaaggacgcttaatagatgataacggacacattccctgcttgctctgatctgcatctcaacagctggctctggagcaagcaaagggagactaagggaaacagagcggagcagggcaaagaaagccgactgaaagtgagaaatgcaggaaatgtttcccatctaggcagaagctggttccagcattcaaatctctccagccggcccgccaccacgtcacaaagcccgcctctcagtgacaaagccccgccccgttcccttggctgttctctgagctcccaatacttccctccttctctttggcccctgctaccccgcctagcatcatttcctgtgcgctggatgctgattggtccgacagtcggaagtgagggcgggcggtgggggccgttgccgcagtgacagtgctaggggagtccgaagatggcggcgtcgcgtcgctctcagcatcatcaccaccatcatcaacaacagctccagcccgccccaggggcttcagcgccgccgccgccacctcctcccccactcagccctggcctggccccggggaccaccccagcctctcccacggccagcggcctggcccccttcgcctccccgcggcacggcctagcgctgccggagggggatggcagtcgggatccgcccgacaggccccgatccccggacccggttgacggtaccagctgttgcagtaccaccagcacaatctgtaccgtcgccgccgctcccgtggtcccagcggtttctacttcatctgccgctggggtcgctcccaacccagccggcagtggcagtaacaattcaccgtcgtcctcttcttccccgacttcttcctcatcttcctcyccatcctcccctggatcragcttggcggagagccccgaggcggccggagttagcagcacagcaccactggggcctggggcagcaggacctgggacaggggtcccagcagtgagcggggccctacgggaactgctggaggcctgtcgcaatggggacgtgtcccgggtaaagagrctggtggacgcggcaaacgtaaatgcaaaggacatggccggccggaagtcttctcccctgcacttcgctgcaggttttggaaggaaggatgttgtagaacacttactacagatgggtgctaatgtccacgctcgtgatgatggaggtctcatcccgcttcataatgcctgttcttttggccatgctgaggttgtgagtctgttattgtgccaaggagctgatccaaatgccagggataactggaactatacacctctgcatgaagctgctattaaagggaagatcgatgtgtgcattgaaacatccggaacactgatgggaaatcagctctggacctggcagatcattcagcaagaagctgtccttacaggtgaatacaagaaagacgaactcctagaagctgctaggagtggtaatgaagaaaaactaatggctttactgactcctctaaatgtgaattgccatgcaagtgatgggcgaaagtcgactcctttacatctagcagcgggctacaacagagttcgaatagttcagcttcttcttcagcatggtgctgatgttcatgcaaaagacaaaggtggacttgtgcctcttcataatgcatgttcatatggacattatgaagtcacagaactgctactaaagcatggagcttgtgttaatgccatggatctctggcagtttactccactgcacgaggctgcttccaagaaccgtgtagaagtctgctctttgttacttagycatggcgctgatcctacrttagtcaactgccatggcaaaagtgctgtggatatggctccaactccrgagcttagggagagattgacttatgaatttaaaggtcattctttactacaagcagccagagaagcagacttagctaaagttaaaaaaacactcgctctggaaatcattaatttcaaacaaccgcagtctcatgaaacagcactgcactgtgctgtggcctctctgcatcccaaacgtaaacaagtgacagaattgttacttagaaaaggagcaaatgttaatgaaaaaaataaagatttcatgactcccctgcatgttgcagccgaaagagcccataatgatgtmatggaagttctgcataagcatggcgccaagatgaatgcactggacacccttggtcagactgctttgcatagagccgccctagcaggycacctgcagacctgccgcctcctgctgagttacggctctgacccctccatcatctccttacaaggcttcacagcagcacagatgggcaatgaagcagtgcagcagattctgagtgagagtacacctatacgtacttctgatgttgattatcgactcttagaggcatctaaagctggagacttggaaactgtgaagcaactttgcagctctcaaaatgtgaattgtagagacttagagggccggcattccacgcccttacacttcgcagcaggctacaaccgcgtgtctgttgtagagtacctgctacaccacggtgccgatgtccatgccaaagacaagggtggcttggtgccccttcataatgcctgttcatatggacactatgaggtggctgagcttttagtaaggcatggggcttctgtcaatgtggcggacttatggaaatttacccctctccatgaagcagcagctaaaggaaagtatgaaatctgcaagmtccttttaaaacatggagcagatccaactaaaaagaacagagatggaaatacmcctttggatttggtaaaggaaggagacacagatattcaggacttactgagaggggatgctgctttgttggatgctgccaagaagggctgcctggcaagagtgcagaagctctgtaccccagagaatatcaactgcagagacacccagggcagaaattcaacccctctgcacctggcagcaggctataataacctggaartagctgaatatcttctagagcatggagctgatgttaatgcccaggacaagggtggtttaattcctcttcataatgcggcatcttatgggcatgttgacatagcggctttattgataaaatacaacacgtgtgtaaatgcaacagataagtgggcgtttactcccctccatgaagcagcccagaaaggaaggacgcagctgtgcgccctcctcctagcgcatggtgcagaccccaccatgaagaaccaggaaggccagacgcctctggatctggcaacagctgacgatatcagagctttgctgatagatgccatgcccccagaggccttacctacctgttttaaacctcaggctactgtagtgagtgcctctctgatctcaccagcatccaccccctcctgcctctcggctgccagcagcatagacaacctcactggccctttagcagagttggccgtaggaggagcctccaatgcaggggatggcgccgcrggaacagaaaggaaggaaggagaagttgctggtcttgacatgaatatcagccaatttctaaaaagccttggccttgaacaccttcgggatatctttgaaacagaacagattacactagatgtgttggctgatatgggtcatgaagagttgaaagaaataggcatcaatgcatatgggcaccgccacaaattaatcaaaggagtagaaagactcttaggtggacaacaaggcaccaatccttatttgacttttcactgtgttaatcagggaacgattttgctggatcttgctccagaagataaagaatatcagtcagtggaagaagagatgcaaagtactattcgagaacacagagatggtggtaatgctggcggcatcttcaacagatacaatgtcattcgaattcaaaaagttgtcaacaagaagttgagggagcggttctgccaccgacagaaggaagtgtctgaggagaatcacaaccatcacaatgagcgcatgttgtttcatggttctcctttcattaatgccattattcataaagggtttgatgagcgacatgcatacataggaggaatgtttggggccgggatttattttgctgaaaactcctcaaaaagcaaccaatatgtttatggaattggaggaggaacaggctgccctacacacaaggacaggtcatgctatatatgtcacagacaaatgctcttctgtagagtgacccttgggaaatcctttctgcagtttagcaccatgaaaatggcccacgcgcctccagggcaccactcagtcattggtagaccgagcgtcaatgggctggcatatgctgaatatgtcatctacagaggagaacaggcatacccagagtatcttatcacttaccagatcatgaagccagaagccccttcccagaccgcaacagccrcagagcagaagacctagtgaatgcctgctggtgaaggccagatcagatttcaacctgggactggattacagaggattgtttctaataacaacatcaatattctagaagtccctgacagcctagaaataagctgtttgtcttctataaagcattgctatagtgatgaatagtatgagtaactgatacatactcaactgctactgttccctttgaggaaatgtttacaggggcggccttttaacatatctcaggctcattttcattgcaattatccatttctaaaacaagattgcttcgatctagacttggaaatggaaaataagaaaaccaatgctttttcaaatgttcacaattcacacactacatttgttttgttatgcatgacgtgtctataacaaatatacacatacgacaggcaacaagcttgtttttgatttgccagacatgcatcattggctattgtttgtttgttttttgtttttttgtgttttttgggttactttgaaaatgagccagagccttcttgaggatattttgcacaaagtcacgctgacaaaatcattagcagtgcaacccaagcttctggctgagcaagattcagtttccactttttaaaatttttttattttgctctgtagctgcacttctcgttatcataaattgagatgaaaaggaaaaaacatcaagttttagtacctttttatgaattggcctatcttacaagagaagggcacaaacaccaacctgacttaggaacgcctaaattcagagaagtcaaagccggtgaaggccacttgctctttccaacacaagcctgccacagaggtcttcgggacagtactggagatgcaggttgacacrggcttgagttccaaggtgaaaaaactggggaggctgtgaaggaagagctgcattaaggagggtgaggagcgtgtggttctgtatcatggcagccccaatggatccaggggatgcctccaaaaaatacatgcttcccttcccttaatctgtactgttgggattgttacccctccaaattagctgccttatttcaaaagtcagtgaaattactgcacttgatgagggtcacaaaaataccacttgattgtttctttagttgagaatgctgggattcagactcgaatagtggatagatacacacaaatgcaaggacttttttgtttactccagatttggggtttattttgagtggcatgcttcaaatagttcataaagatccttgcattaaatttctgaaccatttcttcaaacttcttagtgtgtttagacaaggagaacaaaaattgaaaccaaagccctttctgttattttttcaatgaaggtgagaaagaaataccatacaattttctttgtgaaattactgtttattttcatcaacatttaccaagtgccattgacatttat

SEQ ID NO: 908 - DNA, 4403 bp, Homo sapiens
ggccccgtggttatgaatgtgcttcagtttcataatgcctcctgctatggcagacatccttgacatctgggcggtggattcacagatagcatctgatggctccatacctgtggatttccttttgcccactgggatttatatccagttggaggtacctcgggaagctaccatttcttatattaagcagatgttatggaagcaagttcacaattacccaatgttcaacctccttatggatattgactcctatatgtttgcatgtgtgaatcagactgctgtatatgaggagcttgaagatgaaacacgaagactctgtgatgtcagaccttttcttccagttctcaaattagtgacaagaagttgtgacccaggggaaaaattagactcaaaaattggagtccttataggaaaaggtctgcatgaatttgattccttgaaggatcctgaagtaaatgaatttcgaagaaaaatgcgcaaattcagcgaggaaaaaatcctgtcacttgtgggattgtcttggatggactggctaaaacaaacatatccaccagagcatgaaccatccatccctgaaaacttagaagataaactttatgggggaaagctcatcgtagctgttcattttgaaaactgccaggaygtgtttagctttcaagtgtctcctaatatgaatcctatcaaagtaaatgaattggcaatccaaaaacgtttgactattcatgggaaggaagatgaagttagcccctatgattatgtgttgcaagtcagcgggagagtagaatatgtttttggtgatcatccactaattcagttccagtatatccggaactgtgtgatgaacagagccctgccccattttatacttgtggaatgctgcaagatcaagaaaatgtatgaacaagaaatgattgccatagaggctgccataaatcgaaattcatctaatcttcctcttccattaccaccaaagaaaacacgaattatttctcatgtttgggaaaataacaaccctttccaaattgtcttggttaagggaaataaacttaacacagaggaaactgtaaaagttcatgtcagggctggtctttttcatggtactgagctcctgtgtaaaaccatcgtaagctcagaggtatcagggaaaaatgatcatatttggaatgaaccactggaatttgatattaatatttgtgacttaccaagaatggctcgattatgttttgctgtttatgcagttttggataaagtaaaaacgaagaaatcaacgaaaactattaatccctctaaatatcagaccatcaggaaagctggaaaagtgcattatcctgtagcgtgggtaaatacgatggtttttgactttaaaggacaattgagaactggagacataatattacacagctggtcttcatttcctgatgaactcgaagaaatgttgaatccaatgggaactgktcaaacaaatccatatactgaaaatgcaacagctttgcatgttaaatttccagagaataaaaaacaaccttattattaccctcccttcgataagattattgaaaaggcagctgagattgcaagcagtgatagtgctaatgtgtcaagtcgaggtggaaaaaagtttcttcctgtattgaaagaaatcttggacagggatcccttgtctcaactgtgtgaaaatgaaatggatcttatttggactttgcgacaagactgccgagagattttcccacaatcactgccaaaattactgctgtcaatcaagtggaataaacttgaggatgttgctcagcttcaggcgctgcttcagatttggcctaaactgcccccccgggaggccctagagcttctggatttcaactatccagaccagtaygttcgagaatatgctgtaggctgcctgcgacagatgagtgatgaagaactttctcaatatcttttacaactggtgcargtgttaaaatatgagccttttcttgattgtgccctctctagattcctattagaaagagcacttggtaatcggaggatagggcagtttctattttggcatcttaggtcagaagtgcacattcctgctgtctcagtacaatttggtgtcatccttgaagcatactgccggggaagtgtggggcacatgaaagtgctttctaagcaggttgaagcactcaataagttaaaaactttaaatagtttaatcaaactgaatgccgtgaagttaaacagagccaaagggaaggaggccatgcatacctgtttaaaacagagtgcttaccgggaagccctctctgacctgcagtcacccctgaacccatgtgttatcctctcagaactctatgttgaaaagtgcaaatacatggattccaaaatgaagcctttgtggctggtatacaataacaaggtatttggtgaggattcagttggagtgatttttaaaaatggtgatgatttacgacaggatatgttgacactccaaatgttgcgcttgatggatttactctggaaagaagctggtttggatcttcggatgttgccttatggctgtttagcaacaggagatcgctctggcctcattgaagttgtgagcacctctgaaacaattgctgacattcagctgaacagtagcaatgtggctgctgcagcagccttcaacaaagatgcccttctgaactggcttaaagaatacaactctggggatgacctggaccgagccattgaggaatttacactgtcctgtgctggctactgtgtagcttcttatgtccttgggattggtgacagacatagtgacaacatcatggtcaaaaaaactggccagctcttccacattgactttggacatattcttggaaatttcaaatctaagtttggcattaaaagggagcgagtgccttttattcttacctatgatttcatccatgtcattcaacaaggaaaaacaggaaatacagaaaagtttggccggttccgccagtgttgtgaggatgcatatctgattttacgacggcatgggaatctcttcatcactctctttgcgctgatgttgactgcagggcttcctgaactcacatcagtcaaagatatacagtatcttaaggactctcttgcattagggaagagtgaagaagaagcactcaaacagtttaagcaaaaatttgatgaggcgctcagggaaagctggactactaaagtgaactggatggcccacacagttcggaaagactacagatcttaacgatcagccttcgctcctaatgtatttgttggtttcatttcattttcattttgcacttgcactaaattgaacatgaccctgttagagatgttataaagggaatgaaatcctggaactcagagttaaattaagaacaaggcatcccacagaacctaatctgaacaatccccgatgattccctctgctttttgaatgcttccaagacttatcatgaaaactgtcaatggataatcatttcctgctgactttgcacgccaaggaatgctactagggattgtttccgtttttgtttgttttttctaatatttggtacttcccagaatggtgtaaatacttcttttcaatgttgtgaccaagtattgtcactcagccaacaacttttccacacctgggggttggtggctgttcttactgtccaaatgaagctaaaaagaaaggcatctttcttcccttttaaaattgtgtaaactgcaaattataatataatttgaatttatgattattttccagaagaaatcttgtaaacctgtggatactcattaattcttttgttaatatttatttccatgatagcatcattccagccagacttgctgaaaatctactggtgaggcaaatataatatatataaatatgctacatatatatttataaaatttctagtgggagttctatataaatgtttctttggtattcttcagcctgtgatttaaagttttacaaaaagcagagctttttcctaagttacttttcagttaggtaactgtgtgatccagttcttccagctgcttctataatgaggcacatattaatacagtttttatatggtatctatgaaagagttcacttcatagagaataatacttgagcaaatgtatccaagaaagcaagcaaatgaaaagaaacctatttatggaataaactccagatctgaaattcagtattttagaaaaatgccagctcttcttactgtatttattaaaacttgtaataatgtgatttttttcaaggatattagttcaaattgaaatggtttcacgccacacggaaatctttaagttatttgttgaggtaccatatatttagggtgctaggggcaagtaatgttaatatgtgcaataggaactactggtttgaatgtgtaaatgggtgatctctctgagtcctggcaaca

SEQ ID NO: 909 - DNA, 4737 bp, Homo sapiens
cgggcgcgggttcggcggcggcgcgcgcgtgctctgtcggcctgtgcggcgctgcggcggagcgggccatggcagtggggagggggcgagtgtagtgctgcgcggggcaggcgggaggtgatcgagagaggcagggatgggggcgccggagtggagcggttgcggcggcctgggctgctgactgcgcacttggaatagtagcaggcggcggcggcggaacgccaggcagtgtatgttttaactggaaaaagtcttccatgaaaacgtcacttttaaaaaataagtaatgccatctgttttcctaaaagactgaaatgggggcgaccattcttagggccccgtggttatgaatgtgcttcagtttcataatgcctcctgctatggcagacatccttgacatctgggcggtggattcacagatagcatctgatggctccatacctgtggatttccttttgcccactgggatttatatccagttggaggtacctcgggaagctaccatttcttatattaagcagatgttatggaagcaagttcacaattacccaatgttcaacctccttatggatattgactcctatatgtttgcatgtgtgaatcagactgctgtatatgaggagcttgaagatgaaacacgaagactctgtgatgtcagaccttttcttccagttctcaaattagtgacaagaagttgtgacccaggggaaaaattagactcaaaaattggagtccttataggaaaaggtctgcatgaatttgattccttgaaggatcctgaagtaaatgaatttcgaagaaaaatgcgcaaattcagcgaggaaaaaatcctgtcacttgtgggattgtcttggatggactggctaaaacaaacatatccaccagagcatgaaccatccatccctgaaaacttagaagataaactttatgggggaaagctcatcgtagctgttcattttgaaaactgccaggaygtgtttagctttcaagtgtctcctaatatgaatcctatcaaagtaaatgaattggcaatccaaaaacgtttgactattcatgggaaggaagatgaagttagcccctatgattatgtgttgcaagtcagcgggagagtagaatatgtttttggtgatcatccactaattcagttccagtatatccggaactgtgtgatgaacagagccctgccccattttatacttgtggaatgctgcaagatcaagaaaatgtatgaacaagaaatgattgccatagaggctgccataaatcgaaattcatctaatcttcctcttccattaccaccaaagaaaacacgaattatttctcatgtttgggaaaataacaaccctttccaaattgtcttggttaagggaaataaacttaacacagaggaaactgtaaaagttcatgtcagggctggtctttttcatggtactgagctcctgtgtaaaaccatcgtaagctcagaggtatcagggaaaaatgatcatatttggaatgaaccactggaatttgatattaatatttgtgacttaccaagaatggctcgattatgttttgctgtttatgcagttttggataaagtaaaaacgaagaaatcaacgaaaactattaatccctctaaatatcagaccatcaggaaagctggaaaagtgcattatcctgtagcgtgggtaaatacgatggtttttgactttaaaggacaattgagaactggagacataatattacacagctggtcttcatttcctgatgaactcgaagaaatgttgaatccaatgggaactgktcaaacaaatccatatactgaaaatgcaacagctttgcatgttaaatttccagagaataaaaaacaaccttattattaccctcccttcgataagattattgaaaaggcagctgagattgcaagcagtgatagtgctaatgtgtcaagtcgaggtggaaaaaagtttcttcctgtattgaaagaaatcttggacagggatcccttgtctcaactgtgtgaaaatgaaatggatcttatttggactttgcgacaagactgccgagagattttcccacaatcactgccaaaattactgctgtcaatcaagtggaataaacttgaggatgttgctcagcttcaggcgctgcttcagatttggcctaaactgcccccccgggaggccctagagcttctggatttcaactatccagaccagtaygttcgagaatatgctgtaggctgcctgcgacagatgagtgatgaagaactttctcaatatcttttacaactggtgcargtgttaaaatatgagccttttcttgattgtgccctctctagattcctattagaaagagcacttggtaatcggaggatagggcagtttctattttggcatcttaggtcagaagtgcacattcctgctgtctcagtacaatttggtgtcatccttgaagcatactgccggggaagtgtggggcacatgaaagtgctttctaagcaggttgaagcactcaataagttaaaaactttaaatagtttaatcaaactgaatgccgtgaagttaaacagagccaaagggaaggaggccatgcatacctgtttaaaacagagtgcttaccgggaagccctctctgacctgcagtcacccctgaacccatgtgttatcctctcagaactctatgttgaaaagtgcaaatacatggattccaaaatgaagcctttgtggctggtatacaataacaaggtatttggtgaggattcagttggagtgatttttaaaaatggtgatgatttacgacaggatatgttgacactccaaatgttgcgcttgatggatttactctggaaagaagctggtttggatcttcggatgttgccttatggctgtttagcaacaggagatcgctctggcctcattgaagttgtgagcacctctgaaacaattgctgacattcagctgaacagtagcaatgtggctgctgcagcagccttcaacaaagatgcccttctgaactggcttaaagaatacaactctggggatgacctggaccgagccattgaggaatttacactgtcctgtgctggctactgtgtagcttcttatgtccttgggattggtgacagacatagtgacaacatcatggtcaaaaaaactggccagctcttccacattgactttggacatattcttggaaatttcaaatctaagtttggcattaaaagggagcgagtgccttttattcttacctatgatttcatccatgtcattcaacaaggaaaaacaggaaatacagaaaagtttggccggttccgccagtgttgtgaggatgcatatctgattttacgacggcatgggaatctcttcatcactctctttgcgctgatgttgactgcagggcttcctgaactcacatcagtcaaagatatacagtatcttaaggactctcttgcattagggaagagtgaagaagaagcactcaaacagtttaagcaaaaatttgatgaggcgctcagggaaagctggactactaaagtgaactggatggcccacacagttcggaaagactacagatcttaacgatcagccttcgctcctaatgtatttgttggtttcatttcattttcattttgcacttgcactaaattgaacatgaccctgttagagatgttataaagggaatgaaatcctggaactcagagttaaattaagaacaaggcatcccacagaacctaatctgaacaatccccgatgattccctctgctttttgaatgcttccaagacttatcatgaaaactgtcaatggataatcatttcctgctgactttgcacgccaaggaatgctactagggattgtttccgtttttgtttgttttttctaatatttggtacttcccagaatggtgtaaatacttcttttcaatgttgtgaccaagtattgtcactcagccaacaacttttccacacctgggggttggtggctgttcttactgtccaaatgaagctaaaaagaaaggcatctttcttcccttttaaaattgtgtaaactgcaaattataatataatttgaatttatgattattttccagaagaaatcttgtaaacctgtggatactcattaattcttttgttaatatttatttccatgatagcatcattccagccagacttgctgaaaatctactggtgaggcaaatataatatatataaatatgctacatatatatttataaaatttctagtgggagttctatataaatgtttctttggtattcttcagcctgtgatttaaagttttacaaaaagcagagctttttcctaagttacttttcagttaggtaactgtgtgatccagttcttccagctgcttctataatgaggcacatattaatacagtttttatatggtatctatgaaagagttcacttcatagagaataatacttgagcaaatgtatccaagaaagcaagcaaatgaaaagaaacctatttatggaataaactccagatctgaaattcagtattttagaaaaatgccagctcttcttactgtatttattaaaacttgtaataatgtgatttttttcaaggatattagttcaaattgaaatggtttcacgccacacggaaatctttaagttatttgttgaggtaccatatatttagggtgctaggggcaagtaatgttaatatgtgcaataggaactactggtttgaatgtgtaaatgggtgatctctctgagtcctggcaaca

SEQ ID NO: 910 - DNA, 4686 bp, Homo sapiens
cgggcgcgggttcggcggcggcgcgcgcgtgctctgtcggcctgtgcggcgctgcggcggagcgggccatggcagtggggagggggcgagtgtagtgctgcgcggggcaggcgggaggtgatcgagagaggcagggatgggggcgccggagtggagcggttgcggcggcctgggctgctgactgcgcacttggaatagtagcaggcggcggcggcggaacgccaggcagtgtatgttttaactggaaaaagtcttccatgaaaacgtcacttttaaaaaataagtaatgccatctgttttcctaaaagactgaaatgggggcgaccattcttagggccccgtggttatgaatgtgcttcagtttcataatgcctcctgctatggcagacatccttgacatctgggcggtggattcacagatagcatctgatggctccatacctgtggatttccttttgcccactgggatttatatccagttggaggtacctcgggaagctaccatttcttatattaagcagatgttatggaagcaagttcacaattacccaatgttcaacctccttatggatattgactcctatatgtttgcatgtgtgaatcagactgctgtatatgaggagcttgaagatgaaacacgaagactctgtgatgtcagaccttttcttccagttctcaaattagtgacaagaagttgtgacccaggggaaaaattagactcaaaaattggagtccttataggaaaaggtctgcatgaatttgattccttgaaggatcctgaagtaaatgaatttcgaagaaaaatgcgcaaattcagcgaggaaaaaatcctgtcacttgtgggattgtcttggatggactggctaaaacaaacatatccaccagagcatgaaccatccatccctgaaaacttagaagataaactttatgggggaaagctcatcgtagctgttcattttgaaaactgccaggaygtgtttagctttcaagtgtctcctaatatgaatcctatcaaagtaaatgaattggcaatccaaaaacgtttgactattcatgggaaggaagatgaagttagcccctatgattatgtgttgcaagtcagcgggagagtagaatatgtttttggtgatcatccactaattcagttccagtatatccggaactgtgtgatgaacagagccctgccccattttatacttgtggaatgctgcaagatcaagaaaatgtatgaacaagaaatgattgccatagaggctgccataaatcgaaattcatctaatcttcctcttccattaccaccaaagaaaacacgaattatttctcatgtttgggaaaataacaaccctttccaaattgtcttggttaagggaaataaacttaacacagaggaaactgtaaaagttcatgtcagggctggtctttttcatggtactgagctcctgtgtaaaaccatcgtaagctcagaggtatcagggaaaaatgatcatatttggaatgaaccactggaatttgatattaatatttgtgacttaccaagaatggctcgattatgttttgctgtttatgcagttttggataaagtaaaaacgaagaaatcaacgaaaactattaatccctctaaatatcagaccatcaggaaagctggaaaagtgcattatcctgtagcgtgggtaaatacgatggtttttgactttaaaggacaattgagaactggagacataatattacacagctggtcttcatttcctgatgaactcgaagaaatgttgaatccaatgggaactgktcaaacaaatccatatactgaaaatgcaacagctttgcatgttaaatttccagagaataaaaaacaaccttattattaccctcccttcgataagattattgaaaaggcagctgagattgcaagcagtgatagtgctaatgtgtcaagtcgaggtggaaaaaagtttcttcctgtattgaaagaaatcttggacagggatcccttgtctcaactgtgtgaaaatgaaatggatcttatttggactttgcgacaagactgccgagagattttcccacaatcactgccaaaattactgctgtcaatcaagtggaataaacttgaggatgttgctcagcttcaggcgctgcttcagatttggcctaaactgcccccccgggaggccctagagcttctggatttcaactatccagaccagtaygttcgagaatatgctgtaggctgcctgcgacagatgagtgatgaagaactttctcaatatcttttacaactggtgcargtgttaaaatatgagccttttcttgattgtgccctctctagattcctattagaaagagcacttggtaatcggaggatagggcagtttctattttggcatcttaggtcagaagtgcacattcctgctgtctcagtacaatttggtgtcatccttgaagcatactgccggggaagtgtggggcacatgaaagtgctttctaagcaggttgaagcactcaataagttaaaaactttaaatagtttaatcaaactgaatgccgtgaagttaaacagagccaaagggaaggaggccatgcatacctgtttaaaacagagtgcttaccgggaagccctctctgacctgcagtcacccctgaacccatgtgttatcctctcagaactctatgttgaaaagtgcaaatacatggattccaaaatgaagcctttgtggctggtatacaataacaaggtatttggtgaggattcagttggagtgatttttaaaaatggtgatgatttacgacaggatatgttgacactccaaatgttgcgcttgatggatttactctggaaagaagctggtttggatcttcggatgttgccttatggctgtttagcaacaggagatcgctctggcctcattgaagttgtgagcacctctgaaacaattgctgacattcagctgaacagtagcaatgtggctgctgcagcagccttcaacaaagatgcccttctgaactggcttaaagaatacaactctggggatgacctggaccgagccattgaggaatttacactgtcctgtgctggctactgtgtagcttcttatgtccttgggattggtgacagacatagtgacaacatcatggtcaaaaaaactggccagctcttccacattgactttggacatattcttggaaatttcaaatctaagtttggcattaaaagggagcgagtgccttttattcttacctatgatttcatccatgtcattcaacaaggaaaaacaggaaatacagaaaagtttggccggttccgccagtgttgtgaggatgcatatctgattttacgacggcatgggaatctcttcatcactctctttgcgctgatgttgactgcagggcttcctgaactcacatcagtcaaagatatacagtatcttaaggactctcttgcattagggaagagtgaagaagaagcactcaaacagtttaagcaaaaatttgatgaggcgctcagggaaagctggactactaaagtgaactggatggcccacacagttcggaaagactacagatcttaacgatcagccttcgctcctaatgtatttgttggtttcatttcattttcattttgcacttgcactaaattgaacatgaccctgttagagatgttataaagggaatgaaatcctggaactcagagttaaattaagaacaaggcatcccacagaacctaatctgaacaatccccgatgattccctctgctttttgaatgcttccaagacttatcatgaaaatagggattgtttccgtttttgtttgttttttctaatatttggtacttcccagaatggtgtaaatacttcttttcaatgttgtgaccaagtattgtcactcagccaacaacttttccacacctgggggttggtggctgttcttactgtccaaatgaagctaaaaagaaaggcatctttcttcccttttaaaattgtgtaaactgcaaattataatataatttgaatttatgattattttccagaagaaatcttgtaaacctgtggatactcattaattcttttgttaatatttatttccatgatagcatcattccagccagacttgctgaaaatctactggtgaggcaaatataatatatataaatatgctacatatatatttataaaatttctagtgggagttctatataaatgtttctttggtattcttcagcctgtgatttaaagttttacaaaaagcagagctttttcctaagttacttttcagttaggtaactgtgtgatccagttcttccagctgcttctataatgaggcacatattaatacagtttttatatggtatctatgaaagagttcacttcatagagaataatacttgagcaaatgtatccaagaaagcaagcaaatgaaaagaaacctatttatggaataaactccagatctgaaattcagtattttagaaaaatgccagctcttcttactgtatttattaaaacttgtaataatgtgatttttttcaaggatattagttcaaattgaaatggtttcacgccacacggaaatctttaagttatttgttgaggtaccatatatttagggtgctaggggcaagtaatgttaatatgtgcaataggaactactggtttgaatgtgtaaatgggtgatctctctgagtcctggcaaca

SEQ ID NO: 911 - DNA, 1379 bp, Homo sapiens
caggctggcaagcgacycccaagcccagccctgtggtgggtgaatgggaaggggaagraattaatgtggaatttcagagaactgagtgaaaacagccagcaggcagccaacgtcctctcgggagcctgtggcctgcagcgtggggatcgtgtggcagtggtgctgccccgagtgcctgagtggtggctggtgatcctgggctgcattcgagcaggtctcatctttatgcctggaaccatccagatgaaatccactgacatactgtataggttgcagatgtctaaggccaaggctattgttgctggggatgaagtcatccaagaagtggacacagtggcatctgaatgtccttctctgagaattaagctactggtgtctgagaaaagctgtgatgggtggctgaacttcaagaaactactaaatgaggcatccaccactcatcactgtgtggagactggaagccaggaagcatctgccatctacttcactagtgggaccagtggtcttcccaagatggcagaacattcctactcgagcctgggcctcaaggccaagatggatgctggttggacaggcctgcaagcctctgatataatgtggaccatatcagacacaggttggatactgaacatcttgtgctcacttatggaaccttgggcattaggagcatgcacatttgttcatctcttgccaaagtttgacccactggttattctaaagacactctccagttatccaatcaagagtatgatgggtgccccyattgtttaccggatgttgctacagcaggatctttccagttacaagttcccccatctacagaactgcstcrctgkaggggagtcccttcttccagaaactctggagaactggagggcccagacaggactggacatccgagaatcctatggccagacagaaacgggattracttgcatggtttccaagacaatgaaaatcaaaccaggatacatgggaacggctgcttcctgttatgatgtacagatcatagatgataagggcaacgtcctgccccccggcacagaaggagacattggcatcagggtcaaacccatcaggcctataggcatcttctctggctatgtggtatcatccccatgctctatgccattgatcttctttagagccatgccaggcactttacagtaagacttcaccatctagttggaggaatccctatcttcagatcttgggaaggtaaagacagataatccttgaatctggccacctcacttgacaggtgaggatggtggagccagagattacaagacttgctcaagctcacaaccattagaaagtggacagagaagaccccaagggcatgccttctgatccctgagagaattgattaataaact

SEQ ID NO: 912 - DNA, 2743 bp, Homo sapiens
ggtctcactctgttgctgtcttcacggagagcaggagcagaggctttgagaagccagtgggccttggcctcagccctgccggcagagggtccccaccatgcagctgaagtgccagggtgcttgtgaagtctaagcccttgtctggcatttgtcaggaatataggcgcacacttaagcggcccgggcgggtaccgccgtcccgccatggctctgaggcgcgccctgcccgcgctgcgcccctgcattccccgcttcgtccmgctgtccacggcgccggcctcccgcgagcagyccgcagcgggcccagcggccgtgccaggaggtgggtcggccacggcagtgcggccgccggtgcccgccgtggacttcggcaacgcgcaggaggcgtaccgcagccggcgaacctgggagctggcgcgsagcctgctggtgctgcgcttstgcgcctggcccgcgctgctggcgcgccacgagcagctgctgtatgtttccaggaaacttctaggacagaggctattcaacaagctcatgaagatgaccttctatgggcattttgtagccggggaggaccaggagtccatccagcccctgcttcggcactacagggccttcggtgtcagcgccatcctggactatggagtggaggaggacctgagccccgaggaggcagagcacaaggagatggagtcctgcacctcagctgcggagagggatggcagtggcacgaataagcgggacaagcaataccaggcccacyrggccttcggggaccgcaggaatggtgtcatcagtgcccgcacctacttctacgccaatgaggccaagtgcgacagccacatggagacattcttgcgctgcatcgaagcctcaggtagagtcagcgatgacggcttcatagccattaagctcacagcactggggagaccccagtttctgctgcagttctcagaggtgctggccaagtggaggtgcttctttcaccaaatggctgtggagcaagggcaggcgggcctggctgccatggacaccaagctggaggtggcggtgctgcaggaaagtgtcgcaaagttgggcatcgcatccagggctgagattgaggactggttcacggcagagaccctgggagtgtctggcaccatggacctgctggactggagcagcctcatcgacagcaggaccaagctgtccaagcacytggtagtccccaacgcacagacaggacagctggagcccctgctgtcccggttyrctgaggaggaggagctacagatgacsaggatgctacagcggatggatgtcctgsccaayaaagccacagagatgggcgtgcggctgatggtggatgccgagcagacctacttccagccggccatcagccgcctgacgctggagatgcagcggaagttcaatgtggagaagccgctcatcttcaacacataccagtgctacctcaaggatgcctatgacaatgtgaccctggacgtggagctggctcrccgtgagggctggtgttttggggccaagcyggtgcggggcgcatacctggcccaggagcgagcccgtgcrkcagagatcggmtatgaggaccccatcaaccccaygtacgaggccaccaacrccatgtaccacaggtgcctggactacgtgttggaggagctgaagcacaacgccaaggccaaggtgatggtggcctcccacaatgaggacacagtgcgcttygcactgcgcaggatggaggagctgggcctgcatcctgctgaccaccrggtgtactttggacagctgctaggcatgtgtgaccagatcagcttcccgctgggccaggcyggctaccccgtgtacaagtacgtgccctatggccccgtgatggaggtgctgccctacttgtcccgccgtgccctggagaacagcagcctcatgaagggcacccatcgggagcggcagytgctgtggctggagctcttgaggcggctccgaactggcaacctcttccatcgccctgcctagcacccgccagcacaccctyagcctccagcaccccccgcccccgcccaggccatcaccacagctgcagccaaccccatcctcacacagattcaccttttttcaccccacacttgcagagctgctggaggtgaggtcaggtgcctcccagccctgcccagagtatgggcactcaggtgtgggccgaacctgatacctgcctgggacagccactggaaacttttgggaactctcctcgaatgtgtgggcccaaggcccccacctctgtgacccccatgtccttggacctagaggattgtccaccttctgccaaggccagcccacacagcccgagccccttggggagcagtggccgggctggggaggcctgcctggtcaataaaccactgttcctgcagctgagagccctttgccctcacacagggtcagctctgggcaacaaagagggagtggctcagacagggtcagagaagtctcatcccagactctggcttccagcatcatctgttcctgggggccaggccctgcgcagacctggccacccagggtgctggacacccccaaccctgactccacaaggacccagcagggcccatgggcccaggccagcacggaggggactcatgcagatgcagaggccaagctccccaggtgggcctggcacgcctccccgcagggctcctcctcaggccattcctgccaccctgagtcctctaccccagtgacctgcatcaggctc

SEQ ID NO: 913 - DNA, 2207 bp, Homo sapiens
ccacaagctgtcggctcggttcggtcgcgttacagggcaggcgccggggccaaggcagggagggatcttaggagagatcgtaggacatctgaagagctgccatgtctggggcatcttcctcagaacagaacaacaacagctatgaaaccaaaaccccaaatcttcgaatgtcagagaagaaatgttcatgggcctcctacatgaccaactccccgactctgatcgttatgattggtttgccagcccggggtaaaacctacgtgtccaagaaactaacacgctacctcaactggattggagtccccaccaaagtgtttaatcttggggtgtatcggcgtgaagcagtcaagtcctataagtcctacgacttctttcggcatgacaatgaggaggccatgaagatccgcaaacagtgtgctctggtggcgctggaagatgttaaggcrtatctcactgaggagaatggtcagattgcggtgtttgatgccaccaatacaacccgggagaggagggacatgattttgaactttgctgaacagaattccttcaaggtattctttgtggaatccgtctgtgatgatcctgatgtcattgctgccaatattctggaggttaaggtatcaagccctgactatcctgaaaggaacagagagaacgtgatggaggacttcctgaagagaattgaatgctacaaagttacctaccgacctcttgacccagacaactatgacaaggatctttctttcatcaaggtgataaacgtgggccagcgatttttagtcaacagagtccaggactacatccagagcaagatagtctactacctcatgaatatccacgtccagcctcgcaccatttacctttgccggcatggagaaagcgagttcaatctcttggggaagattgggggtgactctggcctctcggtgcggggaaagcagtttgcccaagctctaaggaaatttctggaggaacaggaaataacagacctcaaagtgtggacaagccagttgaagaggaccatacagactgctgaatctctcggggtgccctatgagcagtggaagattctgaatgagattgatgctggtgtgtgtgaagagatgacctatgcagagattgagaaacggtacccagaagagtttgcacttcgagatcaagagaagtatctgtatcgatatcctggtggggagtcataccaggacctggtgcagcggctggagcctgtcatcatggagctggaacgtcagggcaatgtcctcgtcatctcccaccaggctgtcatgcgctgcctcctggcctacttcttggataagggcgcagatgagctaccatacttgagatgccctctccataccatcttcaaacttactcctgtggcctatgggtgcaaagtggaaacaattaaacttaacgtggaggctgtgaacacgcaccgtgacaagccaactgcagcagagaccacactggctgtgcgcagacgcccctccgcagcgtccctcatgttgccttgctaatgatgtggatgttcaggcctcacctctccaaacgactgggatctactgaaaagcttgggatgtcagcttcacagaggctagaacaggaagttaagtgggaactggactttgggggccaccaaaacgaggcctggagaaacgtcaccatatttcctcccctcctgcctaatgggaatatcagttacactgaaaaatttaacttccctgtgcctcaaaacatttagcaacctgaaccagtgactttttgtcatctctgtgctgagtttggtccaagttggtcaatctcattctgtataggcatttaacatcctacctgtgactgtctgcatcctttgctggctcttttttgcccaaagtgcaaatgcacttcttcagatttacttttcaagtgagaaggtaagagctggtctctgccactgttccaggcgagcaggctagagtctaatatacttatgctagcagttaccatttgccacattggaagcaagagacaaatcaccaggtgaatggagggtcttctgagaaattcagtccctaaaacatcttctctgccttgatagaagaacagtgtcagtggcaaccttttcatttagagaagtttttcttgttccaggcccttcaggacaggatctgactgcaagactccccaaaatgggtacccatcttytaagttcccttttgtagctactg

SEQ ID NO: 914 - DNA, 2156 bp, Homo sapiens
ccacaagctgtcggctcggttcggtcgcgttacagggcaggcgccggggccaaggcagggagggatcttaggagagatcgtaggacatctgaagagctgccatgtctggggcatcttcctcagaacagaacaacaacagctatgaaaccaaaaccccaaatcttcgaatgtcagagaagaaatgttcatgggcctcctacatgaccaactccccgactctgatcgttatgattggtttgccagcccggggtaaaacctacgtgtccaagaaactaacacgctacctcaactggattggagtccccaccaaagtgtttaatcttggggtgtatcggcgtgaagcagtcaagtcctataagtcctacgacttctttcggcatgacaatgaggaggccatgaagatccgcaaacagtgtgctctggtggcgctggaagatgttaaggcrtatctcactgaggagaatggtcagattgcggtgtttgatgccaccaatacaacccgggagaggagggacatgattttgaactttgctgaacagaattccttcaaggtattctttgtggaatccgtctgtgatgatcctgatgtcattgctgccaatattctggaggttaaggtatcaagccctgactatcctgaaaggaacagagagaacgtgatggaggacttcctgaagagaattgaatgctacaaagttacctaccgacctcttgacccagacaactatgacaaggatctttctttcatcaaggtgataaacgtgggccagcgatttttagtcaacagagtccaggactacatccagagcaagatagtctactacctcatgaatatccacgtccagcctcgcaccatttacctttgccggcatggagaaagcgagttcaatctcttggggaagattgggggtgactctggcctctcggtgcggggaaagcagtttgcccaagctctaaggaaatttctggaggaacaggaaataacagacctcaaagtgtggacaagccagttgaagaggaccatacagactgctgaatctctcggggtgccctatgagcagtggaagattctgaatgagattgatgctggtgtgtgtgaagagatgacctatgcagagattgagaaacggtacccagaagagtttgcacttcgagatcaagagaagtatctgtatcgatatcctggtggggagtcataccaggacctggtgcagcggctggagcctgtcatcatggagctggaacgtcagggcaatgtcctcgtcatctcccaccaggctgtcatgcgctgcctcctggcctacttcttggataagggcgcagatgagctaccatacttgagatgccctctccataccatcttcaaacttactcctgtggcctatgggtgcaaagtggaaacaattaaacttaacgtggaggctgtgaacacgcaccgtgacaagccaactaacaacttccccaagaaccaaacccctgtaaggatgagaaggaacagctttacgcctctgtccagttcgaatacaataaggcgtccaagaaattacagtgttgggagccggcccctcaagcccctcagccctctccgtgcccaggacatgcaagaaggggccgactagccgaagacccaagtcagcattccggtggtgtaactgtgtgtttccctccagccctggcctcctgcccttgtcactaatcaccaaggagtcattaacttcctccctctatgcccacccctgacacttcaccattwatcttaacacagaacatgaggttatgtttagcaaattgagtcttttaggacagattctcagatgggatgatctggaggaggaggaaaaagatacrctcccttggggctgagcatgccccacactcttggatcttctctctgttccctggtgtcttcactaatgtcctcatgttggtgaagtgttgggggatggagggcgggtgagcagtcgggggacaaaaagtctatttttccttcacttttgtctcttcaatgtgtgttttcctcacactccttacttgactgctttcttcccccactttcatgtcccctctggattgtccagtgtaatgcatggcattgtggtgtctgtctaggaaggaaggggtgattgacaagagacaagtctggcccagttaatgct

SEQ ID NO: 915 - DNA, 791 bp, Homo sapiens
gcaccctacagatgcgggtctccgcccagccgcggtcacctggggggctgggggcggggcctgggcggggcggggttcggccgggagcgcaggggcggcagtgcgcgcctagcagtgtcccagccgggttcgtgtcgccatggggyagatcgagtgggccatgtgggccaacgaacaggcgctggcgtccggcctgatcctcatcaccgggggcatcgtggccrcagctgggcgcttcacccagtggtactttggtgcctactccattgtggcgggcgtgtttgtgtgcctgctggagtacccccgggggaagaggamgaagggctccaccatggagcgctggggacagaagyacatgaccgccgtggtgaagctsttcgggccctttaccaggaattactatgttyrggccgtcctgcrtctcctgctctcggtgcccgccggcttcctgctggccaccatccttgggaccgcctgcctggccattgcgagmggcatctacctactggyggctgtgcgtggcgagcagtggacgcccatcgagcccaagccccgggagcggccgcagatcggaggcaccatcaagcagccgcccagcaacccccmgccgcggcccccggccgaggcccgcaagaagcccagcgaggaggaggctgcggyggcggcggggggacccccgggaggtccccaggtcaaccccatcccggtgaccgacgaggtcgtgtgacctcgccccggacctgccctcccgccaggtgcacccacctgcaataaatgcagcgaagccggga

SEQ ID NO: 916 - DNA, 3102 bp, Homo sapiens
gcaccctacagatgcgggtctccgcccagccgcggtcacctggggggctgggggcggggcctgggcggggcggggttcggccgggagcgcaggggcggcagtgcgcgcctagcagtgtcccagccgggttcgtgtcgccatggggyagatcgagtgggccatgtgggccaacgaacaggcgctggcgtccggcctgatcctcatcaccgggggcatcgtggccrcagctgggcgcttcacccagtggtactttggtgcctactccattgtggcgggcgtgtttgtgtgcctgctggagtacccccgggggaagaggamgaagggctccaccatggagcgctggggacagaagyacatgaccgccgtggtgaagctsttcgggccctttaccaggaattactatgttyrggccgtcctgcrtctcctgctctcggtgcccgccggcttcctgctggccaccatccttgggaccgcctgcctggccattgcgagmggcatctacctactggtgagtggcgccctctgaggtcggccccggccacccccatccccagcccctgccctgacaccctcggacacgcatggcccttgaagccggctctgtaggctgagccaaggctgggagcaagtgtgagcctgggcgtgtgctcacagcacggcggggacgcagcggttgctgctgccatttttggcgtgtctagtgtgtcgggtcatttccttgcatttcctcattaacccgcaccacagccctgggaggggtactggggtccccactttacagacaaagatgcggaggctcagggaggtgctgtgactggcctggggtcacgcagccggccgaagaccgtgcctgcgcttgggtcccattatcaggcttttctcacctaaaccctattcgcgctgattcatgggcggtgccaggacgcagacattttcttaaactgccgacacctgcgtttggtttatgactgctgcaccctgttagaaggctgcccatcccatgggatacagtgatctctctgagaggccagggatgggtgggaggacagggcgcagcctggccaggccttgggtgaaatgccctctgcctgccctgggctccggaacagacggctgcaggccacctctcactgcgggggtctctgggtggacagagccctcagactttgcttatttaaatccttttgtccatagagccaagtccctcctgccmgcagaggcaactgccctccccttgctgtgcgtcttctagtgtgtgtgcgtgggaaaggtgcagcactttctgtgtacgccttccgcgtatggaagtggagttctgtttcaagcctcactgacctgccaccggcagaactctcctttagaaccccttcctgttgccaagtgctcatctgggctgttgctttgttttccgggggccacccgcatcccccccgtctccctgctgccacgcacagctagtggctcctggagacctcgggaggaattccttgtgctaaacccagagaggaattgctgggtcaggcatcagcctctgcaccgttcaccctgccgggctcagctgctccccagcagacaacccaccaccagccatgtggccccatctctcccaccatgcactaggctttctcccacgcttgccagtttcacagcacgagctggccgtgtggagcttggactcgcccttctctgactgtggatttgagctgttggagtttcttctcccttgagttgcctgttcaaatcctttgcccatttttctattgtggtttttgtatttttctttttcttcttttttttttgagatggagtctcgcgccatcgcccaggctggagtgcagtggcgtgatctcggctcactgcaaccttcgcctcctgggttcaagcaattctcctgcctcagcctcccgagtagctgggactacaggcacgtgccaccatgcctggctaatttttggtatttttagtagagacggggtttcaccgcgttagccaggatggtctggatctccttgaccttgtgatccgcccgcctcggcctcccaaagtgctgggattacaggcgtgagccaccgcgcccggcctgattgtctttttcttaagttgcaggaagtccacatatattttagctatttagcctttgtaamctttaracactggggatgccttcatgctttctggtgagggtctgttaacttggcscgtggagtccttcactgcacggaagagcagaggtttccctgttcacctgctctatggtctgtgctttgtgaaaacacctttccctggccctgggtcctgccttcacgttcctgccttttcttctatcagccttctagttttgcttttcagaatggaatgtttccgttttggagtcaggtaggatcacacatgtccagtttctctttctgttcatgacgtatatgatgtgacatatttttccaccagatattatgggatagaagatgaaaagcacacactcccaggtccacttgacctgttgcagtggaacctccgggcatgggcccaggagtctgtatttttagtaaaagccagtggaatcccgtggtcttcaagctctccccccaccacccccatgtgcagaaatgcctgggcacccttggggggctgccggccagcgtgggtgaatggcgcccaccagacggagcagggcctgctactctcctgggccacccctcctgctggacctcgggcctgcctccctgccttccctgcccttggcaccttgagaggagaatttgagtactagaatttgcatctgggagtgtccaccacgggatcttccagaagcccaggggttcgggccccactcctggcatgaagaaatagcttgggctggtgtcaggccgacccaggtcctggctgtgtggcctcgggcgcgtcacttaacctctctgagtggcagtcacaccatcctgcgtgggattcagacttgagcctgtcccagggcccctagcggggtgggcctccggggagggagggagggagggagggcgggcgctggggcgcggctcaacccttcagtgccccgcaggyggctgtgcgtggcgagcagtggacgcccatcgagcccaagccccggga

SEQ ID NO: 917 - DNA, 2079 bp, Homo sapiens
gcaccctacagatgcgggtctccgcccagccgcggtcacctggggggctgggggcggggcctgggcggggcggggttcggccgggagcgcaggggcggcagtgcgcgcctagcagtgtcccagccgggttcgtgtcgccatggggyagatcgagtgggccatgtgggccaacgaacaggcgctggcgtccggcctgatcctcatcaccgggggcatcgtggccrcagctgggcgcttcacccagtggtactttggtgcctactccattgtggcgggcgtgtttgtgtgcctgctggagtacccccgggggaagaggamgaagggctccaccatggagcgctggtgagtcycctcctgctctgggktctctccgggggytgcggggcccaggcagggctcacagggttgggtggagcttggtttctcacttggaggctccggaaccaaccctttggtgcttgtgggtaaaccaaggccggtgcctgcccggtgtgttttgtgggaggaaagaggcctgggtgccctggggtggtcagcagggcagcaaaggagtcccgagtgggagaggcccagccgcgccgtctcgccttcctccctcccccaggggacagaagyacatgaccgccgtggtgaagctsttcgggccctttaccaggaattactatgttyrggccgtcctgcrtctcctgtgagtccccgtcccgcaccccctctagggctcaggagggcttggagccgaccctccccactgtcccaccggccgggctgcctggacaggagccacccccacttacctcagtgtttttccaaacaaaaattcgggtccctggctctggcagggcctgtgtctgctgtctagygtgcaggatttgtaaggatccactccaaatccgaggagctccgatccgtcgccagggtctggggtcagcatgcactgctggggggtcttgcctgggcttcctggtagggtggagggttccgtgctgtgtgtctgctggttactgccggctgaggccaggacacccacacgtggctgcttcctcygagcaagtgcaccagagccgctagygkccacatcaaggcygagaacacccaggaccgaaacaagccccggtccgcrcacgtcccctgggtctgcagtctgccttgtcctgagactttgtggccttggcccccagacctggggctccgttcccctttctgagtgcccttctgtgtccctgcctctcacccgctgtcccccaggctctcggtgcccgccggcttcctgctggccaccatccttgggaccgcctgcctggccattgcgagmggcatctacctactggtgagtggcgccctctgaggtcggccccggccacccccatccccagcccctgccctgacaccctcggacacgcatggcccttgaagccggctctgtaggctgagccaaggctgggagcaagtgtgagcctgggcgtgtgctcacagcacggcggggacgcagcggttgctgctgccatttttggcgtgtctagtgtgtcgggtcatttccttgcatttcctcattaacccgcaccacagccctgggaggggtactggggtccccactttacagacaaagatgcggaggctcagggaggtgctgtgactggcctggggtcacgcagccggccgaagaccgtgcctgcgcttgggtcccattatcaggcttttctcacctaaaccctattcgcgcttgagaggagaatttgagtactagaatttgcatctgggagtgtccaccacgggatcttccagaagcccaggggttcgggccccactcctggcatgaagaaatagcttgggctggtgtcaggccgacccaggtcctggctgtgtggcctcgggcgcgtcacttaacctctctgagtggcagtcacaccatcctgcgtgggattcagacttgagcctgtcccagggcccctagcggggtgggcctccggggagggagggagggagggagggcgggcgctggggcgcggctcaacccttcagtgccccgcaggyggctgtgcgtggcgagcagtggacgcccatcgagcccaagccccggga

SEQ ID NO: 918 - DNA, 1315 bp, Homo sapiens
gttcttcgtatggtgcgctccgctggatcacgtgagccagttccaaaatggcggcaggggtggccgggtggggggttgaggcagaggagttygaagatgctcctgatgtggagccgctggagcctacacttagcaacatcatcgagcagcgcagcctgaagtggatcttcgtcgggggcaagggtggtgtgggcaagaccacctgcagctgcagcctggcagtccagctctccaaggggcgtgagagtgttctgatcatctccacagacccagcacacaacatctcagatgcttttgaccagaagttctcaaaggtgcctaccamgktcaaaggctatgacaacctctttgctatggagattgaccccagcctgggcgtggcggagctgcctgacgagttcttcgaggaggacaacatgctgagcatgggcaagaagatgatgcaggaggccatgagcgcatttcccggcatcgatgaggccatgagctatgccgaggtcatgaggctggtgaagggcatgaacttctcggtggtggtatttgacacggcacccacgggccacaccctgaggctgctcaacttccccaccatcgtggagcggggcctgggccggcttatgcagatcaagaaccagatcagccctttcatctcacagatgtgcaacatgctgggcctgggggacatgaacgcagaccagctggcctccaagctggaggagacgctgcccgtcatccgctcagtcagcgaacagttcaaggaccctgagcagacaactttcatctgcgtatgcattgctgagttcctgtccctgtatgagacagagaggctgatccaggagctggccaagtgcaagattgacacacacaatataattgtcaaccagctcgtcttccccgaccccgagaagccctgcaaratgtgtgaggcccgtcacaagatccaggccaagtatctggaccagatggaggacctgtatgaagacttccacatcgtgaagctgccgctgttaccccatgaggtgcggggggcagacaaggtcaacaccttctcggccctcctcctggagccctacaagccccccagtgcccagtagcacagctgccagccccaaccgctgccatttcacactcaccytccaccctccccaccccctcggggcagagtttgcacaaagtcccccccataatacagggggagccacttgggcaggaggcagggaggggtccattccccctggtggggctggtgrggagctgtagttgccccctacctmtcccacctcttgctcttcaataaaatgatcttaaactgctg

SEQ ID NO: 919 - DNA, 1351 bp, Homo sapiens
aaagggcatggactgggtgtttggctggttgctaaggttcttcgtatggtgcgctccgctggatcacgtgagccagttccaaaatggcggcaggggtggccgggtggggggttgaggcagaggagttygaagatgctcctgatgtggagccgctggagcctacacttagcaacatcatcgagcagcgcagcctgaagtggatcttcgtcgggggcaagggtggtgtgggcaagaccacctgcagctgcagcctggcagtccagctctccaaggggcgtgagagtgttctgatcatctccacagacccagcacacaacatctcagatgcttttgaccagaagttctcaaaggtgcctaccamgktcaaaggctatgacaacctctttgctatggagattgaccccagcctgggcgtggcggagctgcctgacgagttcttcgaggaggacaacatgctgagcatgggcaagaagatgatgcaggaggccatgagcgcatttcccggcatcgatgaggccatgagctatgccgaggtcatgaggctggtgaagggcatgaacttctcggtggtggtatttgacacggcacccacgggccacaccctgaggctgctcaacttccccaccatcgtggagcggggcctgggccggcttatgcagatcaagaaccagatcagccctttcatctcacagatgtgcaacatgctgggcctgggggacatgaacgcagaccagctggcctccaagctggaggagacgctgcccgtcatccgctcagtcagcgaacagttcaaggaccctgagcagacaactttcatctgcgtatgcattgctgagttcctgtccctgtatgagacagagaggctgatccaggagctggccaagtgcaagattgacacacacaatataattgtcaaccagctcgtcttccccgaccccgagaagccctgcaaratgtgtgaggcccgtcacaagatccaggccaagtatctggaccagatggaggacctgtatgaagacttccacatcgtgaagctgccgctgttaccccatgaggtgcggggggcagacaaggtcaacaccttctcggccctcctcctggagccctacaagccccccagtgcccagtagcacagctgccagccccaaccgctgccatttcacactcaccytccaccctccccaccccctcggggcagagtttgcacaaagtcccccccataatacagggggagccacttgggcaggaggcagggaggggtccattccccctggtggggctggtgrggagctgtagttgccccctacctmtcccacctcttgctcttcaataaaatgatcttaaactgctw

SEQ ID NO: 920 - DNA, 1867 bp, Homo sapiens
ggtcaaaggcctgcgtcagttgcactgtagcctcggcagtgaaccgggaggtactaccaggtcgccgtcgttgctccgctcgctctgagagagcatggccctgagaggcgtctccgtgcggctgctgagccgcgracccggcctgcacgtccttcgcacgtgggtctcgtcggcggcgcagaccgagaaaggcgggagaacacagagccaactggctaagtcctcgcgtcccgagtttgactggcaggacccgctggtgctggaggagcagctgaccacagatgagatcctcatcagggacacctyccgcacctactgcyaggagagactcatgcctcgcatcctgttggccaatygcaacraagtttttcatckggagatcatttcggagatgggggagttgggtgtgctgggccccaccatcaaaggayatggctrtgctggggtttygtctgtggcctatgggctcctggccbragagctggagcrgrtggacagtggctacrrgtyggcgatgagtgtccagtcctccctcrtcatgcaccctatctatgccyatggcagcgaggaacagcggcagaagtacctgccccagctggccaagggggagctcctgggcygcttcgggctcacagagcccaacagcgsaagtgaccccagcagcayggagaccagarcccactacaactcatccaacaagagctacaccctcaatgggaccaagacctggatcacgaactcgcytatgrccgatctgtttgtagtgtgggctcsgtgtgaagatggctgcattcggggcytcctgcyggagaaggggatgcggggtctctcggcccycaggatccagggcaagttctygctgyrggccycagccacaggcatgatcatcrtggacggtgtggaggtgccagaggagaatgtgctcyctggtgcatccagccyggggggtcccttcggctgcctgaacaacgcccggtacggcatcgcgtggggcgtgcttggarcttyggagttctgcttgcacacagccyrgcagtacgmcctcgacaggatgcagtttggtgtcccactggccaggaaccagctgattsagaagaagctggcagacrtgctcactgagattaccctgggccttcacgcctgcctgcagctcggcyrcttgaaggaccaggacaaggctgcccccragatggtttctctgctgaagaggaataactgtgggaaagccctggacatcrccyrccaggycbragacatgctgsbgggkratgggatttctgacgagtatcacrtgatcyrgcacgccatgaacctggaggccgtgaacacctamraaggtayacatgacattcacrycctgatccttgggagagctatcaygggaatccagghgttcacggccagcaagtgagccgctccatcaggggcccgaaactctcaagcccctttctggagagatgcctggctggaccgtaggagcgctgtgctctgagcttagaaagggaggtggcggatggagtgggaagtgagagacactgatttttaaatatcaaaatttcccttctgaagtcgttcrgatgtgttccttaaaaagaagatggaattctctgtagagcgtctcaatccacttttaaccatggatgagagcagactccatttaccctgaaatagcagcttctcttgagaggagagtgacatkgaagcaactccgtctgctgcagctgaccccctcacactgagttcacagtgcgccctccctccctcccatctgggggtagtgccttatgctgggtgttggagcagagtgagggagaggaaaataaagacctgcacatctgaccccaaggtgtcaggccggtttactggt

SEQ ID NO: 921 - DNA, 1897 bp, Homo sapiens
gtgaaccgggaggtactaccaggtaaggaaggtgcggtrgccccagccgtgggtgagaggagctccgctctgacacccccgctcctgtaggtcgccgtcgttgctccgctcgctctgagagagcatggccctgagaggcgtctccgtgcggctgctgagccgcgracccggcctgcacgtccttcgcacgtgggtctcgtcggcggcgcagaccgagaaaggcgggagaacacagagccaactggctaagtcctcgcgtcccgagtttgactggcaggacccgctggtgctggaggagcagctgaccacagatgagatcctcatcagggacacctyccgcacctactgcyaggagagactcatgcctcgcatcctgttggccaatygcaacraagtttttcatckggagatcatttcggagatgggggagttgggtgtgctgggccccaccatcaaaggayatggctrtgctggggtttygtctgtggcctatgggctcctggccbragagctggagcrgrtggacagtggctacrrgtyggcgatgagtgtccagtcctccctcrtcatgcaccctatctatgccyatggcagcgaggaacagcggcagaagtacctgccccagctggccaagggggagctcctgggcygcttcgggctcacagagcccaacagcgsaagtgaccccagcagcayggagaccagarcccactacaactcatccaacaagagctacaccctcaatgggaccaagacctggatcacgaactcgcytatgrccgatctgtttgtagtgtgggctcsgtgtgaagatggctgcattcggggcytcctgcyggagaaggggatgcggggtctctcggcccycaggatccagggcaagttctygctgyrggccycagccacaggcatgatcatcrtggacggtgtggaggtgccagaggagaatgtgctcyctggtgcatccagccyggggggtcccttcggctgcctgaacaacgcccggtacggcatcgcgtggggcgtgcttggarcttyggagttctgcttgcacacagccyrgcagtacgmcctcgacaggatgcagtttggtgtcccactggccaggaaccagctgattsagaagaagctggcagacrtgctcactgagattaccctgggccttcacgcctgcctgcagctcggcyrcttgaaggaccaggacaaggctgcccccragatggtttctctgctgaagaggaataactgtgggaaagccctggacatcrccyrccaggycbragacatgctgsbgggkratgggatttctgacgagtatcacrtgatcyrgcacgccatgaacctggaggccgtgaacacctamraaggtayacatgacattcacrycctgatccttgggagagctatcaygggaatccagghgttcacggccagcaagtgagccgctccatcaggggcccgaaactctcaagcccctttctggagagatgcctggctggaccgtaggagcgctgtgctctgagcttagaaagggaggtggcggatggagtgggaagtgagagacactgatttttaaatatcaaaatttcccttctgaagtcgttcrgatgtgttccttaaaaagaagatggaattctctgtagagcgtctcaatccacttttaaccatggatgagagcagactccatttaccctgaaatagcagcttctcttgagaggagagtgacatkgaagcaactccgtctgctgcagctgaccccctcacactgagttcacagtgcgccctccctccctcccatctgggggtagtgccttatgctgggtgttggagcagagtgagggagaggaaaataaagacctgcacatctgaccccaaggtgtcaggccggtttactggt

SEQ ID NO: 922 - DNA, 1408 bp, Homo sapiens
gtgaaccgggaggtactaccaggtaaggaaggtgcggtrgccccagccgtgggtgagaggagctccgctctgacacccccgctcctgtaggtcgccgtcgttgctccgctcgctctgagagagcatggccctgagaggcgtctccgtgcggctgctgagccgcgracccggcctgcacgtccttcgcacgtgggtctcgtcggcggcgcagaccgagaaaggcgggagaacacagagccaactggctaagtcctcgcgtcccgagtttgactggcaggacccgctggtgctggaggagcagctgaccacagatgagatcctcatcagggacacctyccgcacctactgcyaggagagactcatgcctcgcatcctgttggccaatygcaacraagtttttcatckggagatcatttcggagatgggggagttgggtgtgctgggccccaccatcaaaggayatggctrtgctggggtttygtctgtggcctatgggctcctggccbragagctggagcrgrtggacagtggctacrrgtyggcgatgagtgtccagtcctccctcrtcatgcaccctatctatgccyatggcagcgaggaacagcggcagaagtacctgccccagctggccaagggggagctcctgggcygcttcgggctcacagagcccaacagcgsaagtgaccccagcagcayggagaccagarcccactacaactcatccaacaagagctacaccctcaatgggaccaagacctggatcacgaactcgcytatgrccgatctgtttgtagtgtgggctcsgtgtgaagatggctgcattcggggcytcctgcyggagaaggggatgcggggtctctcggcccycaggatccagggcaagttctygctgyrggccycagccacaggcatgatcatcrtggacggtgtggaggtgccagaggagaatgtgctcyctggtgcatccagccyggggggtcccttcggctgcctgaacaacgcccggtacggcatcgcgtggggcgtgcttggarcttyggagttctgcttgcacacagccyrgcagtacgmcctcgacaggatgcagtttggtgtcccactggccaggaaccagctgattsagaagaagctggcagacrtgctcactgagattaccctgggccttcacgcctgcctgcagctcggcyrcttgaaggaccaggacaaggctgcccccragatggtttctctgctgaagaggaataactgtgggaaagccctggacatcrccyrccaggycbragacatgctgsbgggkratgggatttctgacgagtatcacrtgatcyrgcacgccatgaacctggaggccgtgaacacctamraagtcgttcrgatgtgttccttaaaaagaagatggaattctctg

SEQ ID NO: 923 - DNA, 1841 bp, Homo sapiens
cactccggttccggttccggtggctcagctccccccgcccaccckggcccggacacgctgagcacactggaaggagtcatggcggatggtcaggtggcggaactgctgctccggcggctggaggcgtctgatggcggcctggacagcgccgagttggcggctgagctgggcatggagcaccaggcggtggtgggcgccgtgaagagccttcaggcgctgggcgaggtcatcgaggctgaacttcggtccaccaagcactgggagcttactgcggagggcgaggagattgcccgggagggcagccatgaggcccgtgtgtttcgaagcattcccccagagggcctggyccagagcgagcttatgcgactgcccagtggcaaagtgggcttcagcaaggccatgtccaacaagtggattcgggtggacagcatggaggatgaggtgmagcggcggctccagctggtccgggggggacaggctgagaagctgggggagaaggagaggagcgagctgaggaagagraagctgttggctgaagtgactctgaagacctactgggtgagcaaaggcagtgcctttagtaccagcatctccaagcaagagacagagctgagcccagagatgatctccagtggctcttggcgggaccggcccttcaagccctacaacttcttggcccacggtgtcctccccgacagcggccaccttcacccgctgctcaaggtccgctcccagttccgacagatcttcctggagatggggttcaccgagatgccgactgataacttcattgagagctccttctggaactttgacgccctcttccagccccagcagcacccagcccgtgaccagcacgacaccttcttccttcgagatccagcggaggccctgcagctcccaatggactatgtccagcgggtcaagcggacccactctcagggcggctacggctcacaggggtacaagtataactggaagctggacgaggcccggaaaaacctactgcgaacccacaccacatcagccagcgcccgtgcgctctaccgccttgcccrgaagaagcccttcactccggtcaagtacttctccatcgaccgcgtattccggaatgagaccctggacgccacgcacctggctgagttccaccagatcgagggcgtggtggcggatcatggtctcaccttgggccacctcatgggcgttctgcgggagttcttcaccaagctgggtatcacgcaactccgcttcaagccagcctacaacccatacacagagcccagcatggaggtgttcagctaccaccaaggcctgaagaagtgggtggaggtcggaaactcgggggtcttccgtccagagatgctgctgcccatggggcttccygagaacgtgtcggtcattgcctggggcctctccctggagcgcccaacgatgatcaaatatggcatcaacaatatccgggagctggtgggccacaaggtgaacctgcagatggtgtatgacagtcccctgtgccgcctggatgccgagccgaggccccctcccacacaggaggctgcgtgacatgggccactctaggacaggtcatcctccccgagtccctgctgctgygctcctttgcatccctggccagtgaccttgtatttatgaggcctctgtgaggccagcccccaccttcctctttcccacctgtcccaggaccagaatcccagggacagaggactgggtagcaggttccttctgttgtcctgtgtggtgtgtctactgtgagggtgggccctgaggagacctgtgggccacctattgtctaataaagtgggcagttgcccccatctggtggc

SEQ ID NO: 924 - DNA, 1883 bp, Homo sapiens
cactccggttccggttccggtggctcagctccccccgcccaccckggcccggacacgctgagcacactggaaggagtcatggcggatggtcaggtggcggaactgctgctccggcggctggaggcgtctgatggcggcctggacagcgccgagttggcggctgagctgggcatggagcaccaggcggtggtgggcgccgtgaagagccttcaggcgctgggcgaggtcatcgaggctgaacttcggtccaccaagcactgggagcttactgcggagggcgaggagattgcccgggagggcagccatgaggcccgtgtgtttcgaagcattcccccagagggcctggyccagagcgagcttatgcgactgcccagtggcaaagtgggcttcagcaaggccatgtccaacaagtggattcgggtggacaagagtgcggctgacgggccccgggtgttccgagtggtggacagcatggaggatgaggtgmagcggcggctccagctggtccgggggggacaggctgagaagctgggggagaaggagaggagcgagctgaggaagagraagctgttggctgaagtgactctgaagacctactgggtgagcaaaggcagtgcctttagtaccagcatctccaagcaagagacagagctgagcccagagatgatctccagtggctcttggcgggaccggcccttcaagccctacaacttcttggcccacggtgtcctccccgacagcggccaccttcacccgctgctcaaggtccgctcccagttccgacagatcttcctggagatggggttcaccgagatgccgactgataacttcattgagagctccttctggaactttgacgccctcttccagccccagcagcacccagcccgtgaccagcacgacaccttcttccttcgagatccagcggaggccctgcagctcccaatggactatgtccagcgggtcaagcggacccactctcagggcggctacggctcacaggggtacaagtataactggaagctggacgaggcccggaaaaacctactgcgaacccacaccacatcagccagcgcccgtgcgctctaccgccttgcccrgaagaagcccttcactccggtcaagtacttctccatcgaccgcgtattccggaatgagaccctggacgccacgcacctggctgagttccaccagatcgagggcgtggtggcggatcatggtctcaccttgggccacctcatgggcgttctgcgggagttcttcaccaagctgggtatcacgcaactccgcttcaagccagcctacaacccatacacagagcccagcatggaggtgttcagctaccaccaaggcctgaagaagtgggtggaggtcggaaactcgggggtcttccgtccagagatgctgctgcccatggggcttccygagaacgtgtcggtcattgcctggggcctctccctggagcgcccaacgatgatcaaatatggcatcaacaatatccgggagctggtgggccacaaggtgaacctgcagatggtgtatgacagtcccctgtgccgcctggatgccgagccgaggccccctcccacacaggaggctgcgtgacatgggccactctaggacaggtcatcctccccgagtccctgctgctgygctcctttgcatccctggccagtgaccttgtatttatgaggcctctgtgaggccagcccccaccttcctctttcccacctgtcccaggaccagaatcccagggacagaggactgggtagcaggttccttctgttgtcctgtgtggtgtgtctactgtgagggtgggccctgaggagacctgtgggccacctattgtctaataaagtgggcagttgcccccatctggtggc

SEQ ID NO: 925 - DNA, 1270 bp, Homo sapiens
tgatgtccccgccccggttcccaggcaagtttagggaagtgaaaggcgccaggtgmcagtcctggcctctgatgtaacccagcgccccgcagtcccgacacagattcctggatctcagccccatagcagctatgatcccgctgctgctggcagcgctgctgtgcgtccccgccggggccctgacctgctacggggactccgggcagcctgtagactggttcgtggtctacaagctgccagctcttakagggtccggggaggcggcgcagagagggctgcagtacaagtatctggacgagagctccggaggctggcgggacggcagggcactcatcaacagcccggagggggccgtgggccgaagcctgcagccgctgtaccggagcaacaccagccagctcgccttcctgctctacaatgaccaaccgcctcaacccagcaaggctcaggactcttccatgcgtgggcacacgaagggtgtcctgctccttgaccacgatgggggcttctggctggtccacagtgtacctaacttccctccaccggcctcctctgctgcatacagytggcctcatagcgcctgtacctacgggcagaccctgctctgcaagcagctgacctacacctacccctgggtctataactaccagctggaagggatctttgcccaggaattccccgacttggagaatgtggtcaagggccaccacgttagccaagaaccctggaacagcagcatcacactcacatcccaggccggggctgttttccagagctttgccaagttcagcaaatttggagatgacctgtactccggctggttggcagcagcccttggtaccaacctgcaggtccagttctggcacaaaactgtaggcatcctgccctctaactgctcggatatctggcaggttctgaatgtgaaccagatagctttccctggaccagccggcccaagcttcaacagcacagaggaccactccaaatggtgcrtgtccccaaaagggccctggacctgcgtgggtgacatgaatckgaaccagggagaggagcaacggggtgggggcacactgtgtgcccagctgccagccctctggaaagccttcyagccgctggtgaagaactaccagccctgtaatggcatggccaggaagcccagcagagcttataagatctaacccttatggccagtgcagtggctcacatctgtaaccccagcactttgggaggctgagatgggcakatcacttgaggtcaggagttcgagacc

SEQ ID NO: 926 - DNA, 1995 bp, Homo sapiens
tgatgtccccgccccggttcccaggcaagtttagggaagtgaaaggcgccaggtgmcagtcctggcctctgatgtaacccagcgccccgcagtcccgacacagattcctggatctcagccccatagcagctatgatcccgctgctgctggcagcgctgctgtgcgtccccgccggggccctgacctgctacggggactccgggcagcctgtagactggttcgtggtctacaagctgccagctcttakagggtccggggaggcggcgcagagagggctgcagtacaagtatctggacgagagctccggaggctggcgggacggcagggcactcatcaacagcccggagggggccgtgggccgaagcctgcagccgctgtaccggagcaacaccagccagctcgccttcctgctctacaatgaccaaccgcctcaacccagcaaggctcaggactcttccatgcgtgggcacacgaagggtgtcctgctccttgaccacgatgggggcttctggctggtccacagtgtacctaacttccctccaccggcctcctctgctgcatacagytggcctcatagcgcctgtacctacgggcagaccctgctctgtgtgtcttttcccttcgctcagttctcgaagatgggcaagcagctgacctacacctacccctgggtctataactaccagctggaagggatctttgcccaggaattccccgacttggagaatgtggtcaagggccaccacgttagccaagaaccctggaacagcagcatcacactcacatcccaggccggggctgttttccagagctttgccaagttcagcaaatttggagatgacctgtactccggctggttggcagcagcccttggtaccaacctgcaggtccagttctggcacaaaactgtaggcatcctgccctctaactgctcggatatctggcaggttctgaatgtgaaccagatagctttccctggaccagccggcccaagcttcaacagcacagaggaccactccaaatggtgcrtgtccccaaaagggccctggacctgcgtgggtgacatgaatckgaaccagggagaggagcaacggggtgggggcacactgtgtgcccagctgccagccctctggaaagccttcyagccgctggtgaagaactaccagccctgtaatggcatggccaggaagcccagcagagcttataagatctaacccttatggccaggtgcagtggctcacgtatgtaatcccagcactttgggaagccaaggagggaggatcacttgaactcaggaattcgagaccagcctgggctacatagtgagaccacrtctctactagaacttaaaaaaagttagccaggcacggtgataaatgcctgtagtcccagccactgaagccagaggatcgattgaaccagggagatcatggtcacagtgaactatgattacgccaacctgggtcacatagcaagactctgtttcaaaaaaaaaggkggggcgggggacgggtgggtgcagtggctcacatctgtaaccccagcactttgggaggctgagatgggcakatcacttgaggtcaggagttcgagaccagcctggccaacatggtgaaaccccatatccattaaaaatatttaaaaattagccagacatggtggcacgcgtctgtggtcctagctcctcgggaggctgaggcaggagaatcgcttgaactcgggaggcagaggttgtcatgagctgagctaacaccacggcacttcagcctgggtgacagaatgagactctgtgtcaaaaaaataaaaaataaaaaatctaagggctcaggaaccagtttggacttgattttgaatcccagttcatccccttcctagctgtatgaccttgattgtgtgccttaaccgctctgtgacacagtctacctgtctgcaaaatgggaaacataatacctgccatcaggattgttgaggagtaaataaatggaaattggtgga

SEQ ID NO: 927 - DNA, 1306 bp, Homo sapiens
tgatgtccccgccccggttcccaggcaagtttagggaagtgaaaggcgccaggtgmcagtcctggcctctgatgtaacccagcgccccgcagtcccgacacagattcctggatctcagccccatagcagctatgatcccgctgctgctggcagcgctgctgtgcgtccccgccggggccctgacctgctacggggactccgggcagcctgtagactggttcgtggtctacaagctgccagctcttakagggtccggggaggcggcgcagagagggctgcagtacaagtatctggacgagagctccggaggctggcgggacggcagggcactcatcaacagcccggagggggccgtgggccgaagcctgcagccgctgtaccggagcaacaccagccagctcgccttcctgctctacaatgaccaaccgcctcaacccagcaaggctcaggactcttccatgcgtgggcacacgaagggtgtcctgctccttgaccacgatgggggcttctggctggtccacagtgtacctaacttccctccaccggcctcctctgctgcatacagytggcctcatagcgcctgtacctacgggcagaccctgctctgtgtgtcttttcccttcgctcagttctcgaagatgggcaagcagctgacctacacctacccctgggtctataactaccagctggaagggatctttgcccaggaattccccgacttggagaatgtggtcaagggccaccacgttagccaagaaccctggaacagcagcatcacactcacatcccaggccggggctgttttccagagctttgccaagttcagcaaatttggagatgacctgtactccggctggttggcagcagcccttggtaccaacctgcaggtccagttctggcacaaaactgtaggcatcctgccctctaactgctcggatatctggcaggttctgaatgtgaaccagatagctttccctggaccagccggcccaagcttcaacagcacagaggaccactccaaatggtgcrtgtccccaaaagggccctggacctgcgtgggtgacatgaatckgaaccagggagaggagcaacggggtgggggcacactgtgtgcccagctgccagccctctggaaagccttcyagccgctggtgaagaactaccagccctgtaatggcatggccaggaagcccagcagagcttataagatctaacccttatggccagtgcagtggctcacatctgtaaccccagcactttgggaggctgagatgggcakatcacttgaggtcaggagttcgagacc

SEQ ID NO: 928 - DNA, 1666 bp, Homo sapiens
cacgctccccygcacctgcgggcgcagtggacccgaccgctccgctcgtccgctccctcccccgcgccgtgcacgtcttggttcgggccgggcataaaaggcttcgcggcccagggctcacttggcgctgagaacgcgggtccacgcgtgtgatcgtccgtgcgtctagcctttgcccacgcagctttcagtcatggcctccggtaacgcgcgcatcggaaagccagcccctgacttcaagkccacagcggtggttgatggcgccttcaaagaggtgaagctgtcggactacaaagggaagtacgtggtcctctttttctaccctctggacttcacttttgtgtgccccaccgagatcatcgcgttcagcaaccgtgcagaggacttccgcaagctgggctgtgaagtgctgggcgtctcggtggactctcagttcacccacctggcttggtatgagcaggggccaaagagggaggttgcagctaagctcacaccctcaggtcctagcagtgtggcttcgtggccattgctcaacctctggaacctgcgtttccccatcgtgaaaataatggaaacattgccgcccaagtctttaaggatgatgacagtaattagcatttgacaactagttgcctggtatatagagttgcagatgcaactcagakgcaactctatctactctatgtacttagttcccaggagggaggctgtgctgccctatttcatgaagatggaaactccagttcaccgaagtgaagggctgtaccccatgacacagctagaggaggatggggactcttaacacaggctctctgctgggtgatgctgcaagttacaagyacatgtgaagccacttagctggagctgtgcctctcaaactcagtcttcccagccatggggatacagtccttgcacccaacccagggtggggtgggtgaggctcccagcggcctactctaaagccccttatctccggcctccagtgcttatcacattgggcccacagggtgaggaccctgctgtgccaggcatcctgaggccccaactctgtctcccctactcccaggatcaacaccccccggaaagagggaggcttgggccccytgaacatccccctgcttgctgacgtgaccagacgcttgtctgaggattacggcgtgctgaaaacagatgagggcattgcctacaggggcctctttatcatcgatggcaagggtgtccttcgccagatcactgttaatgatttgcctgtgggacgctccgtggatgaggctctgcggctggtccaggccttccagtacacagacgagcatggggaagtttgtcccgctggctggaagcctggcagtgacacgattaagcccaacgtggatgacagcaaggaatatttctccaaacacaattaggctggctaacggatagtgagcttgtgcccctgcctaggtgcctgtgctgggtgtccacctgtgcccccacctgggtgcyctatgctgacccaggaaaggccagacctgcccctccaaactccacagtatgggaccctggagggstaggccaaggccttytcatgcctccmcctagaagctgaatagtgacgccctcccccaagcccacccagccgcacacaggcctagaggtaaccaataaagtattagggaaaggtgtg

SEQ ID NO: 929 - DNA, 1050 bp, Homo sapiens
cacgctccccygcacctgcgggcgcagtggacccgaccgctccgctcgtccgctccctcccccgcgccgtgcacgtcttggttcgggccgggcataaaaggcttcgcggcccagggctcacttggcgctgagaacgcgggtccacgcgtgtgatcgtccgtgcgtctagcctttgcccacgcagctttcagtcatggcctccggtaacgcgcgcatcggaaagccagcccctgacttcaagkccacagcggtggttgatggcgccttcaaagaggtgaagctgtcggactacaaagggaagtacgtggtcctctttttctaccctctggacttcacttttgtgtgccccaccgagatcatcgcgttcagcaaccgtgcagaggacttccgcaagctgggctgtgaagtgctgggcgtctcggtggactctcagttcacccacctggcttggatcaacaccccccggaaagagggaggcttgggccccytgaacatccccctgcttgctgacgtgaccagacgcttgtctgaggattacggcgtgctgaaaacagatgagggcattgcctacaggggcctctttatcatcgatggcaagggtgtccttcgccagatcactgttaatgatttgcctgtgggacgctccgtggatgaggctctgcggctggtccaggccttccagtacacagacgagcatggggaagtttgtcccgctggctggaagcctggcagtgacacgattaagcccaacgtggatgacagcaaggaatatttctccaaacacaattaggctggctaacggatagtgagcttgtgcccctgcctaggtgcctgtgctgggtgtccacctgtgcccccacctgggtgcyctatgctgacccaggaaaggccagacctgcccctccaaactccacagtatgggaccctggagggstaggccaaggccttytcatgcctccmcctagaagctgaatagtgacgccctcccccaagcccacccagccgcacacaggcctagaggtaaccaataaagtattagggaaaggtgtg

SEQ ID NO: 930 - DNA, 1186 bp, Homo sapiens
gcggattggccggaagcaggcgccgcttcgaggcccgcggaaaacgcgcgccgagacccgctcctgcagtattagttcttgcagctggtggyggcggctgaggcggcatggatctcagcgagctggagagagacaatacrggccgctgtcgcctgagttcgcctgtgcccgcggtgtgccgcaaggagccttgcgtcctgggcgtcgatgaggcgggcaggggccccgtgctgggccccatggtctacgccatctgttattgtcccctgcctcgcctggcagatctggaggcgctgaaagtggcagactcaaagaccctattggagagcgagcgggaaaggctgtttgcgaaaatggaggacacggactttgtcggctgggcgctggatgtgctgtctccaaacctcatctctaccagcatgcttgggcgggtcaaatacaacctkaactccctgtcacatgatacagccactgggcttatacagtatgcattggaccagggcgtgaacgtcacccaggtattcgtggacaccgtagggatgccagagacataccaggcgcggctgcarcaaagttttcccgggattgaggtgacggtcaaggccaaagcagatgccctctacccggtggttagtgctgccagcatctgtgccaaggtggcccgggaccaggccgtgaagaaatggcagttcgtggagaaactgcaggactyggatactgawtatggctcaggctaccccaatgatcccaagacaaaagcgtggttgaaggagcacgtggagcctgtgttcggcttcccccagtttgtccggttcagctggcgcacggcccagaccatcctggagaaagaggcggaagatgttatatgggaggactcagcatccgagaatcaggagggactcaggaagatcacatcctacttcctcaatgaagggtcccaagcccgtccccgttcttcccaccgatatttcctggaacgcggcctggagtcagcaaccagcctctagcagctgcctctacgcgctctacctgcttccccaacccagacattaaaattgtttaaggagaaccacacgtaggggatgtacttttgggacagaagcaaggtgggagtgtgctctgcagccgggtccagctacttccttttggaaccttaaatagaatgggtgttggttgattaatttta

SEQ ID NO: 931 - DNA, 1442 bp, Homo sapiens
ggaggctcacgggagagaggctgtagccctgggcaatcccgggggtcgttacaggaaggtaggaaaatgccaccctcagggcactggttgggctaaaggtgacactggcgtctcacgggctatgaagacggaatgcctcttaatgccggaattccaagacggaatgcctcttaatgccgggcaagtctcacatgaagctactcatcatttgcttcgtgtcctccgagctccgagagttggcaaagctgatgaaggagcagtagacagcgacccaagcacaccacttcagctagggaaagaccgatttaaggctgcaaggaaggagtcctgggagcatggctttccctgagccaaagccgcggcctccagagctgccgcagaaacggttgaagacgctggactgcgggcagggggcagtgcgagccgtacgatttaatgtggatggcaattacyscctgacgtgcggcagtgacaagacgctgaagctgtggaacccgcttcgggggacgctgctgcggacgtacagcggccacggctacgaggtgctggatgcggccggctcctttgacaacagtagtctctgctccggcggcggggacaaggcggtggttctgtgggatgtggcatcagggcaggtcgtgcgcaaattccggggccacgcagggaaggtgaacacggtgcagtttaatgaagaggccacagttatcctgtccggctctattgattccagtatccgctgttgggattgccgctcacggaggcctgagccagtgcagacgctggatgaggccagagatggcgtgtccagtgtgaaggtgtcagaccacgagatcctggcaggctccgtggatggccgcgtgagacgctatgacctaaggatggggcagctcttctcagactacgtgggcagccccatcacctgcacctgcttcagccgggatgggcagtgcaccctggtgtccagcctggactccacattgcggctcctggacaaagacacaggggagctgctgggcgagtacaagggccataagaaccaggaatacaagctggactgctgcctgagcgagcgtgacacacatgtggtcagctgttctgaggacgggaaggtgttcttctgggacctggtggagggtgcgctggctctggccctgcctgtgggttccrgtgtggtgcagtcgctggcctaccacccaacagagccctgcctgctgaccgccatgggaggcagcgtccagtgctggcragaggaggcctatgaggcagaggatggagcaggctgaagccaggggacccaccaacaggaccaaggaccgagacacagacatggaaggacttcagataccatcttattctagagacgtagctgaccaaaaagtaggggaggggctgggtctgcmaattaataaatagaagagggggtaagaccttcctgggaccgc

SEQ ID NO: 932 - DNA, 1529 bp, Homo sapiens
ggaggctcacgggagagaggctgtagccctgggcaatcccgggggtcgttacaggaaggtaggaaaatgccaccctcagggcactggttgggctaaaggtgacactggcgtctcacgggctatgaagacggaatgcctcttaatgccggaattccaagacggaatgcctcttaatgccgggcaagtctcacatgaagctactcatcatttgcttcgtgtcctccgagctccgagagttggcaaagctgatgaaggagcagtagacagcgacccaagcacaccacttcagctagggaaagaccgatttaaggctgcaaggaaggagtcctgggagcatggctttccctgagccaaagccgcggcctccagagctgccgcagaaacggttgaagacgctggactgcgggcagggggcagtgcgagccgtacgatttaatgtggatggcaattacyscctgacgtgcggcagtgacaagacgctgaagctgtggaacccgcttcgggggacgctgctgcggacgtacagcggccacggctacgaggtgctggatgcggccggctcctttgacaacagtagtctctgctccggcggcggggacaaggcggtggttctgtgggatgtggcatcagggcaggtcgtgcgcaaattccggggccacgcagggaaggtgaacacggtgcagtttaatgaagaggccacagttatcctgtccggctctattgattccagtatccgctgttgggattgccgctcacggaggcctgagccagtgcagacgctggatgaggccagagatggcgtgtccagtgtgaaggtgtcagaccacgagatcctggcaggcagggcgtggtggtgcatgcctgtattcccatctactcgggaggctgaggaaggasaatctcttgaacccgggaggcagaggttccgctccgtggatggccgcgtgagacgctatgacctaaggatggggcagctcttctcagactacgtgggcagccccatcacctgcacctgcttcagccgggatgggcagtgcaccctggtgtccagcctggactccacattgcggctcctggacaaagacacaggggagctgctgggcgagtacaagggccataagaaccaggaatacaagctggactgctgcctgagcgagcgtgacacacatgtggtcagctgttctgaggacgggaaggtgttcttctgggacctggtggagggtgcgctggctctggccctgcctgtgggttccrgtgtggtgcagtcgctggcctaccacccaacagagccctgcctgctgaccgccatgggaggcagcgtccagtgctggcragaggaggcctatgaggcagaggatggagcaggctgaagccaggggacccaccaacaggaccaaggaccgagacacagacatggaaggacttcagataccatcttattctagagacgtagctgaccaaaaagtaggggaggggctgggtctgcmaattaataaatagaagagggggtaagaccttcctgggaccgc

SEQ ID NO: 933 - DNA, 1425 bp, Homo sapiens
ggaggctcacgggagagaggctgtagccctgggcaatcccgggggtcgttacaggaaggtaggaaaatgccaccctcagggcactggttgggctaaaggtgacactggcgtctcacgggctatgaagacggaatgcctcttaatgccggaattccaagacggaatgcctcttaatgccgggcaagtctcacatgaagctactcatcatttgcttcgtgtcctccgagctccgagagttggcaaagctgatgaaggagcagtagacagcgacccaagcacaccacttcagctagggaaagaccgatttaaggctgcaaggaaggagtcctgggagcatggctttccctgagccaaagccgcggcctccagagctgccgcagaaacggttgaagacgctggactgcgggcagggggcagtgcgagccgtacgatttaatgtggatggcaattacyscctgacgtgcggcagtgacaagacgctgaagctgtggaacccgcttcgggggacgctgctgcggacgtacagcggccacggctacgagctcctttgacaacagtagtctctgctccggcggcggggacaaggcggtggttctgtgggatgtggcatcagggcaggtcgtgcgcaaattccggggccacgcagggaaggtgaacacggtgcagtttaatgaagaggccacagttatcctgtccggctctattgattccagtatccgctgttgggattgccgctcacggaggcctgagccagtgcagacgctggatgaggccagagatggcgtgtccagtgtgaaggtgtcagaccacgagatcctggcaggctccgtggatggccgcgtgagacgctatgacctaaggatggggcagctcttctcagactacgtgggcagccccatcacctgcacctgcttcagccgggatgggcagtgcaccctggtgtccagcctggactccacattgcggctcctggacaaagacacaggggagctgctgggcgagtacaagggccataagaaccaggaatacaagctggactgctgcctgagcgagcgtgacacacatgtggtcagctgttctgaggacgggaaggtgttcttctgggacctggtggagggtgcgctggctctggccctgcctgtgggttccrgtgtggtgcagtcgctggcctaccacccaacagagccctgcctgctgaccgccatgggaggcagcgtccagtgctggcragaggaggcctatgaggcagaggatggagcaggctgaagccaggggacccaccaacaggaccaaggaccgagacacagacatggaaggacttcagataccatcttattctagagacgtagctgaccaaaaagtaggggaggggctgggtctgcmaattaataaatagaagagggggtaagaccttcctgggaccgc

SEQ ID NO: 934 - DNA, 2793 bp, Homo sapiens
gcctcccgccccgccgcctcrgaagcccctgagagccggcagatggggggcttttagccacggtctctggtctgatgaagcagaaaagaagatgaggatcagggggtcctcgggaacgctgtcacgaatcaatatgttaaggatacctgtaagaaaggccttagtaggcctttctaagtctcctaaaggatgtgttcgaacaactgccacagcagcaagcaacttgattgaagtatttgttgatggtcagtctgtcatggtggaaccgggaacgaccgtcctccaagcttgtgagaaggttggcatgcagatccctcgattctgttatcatgaaaggttgtctgttgctggaaactgcaggatgtgccttgttgaaattgagaaagcccctaaggttgtagctgcttgtgccatgccagtaatgaagggttggaatatcctaacaaactcagaaaaatccaaaaaagccagggaaggtgtgatggagttcttattagcaaatcacccattggactgtcctatttgtgaccagggaggtgaatgtgayctgcaggaccagtccatgatgtttggaaatgataggagccgatttttagaggggaagcgtgctgtggaagacaagaacattgggccattggtaaagaccatcatgacaagatgtatacagtgtactcgctgcatcaggtttgcaagtgagattgcaggagtagatgatttgggaacaacaggcagaggaaatgatatgcaagttggcacatacattgaaaagatgttcatgtctgaactgtctgggaatatcattgatatctgccctgtaggtgccctaacctctaagccctatgcctttactgccyggccttgggaaacaagaaagacagaatccattgrtgtaatggatgcggttggaagtaatattgtggttagcacaagaactggagaagtgatgaggattttgccacgtatgcatgaggacatcaatgaagagtggatctctgataaaaccagatttgcctatgatgggctaaaacgtcaaagacttaccgagccaatggtcagaaatgaaaaagggcttttaacctatacttcttgggaggatgckctctctcgygtagctggaatgttgcagagttttcaaggcaaagatgtggcagcaattgcaggtggcttggtggatgctgaagccctggtagctctcaaagatttgcttaatagagtggactctgacaccttatgcactgaagaggtcttccccactgcaggagctggcacagatttgcgttccaattatcttcttaatactacaattgctggtgtggaagaggcagatgttgttcttctggttggtacaaacccacgttttgaggcaccactgtttaatgctagrattcgaaagagctggctgcataatgacttaaaagtggcccttataggcagtccagtggacctcacttacacatatgaccacctgggagactcccccaaaattcttcaagacattgcttcgggaagccatccatttagccaggtcctaaaggaagctaaaaaaccaatggtggttttaggcagttctgcactccaaagaaatgatggagcagcaattcttgcagctgtttctagcattgcacaaaagattcggatgactagtggtgttactggtgattggaaagttatgaatatccttcataggattgcaagtcaagtagctgctttggaccttggctataagcctggggtggaagcaattcggaagaaccctcccaaggtgctgtttctcctgggagcagatggaggttgtatcacacgacaggatttgccaaaggattgtttcattatttatcaaggacatcatggtgatgttggggctcccatagctgatgttattctcccaggagctgcttacacagagaagtctgctacatatgtcaacactgagggtagagctcagcagactaaggtagcagtgacacctcctggcttggcaagagaagactggaaaattataagagcactctctgagattgctggaatgactcttccatatgatactctggatcaagtaaggaacagattggaagaaktctctcctaatcttgttcgatatgatgatattgaaggggctaattacttccagcaagcaaatgagctctcaaagctagtgaaccagcagcttcttgctgacccacttgttccacctcagctaactataaaagacttctacatgacagattcaattagcagagcctcacagacaatggccaaatgtgtcaaagctgtcacagagggtgcccaggcagtagaggaaccatccatatgctgaagcttctactaggatcccagttttgccgcagataattaatggacaactgtagkgcagtgatcctttacaggtttatttctttgtaaaaaaaaataataataatttgaatcatgtaatatttaaggttatactatgcctatttgaaaatgatattagtyatcaactttgcagtttgaaaaacatgtattgtgtgtaaaggttaaataacaaaactatgcagatgctcttaaaagcattgataacctttgtgacgaacataaagagatccttaaattatgagttgttggcttatcttcataaataatttgtctgtaaaatggatgaaatgaaaagagkttcaattaaaacctacttttttctagtgctaaagaaaagatttaagcaccttgtcaagctgggtaaataggaaaaatacataatcatgctcagatatgtatctaggataattataattaawaataatcatagtaacaatg

SEQ ID NO: 935 - DNA, 2794 bp, Homo sapiens
ctttccgttctccaggcccggctgacagagttagccgaggccgccatattgaataagcgacccggcctcctagggggtcgtcgtggtscagacagtttagcagaacagcctccgcggctccggggagaagcaatatgttaaggatacctgtaagaaaggccttagtaggcctttctaagtctcctaaaggatgtgttcgaacaactgccacagcagcaagcaacttgattgaagtatttgttgatggtcagtctgtcatggtggaaccgggaacgaccgtcctccaagcttgtgagaaggttggcatgcagatccctcgattctgttatcatgaaaggttgtctgttgctggaaactgcaggatgtgccttgttgaaattgagaaagcccctaaggttgtagctgcttgtgccatgccagtaatgaagggttggaatatcctaacaaactcagaaaaatccaaaaaagccagggaaggtgtgatggagttcttattagcaaatcacccattggactgtcctatttgtgaccagggaggtgaatgtgayctgcaggaccagtccatgatgtttggaaatgataggagccgatttttagaggggaagcgtgctgtggaagacaagaacattgggccattggtaaagaccatcatgacaagatgtatacagtgtactcgctgcatcaggtttgcaagtgagattgcaggagtagatgatttgggaacaacaggcagaggaaatgatatgcaagttggcacatacattgaaaagatgttcatgtctgaactgtctgggaatatcattgatatctgccctgtaggtgccctaacctctaagccctatgcctttactgccyggccttgggaaacaagaaagacagaatccattgrtgtaatggatgcggttggaagtaatattgtggttagcacaagaactggagaagtgatgaggattttgccacgtatgcatgaggacatcaatgaagagtggatctctgataaaaccagatttgcctatgatgggctaaaacgtcaaagacttaccgagccaatggtcagaaatgaaaaagggcttttaacctatacttcttgggaggatgckctctctcgygtagctggaatgttgcagagttttcaaggcaaagatgtggcagcaattgcaggtggcttggtggatgctgaagccctggtagctctcaaagatttgcttaatagagtggactctgacaccttatgcactgaagaggtcttccccactgcaggagctggcacagatttgcgttccaattatcttcttaatactacaattgctggtgtggaagaggcagatgttgttcttctggttggtacaaacccacgttttgaggcaccactgtttaatgctagrattcgaaagagctggctgcataatgacttaaaagtggcccttataggcagtccagtggacctcacttacacatatgaccacctgggagactcccccaaaattcttcaagacattgcttcgggaagccatccatttagccaggtcctaaaggaagctaaaaaaccaatggtggttttaggcagttctgcactccaaagaaatgatggagcagcaattcttgcagctgtttctagcattgcacaaaagattcggatgactagtggtgttactggtgattggaaagttatgaatatccttcataggattgcaagtcaagtagctgctttggaccttggctataagcctggggtggaagcaattcggaagaaccctcccaaggtgctgtttctcctgggagcagatggaggttgtatcacacgacaggatttgccaaaggattgtttcattatttatcaaggacatcatggtgatgttggggctcccatagctgatgttattctcccaggagctgcttacacagagaagtctgctacatatgtcaacactgagggtagagctcagcagactaaggtagcagtgacacctcctggcttggcaagagaagactggaaaattataagagcactctctgagattgctggaatgactcttccatatgatactctggatcaagtaaggaacagattggaagaaktctctcctaatcttgttcgatatgatgatattgaaggggctaattacttccagcaagcaaatgagctctcaaagctagtgaaccagcagcttcttgctgacccacttgttccacctcagctaactataaaagacttctacatgacagattcaattagcagagcctcacagacaatggccaaatgtgtcaaagctgtcacagagggtgcccaggcagtagaggaaccatccatatgctgaagcttctactaggatcccagttttgccgcagataattaatggacaactgtagkgcagtgatcctttacaggtttatttctttgtaaaaaaaaataataataatttgaatcatgtaatatttaaggttatactatgcctatttgaaaatgatattagtyatcaactttgcagtttgaaaaacatgtattgtgtgtaaaggttaaataacaaaactatgcagatgctcttaaaagcattgataacctttgtgacgaacataaagagatccttaaattatgagttgttggcttatcttcataaataatttgtctgtaaaatggatgaaatgaaaagagkttcaattaaaacctacttttttctagtgctaaagaaaagatttaagcaccttgtcaagctgggtaaataggaaaaatacataatcatgctcagatatgtatctaggataattataattaawaataatcatagtaacaatg

SEQ ID NO: 936 - DNA, 1581 bp, Homo sapiens
gccagatccggggcgggtccgcggccgcggcgggaacatggaggagctsctgaggcgcgagctgggctgcagctctgtcagggccacgggccactcggggggcgggtgcatcagccagggccggagctacgacacggatcaaggacgagtgttcgtgaaagtgaaccccaaggcggaggccagaagaatgtttgaaggtgagatggyaagtttaactgccatcctgaaaacaaacacggtgaaagtgcccawgcccatcaaggttctggatgccccaggcggcgggagcgtgctggtgatggagcacatggacatgaggcatctgagcagtcatgctgcaaagcttggagcccagctggccgatttacaccttgataacaagaagcttggagagatgcgcctgaaggaggcgggcacagtggggagaggaggtgggcaggaggaacggccctttgtggcccggtttggatttgacgtggtgacgtgctgtggatacctcccccaggtgaatgactggcaggaggactgggtcgtgttctatgcccggcagcgcattcagccccagatggacatggtggagaaggagtctggggacagggargccctccagctttggtctgctctgcagttaaagatccctgacctgttccgtgacctggagatcatcccagccttactccacggggacctctggggtggaaacgtagcagaggattcctctgggccggtgatttttgacccagcttctttctacggccactcggaatatgagcyggcaatagctggcatgtttgggggctttagcagctccttttactccgcctaccaykgcaaaatccccaaggccccaggattcgagaagcgccttcagttgtatcagctctttcactacttgaaccactggaatcattttggatcggggtacagaggatcctccctgaacatcatgaggaatctggtcaaggcccctcagcagaaggcagaacagaaccgagttcctttagaatgctggtttttgtgtggagtgaggaaggaccgtgagtgtggtcagtttccaacctgacaggacctgctcccgttggccaggactgcagcttgttactttgaccctgggaagaaggtccatcccgacggcgcgtgtgccgcttggctcaaggccctgacatcgttccactcagcacagcatcaggtgcccgggaccctggacatcatcgttctgtgtcagcacatcaggtgcccggggcccggacatcatcgttccactcagcacagcatcaggtgcctgggaccctggacatcatcgttccactcagcacagcatcaggtgcctgggaccctggacatcatcgttctgctcagcacagcatcaggtgcccgggaccctggacgtcattctgcatcagcacaacatcaccagtgacgagagcctccccaagtggttgacgggaaggatggttcggtcctccagaggcggtggccttctcttcctcgatgacattgccgggctgcaccttgtgagaggccgtcgctgagagtgcagccaaatggaaccatcaggaggggtgtctcgggggtgtcgaa

SEQ ID NO: 937 - DNA, 1883 bp, Homo sapiens
gccagatccggggcgggtccgcggccgcggcgggaacatggaggagctsctgaggcgcgagctgggctgcagctctgtcagggccacgggccactcggggggcgggtgcatcagccagggccggagctacgacacggatcaaggacgagtgttcgtgaaagtgaaccccaaggcggaggccagaagaatgtttgaaggtgagatggyaagtttaactgccatcctgaaaacaaacacggtgaaagtgcccawgcccatcaaggttctggatgccccaggcggcgggagcgtgctggtgatggagcacatggacatgaggcatctgagcagtcatgctgcaaagcttggagcccagctggccgatttacaccttgataacaagaagcttggagagatgcgcctgaaggaggcgggcacagtggggagaggaggtgggcaggaggaacggccctttgtggcccggtttggatttgacgtggtgacgtgctgtggatacctcccccaggtgaatgactggcaggaggactgggtcgtgttctatgcccggcagcgcattcagccccagatggacatggtggagaaggagtctggggacagggargccctccagctttggtctgctctgcagttaaagatccctgacctgttccgtgacctggagatcatcccagccttactccacggggacctctggggtggaaacgtagcagaggattcctctgggccggtgatttttgacccagcttctttctacggccactcggaatatgagcyggcaatagctggcatgtttgggggctttagcagctccttttactccgcctaccaykgcaaaatccccaaggccccaggattcgagaagcgccttcagttgtatcagctctttcactacttgaaccactggaatcattttggatcggggtacagaggatcctccctgaacatcatgaggaatctggtcaagtgagcgggccttactctggaaggaggcctcagaggtttctccacagtcctcttctgggcaaattcttgtttcttcacatgcyggactagcttaagaccaatgcagtagcttatttccaagccttgcaaagtatataatatctaagaggaaaggttttgtcatcccagcgttgtccactttgtggggctttgtaggtagacggagccacactacaggcagggtatgagcagagggatgtatggagtgtgggtgactctgagcctcactgctgctgcaaggtggggaaactgtaagtgaacccctgtgggtgcgggggagggtatccggtgcgcagggaggtggccagcgcccccgggcactgctgctcataggtacctttccrctgcctcctccctgctctcctgtgcaggaatgtctctgagctgttcacgttgatgcttcttggttggcaagacttgggtgtagayatgaaaccatcttactaaaagygtcttaaaatgaccaattccagaatcaagcgtattccgttttmttcctgcatgatccctgggccctcccgcaggctgagcaagtctgtaaactgattctgggagaaaccaagctgctggccrtaggrtgtccttgggtacatccaggagtcttcattgcttctgttattaccccgtctcctctgccattttctacagcttgctgagttgtcattcctttgcaacattaaaatrcatgctgaactcatatttttccttccttcactgttgtagtaaagagacatatttcatgaatggcattgatgctaataaatcctttgcacaaaaatttgaataaacttccagtggtttcgataaygtacaagattgtatatttccctcatttattgtaattcaatatcttagttgtttgctgaaaaacttgtaatatt

SEQ ID NO: 938 - DNA, 2493 bp, Homo sapiens
gtgacgctggccagcgccctacaggtmaggggtgaagctctgtctgaggaggaaatctggtccctcctgttcctggccgctgagcagctcctggaagacctccgcaaygattcctcggactatgtggtttgcccctggtcagccctgctttctgcagctggaagcctttctttccaaggccgtgtttctcatatagaggctgctcctttcaaggcccctgaactgctacagggacagagtgaggatgagcagcctgatgcatctcagatgcatgtctattctttaggaatgaccctctactggtcagcagggtttcatgttccgccacatcagcccctgcagctctgcgagcccctgcactccatcctgctgaccatgtgtgaagaccagcctcacaggcggtgcacgttgcagtcggttctggaagcttgtcgggttcatgagaaagaagtgtctgtctacccagcccctgctggtctccacatcagaaggctggttggcttggttctgggtaccatttctgaggtcagtagagaaccgtgcttttcaaccaaaraagggaaatcctatttggctctcagggacctctgtgtggtcctgctgaacgggcagcacctggaggtaaaatgtgatgttgaatcaacagtgggagctgtcttcaatgccgtgacatcctttgccaacctcgaggaactcacctactttggcttggcgtatatgaaaagcaaagagttctttttcctggacagtgaaaccagattgtgcaaaatagctcctgaaggctggagagagcagcctcagaagacctccatgaataccttcacactcttcctgaggataaagttctttgtcagccactatgggctgctccagcacagcctgacaaggcaccagttttacctgcagcttcggaaagatatcctggaggagaggctgtactgcaatgaagagatactgctgcagctgggggtccttgccttgcaggctgagtttgrcaattaccctaaggaggtggagagtaagccatactttcacgttgaagattacatcccagcgagtctgatcgagaggatgaccgctctacgggtccaggttgaagtctcagagatgcaccggctcagctctgcactgtggggagaggatgctgagctgaagttcttgagggtcactcagcagctcccagaatacggtgtgctggttcaccaagtattctcagagaagaggaggccagaagaggagatggccctggggatctgtgccaagggtgtcatagtctatgaagtgaaaaacaacagcagaattgcaatgttacggtttcagtggagagaaaccgggaagatttctacttatcaaaaaaagttcaccatcacaagcagtgtcactgggaagaagcacacatttgtcacagattcagccaagaccagtaaatacttactggacctctgctcagcccagcatgggtttaatgcacagatgggctctgggcagaataggaggaagagctttatagctgaaccgggccgagaaattgtacgtgtgacactgaaacgtgacccacatcgtggttttgggtttgtcattaatgagggagagtattcaggccaagctgaccctggcatttttatatcttctattatacctggaggaccagcagaaaaagcaaaaacgatyaaaccaggagggcagatactagccctgaatcacatcagtctggagggcttcacaytcaacatggctgttaggatgatccagaattcccctgacaacatagaattaattatttctcagtcaaratcttcttgtcctccatcacctccagaaatcagtgctggtgaaatctactttgtggaactggttaaagaagatgggacacttggattcagcgtaactggtggcattaacaccagtgtgccatatggtggtatctatgtgaaatccattgttcctggaggaccagctgccaaggaagggcagatcctacagggtgaccgactcctgcaggtggatggrgtgattctgtgcggcctcacccacaagcaggctgtgcagtgcctgaagggtcctgggcaggtgagtggactgttgctgaccagcttcccctccttccggaactttcctgaacaacatcagaagctgaaatcgcctctgggkgggagggaggcaggcaagaaacaagactttttctttgttagtcctaagtttgaagtcaaactaaaaaagaatgccaatggtttgggattcagtttcgtgcagatggagaaagagagctgcagccatctcaaaagtgatcttgtgaggattaagaggctctttccggggcagccagctgmggagaatggggccattgcagctggtgacattatcctggccgtgaatggaaggtccacggaaggcctcatcttccaggaggtgctgcatttactgagaggggccccacaggaagtcacgctcctcctttgccgaccccctccaggtgcgctgcctgagctggag

SEQ ID NO: 939 - DNA, 1866 bp, Homo sapiens
ggtcgcagcggcggtatggtcgccgcagtttctcggtcttcgcttcggcgaccttgacccccttgtgggtgggcgaggctggaagagaggctccccaccccactcggcttcctgatccctgggggcgccgggcggtcaccgagggccgtgtgagcgccgctctgccggctccgggtccatgcggctgcgggagaagccctgggcgtcggggctggcctgggaggggcccgagtcccctggtgacctgggcgcgcggcggcccccacccccttccgtccgcctcatcgcggcgcatttctcttcacatcctcggggtgtgtgtgtgttggtgaccggaggaagcctgtctaatgacttttctggaagcgtcgtgtattaggagctccggggccggactgcttgggtccgcatctccatccaccgcttactggctttgggacctctgcaagtcacttcacttctctttctcagtttcaagtgtaaaatgcggaaaataatagcaacttatctcstaagtaaataacagatgcgggtgaaagatccaactaaagctttacctgagaaarccaaaagaagtaaaaggcctactgtacctcatgatgaagactcttcagatgatattgctgtaggtttaacttgccaacatgtaagtcatgctatcagcgtgaatcatgtaaagagagcaatagctgagaatctgtggtcagtttgctcagaatgtttaraagaaagaagattctatgatgggcagctagtacttacttctgatatttggttgtgcctcaagtgtggcttccagggatgtggtaaaaactcagaaagccaacattcattgaagcactttaagagttccagaacagagccccattgkattataattaatctgagcacatggattatatggtgttatgaatgygatgaaaaattatcaacgcattgtaataagaaggttttggctcagatagttgattttctccagaaacatgcttctaaaacacaaacaagtgcattttctagaatcatgaaactttgtgaagaaaaatgtgaaacagatgaaatacagaagggaggaaaatgcagaaatttatctgtaagaggaattacaaatttaggaaatacttgcttttttaatgcagtcatgcagaacttggcrcagacttatactcttactgatctgatgaatgagatcaaagaaagtagtacaaaactcaagatttttccttcctcagactctcagctggacccattggtggtggaactttcaaggcctggaccactgacctcagccttgttcctgtttcttcacagcatgaaggagactgaaaaaggaccactttctcctaaagttctttttaatcagctttgtcagaagygggtgcatctacatttaatataaataattatgagttacaaaatactaatgtattcatcatttaacatgaatagtcgtttttactgtaactttgctcttattgccctgactatgaagagaactaaaatttgttacagctctatgctttatgaaaattatatctcagtcctcagaagaagcagcttatcctcatatataaggaaatggagacacagaaattaaatggctcacctagtctgagtgaaaagctgagaatcaaatggagatctgtcctgacttggatgcctatgttgtaataccataaagtgagaaaaccatagagttgtaaaatctagaaagtaccgtaagataacatctaatctagctttcttattttaaaagatgagctgtgaggcaaatagagtttaagtgaatttctcaaggtattacagtatgtttaaaaaccaaatccttatgtgcctggaaataaacacataaaggatctgacttgactt

SEQ ID NO: 940 - DNA, 1671 bp, Homo sapiens
agtctccccaggttgtagacgctgcggcccggcccggcgggtaaataacagatgcgggtgaaagatccaactaaagctttacctgagaaarccaaaagaagtaaaaggcctactgtacctcatgatgaagactcttcagatgatattgctgtaggtttaacttgccaacatgtaagtcatgctatcagcgtgaatcatgtaaagagagcaatagctgagaatctgtggtcagtttgctcagaatgtttaraagaaagaagattctatgatgggcagctagtacttacttctgatatttggttgtgcctcaagtgtggcttccagggatgtggtaaaaactcagaaagccaacattcattgaagcactttaagagttccagaacagagccccattgkattataattaatctgagcacatggattatatggtgttatgaatgygatgaaaaattatcaacgcattgtaataagaaggttttggctcagatagttgattttctccagaaacatgcttctaaaacacaaacaagtgcattttctagaatcatgaaactttgtgaagaaaaatgtgaaacagatgaaatacagaagggaggaaaatgcagaaatttatctgtaagaggaattacaaatttaggaaatacttgcttttttaatgcagtcatgcagaacttggcrcagacttatactcttactgatctgatgaatgagatcaaagaaagtagtacaaaactcaagatttttccttcctcagactctcagctggacccattggtggtggaactttcaaggcctggaccactgacctcagccttgttcctgtttcttcacagcatgaaggagactgaaaaaggaccactttctcctaaagttctttttaatcagctttgtcagayggcacctcgatttaaagatttccagcaacaggacagtcaggagcttcttcattatcttctggatgcagtgaggacagaagaaacaaagcgaatacaagctagcattctaaaagcatttaacaacccaactactaaaactgctgatgatgaaactagaaaaaaagtcaaagatgtaactagacaaaatgtttaagtgctccaaagactcctgcaaataaaccgtttattgaagagagtgctgcatatggaaaagaaggtgtgaaaatgaacttcatagatcggatctttattggtgaattaactagcacggtcatgtgtgaagaatgtgcaaatatctccacggtgaaagatccattcattgatatttcacttcctataatagaagaaagggtttcaaaacctttactttggggaagaatgaataaatatagaagtttacgggagacagatcatgatcgatacagtggcaatgttactatagaaaatattcatcaacctagagctgccaagaagcattcttcatctaaagataagagatagggttttgtcatgttggctgggctggtctcaaactcctgatgacctcaagtgatctacctgccttggtctcccaaagtgctggaattgcaggtgtgagccacagcgctgggcctgaatttaacttactctgttagaagacttatgttagaagtcacaagacttcagaaaggacaacatgttttctataaataaaagctaattttgcttcataagatatataggacagttaaattca

SEQ ID NO: 941 - DNA, 1391 bp, Homo sapiens
agtctccccaggttgtagacgctgcggcccggcccggcgggtaaataacagatgcgggtgaaagatccaactaaagctttacctgagaaarccaaaagaagtaaaaggcctactgtacctcatgatgaagactcttcagatgatattgctgtaggtttaacttgccaacatgtaagtcatgctatcagcgtgaatcatgtaaagagagcaatagctgagaatctgtggtcagtttgctcagaatgtttaraagaaagaagattctatgatgggcagctagtacttacttctgatatttggttgtgcctcaagtgtggcttccagggatgtggtaaaaactcagaaagccaacattcattgaagcactttaagagttccagaacagagccccattgkattataattaatctgagcacatggattatatggtgttatgaatgygatgaaaaattatcaacgcattgtaataagaaggttttggctcagatagttgattttctccagaaacatgcttctaaaacacaaacaagtgcattttctagaatcatgaaactttgtgaagaaaaatgtgaaacagatgaaatacagaagggaggaaaatgcagaaatttatctgtaagaggaattacaaatttaggaaatacttgcttttttaatgcagtcatgcagaacttggcrcagacttatactcttactgatctgatgaatgagatcaaagaaagtagtacaaaactcaagatttttccttcctcagactctcagctggacccattggtggtggaactttcaaggcctggaccactgacctcagccttgttcctgtttcttcacagcatgaaggagactgaaaaaggaccactttctcctaaagttctttttaatcagctttgtcagaagygggtgcatctacatttaatataaataattatgagttacaaaatactaatgtattcatcatttaacatgaatagtcgtttttactgtaactttgctcttattgccctgactatgaagagaactaaaatttgttacagctctatgctttatgaaaattatatctcagtcctcagaagaagcagcttatcctcatatataaggaaatggagacacagaaattaaatggctcacctagtctgagtgaaaagctgagaatcaaatggagatctgtcctgacttggatgcctatgttgtaataccataaagtgagaaaaccatagagttgtaaaatctagaaagtaccgtaagataacatctaatctagctttcttattttaaaagatgagctgtgaggcaaatagagtttaagtgaatttctcaaggtattacagtatgtttaaaaaccaaatccttatgtgcctggaaataaacacataaaggatctgacttgactt

SEQ ID NO: 942 - DNA, 1488 bp, Homo sapiens
ggtcgcagcggcggtatggtcgccgcagtttctcggtcttcgcttcggcgaccttgacccccttgtgggtgggcgaggctggaagagaggctccccaccccactcggcttcctgatccctgggggcgccgggcggtcaccgagggccgtgtgagcgccgctctgccggctccgggtccatgcggctgcgggagaagccctgggcgtcggggctggcctgggaggggcccgagtcccctggtgacctgggcgcgcggcggcccccacccccttccgtccgcctcatcgcggcgcatttctcttcacatcctcggggtgtgtgtgtgttggtgaccggaggaagcctgtctaatgacttttctggaagcgtcgtgtattaggagctccggggccggactgcttgggtccgcatctccatccaccgcttactggctttgggacctctgcaagtcacttcacttctctttctcagtttcaagtgtaaaatgcggaaaataatagcaacttatctcstaagtaaataacagatgcgggtgaaagatccaactaaagctttacctgagaaarccaaaagaagtaaaaggcctactgtacctcatgatgaagactcttcagatgatattgctggtgcattttctagaatcatgaaactttgtgaagaaaaatgtgaaacagatgaaatacagaagggaggaaaatgcagaaatttatctgtaagaggaattacaaatttaggaaatacttgcttttttaatgcagtcatgcagaacttggcrcagacttatactcttactgatctgatgaatgagatcaaagaaagtagtacaaaactcaagatttttccttcctcagactctcagctggacccattggtggtggaactttcaaggcctggaccactgacctcagccttgttcctgtttcttcacagcatgaaggagactgaaaaaggaccactttctcctaaagttctttttaatcagctttgtcagaagygggtgcatctacatttaatataaataattatgagttacaaaatactaatgtattcatcatttaacatgaatagtcgtttttactgtaactttgctcttattgccctgactatgaagagaactaaaatttgttacagctctatgctttatgaaaattatatctcagtcctcagaagaagcagcttatcctcatatataaggaaatggagacacagaaattaaatggctcacctagtctgagtgaaaagctgagaatcaaatggagatctgtcctgacttggatgcctatgttgtaataccataaagtgagaaaaccatagagttgtaaaatctagaaagtaccgtaagataacatctaatctagctttcttattttaaaagatgagctgtgaggcaaatagagtttaagtgaatttctcaaggtattacagtatgtttaaaaaccaaatccttatgtgcctggaaataaacacataaaggatctgacttgactt

SEQ ID NO: 943 - DNA, 1144 bp, Homo sapiens
tttcattgcagggctgtgaccatctatgacaagccggcrtctttctttaaagagacacctctggacctgcagcaccggctcttcatgaagctgggcggcacgcactctccgttcagggcccgttcagaacctgaggaaccagccacagagccgtcggccttcatggagtgggatgctgggagcgggctggtgatgcttctccgcgagcwgccagccctgctggtcagcagcacaggctggacaggtctgcaagacccctggaacacttgggcttgaggatgaagacttctccatcctgctggcagctttagaaaagtttgagcagctgactgttgatggacacaaccttccttctctcgtctgtgtgataacaggagggtcggtggacctgggtgtctgtctgcacacatcctccagtggcctggacctgcccatgaaggtggtggacatgttcgggtgctgtttgcctgcgtgtgctgtgaacttcaagtgtttacatgagctggtgaaacatgaagaaaatggcctggtctttgaggactcagaggaactggcagctcagctgcagatgcttttctcaaactttcctgatcctgcgggcaagctaaaccagttccggaagaacctgcgggaatcgcagcagctccgatgggatgagagatgggtgcagagtgtgctccatttggttatggacacataactcctgggccagaggctaaaaccccgggacccctgctgtccttcccgcagcttcttctcggagtctcagggcaaaccctttcgagcagcrcctcccagtggccagaaggtgaaatgacggcagtggtgccgcctggtaaatgaattggttctgtgacccgggaagctgtgcttggctctgatttcttttctggaggctcggaaacacttcctatcttcttctgttcttcacgccccatgcccctgctagcggattactgttctgcgacttccgtgtgacctctgcagtactcctcatcctgcgtttgctctccaggtgtcatctttccgccgtgttcctaacattttgattcctgtcttgaaaaaagcacctgctgcacygtaagcccagggatgtggcagctgcagtgggcttggctttgtgaagaacygagtgtgtccacgg

SEQ ID NO: 944 - DNA, 1113 bp, Homo sapiens
tttcattgcagggctgtgaccatctatgacaagccggcrtctttctttaaagagacacctctggacctgcagcaccggctcttcatgaagctgggcggcacgcactctccgttcagggcccgttcagaacctgaggaaccagccacagagccgtcggccttcatggagtgggatgctgggagcgggctggtgatgcttctccgcgagcwgccagccctgctggtcagcagcacaggctggacagaggatgaagacttctccatcctgctggcagctttagaaaagtttgagcagctgactgttgatggacacaaccttccttctctcgtctgtgtgataacaggagggtcggtggacctgggtgtctgtctgcacacatcctccagtggcctggacctgcccatgaaggtggtggacatgttcgggtgctgtttgcctgcgtgtgctgtgaacttcaagtgtttacatgagctggtgaaacatgaagaaaatggcctggtctttgaggactcagaggaactggcagctcagctgcagatgcttttctcaaactttcctgatcctgcgggcaagctaaaccagttccggaagaacctgcgggaatcgcagcagctccgatgggatgagagatgggtgcagagtgtgctccatttggttatggacacataactcctgggccagaggctaaaaccccgggacccctgctgtccttcccgcagcttcttctcggagtctcagggcaaaccctttcgagcagcrcctcccagtggccagaaggtgaaatgacggcagtggtgccgcctggtaaatgaattggttctgtgacccgggaagctgtgcttggctctgatttcttttctggaggctcggaaacacttcctatcttcttctgttcttcacgccccatgcccctgctagcggattactgttctgcgacttccgtgtgacctctgcagtactcctcatcctgcgtttgctctccaggtgtcatctttccgccgtgttcctaacattttgattcctgtcttgaaaaaagcacctgctgcacygtaagcccagggatgtggcagctgcagtgggcttggctttgtgaagaacygagtgtgtccacgg

SEQ ID NO: 945 - DNA, 1623 bp, Homo sapiens
cggtgcgcatgcgcgagcscctagctgcgcgcagccacccacgmgaccccagtctgaggtgcggggtcctggggcccrgygcgggtggcygccgcggcccctcgggctgcgtggggagggggcttccgcccctgttgtcattgctcctgcagccttttcgctgggactgcgcgacaccgccccccgaccgggtgcccgctgtgtgccaggccgggtgctgggcacggtcccgcgagtgccctataaggactgccaggcaataatgaagkttyttttactgaaggatgcgaaggaagatgactgtggccaggatccgtrtatcagggaattaggattatatggacttgaagccactttgatccctgttttatcgtttgagtttttgtctcttcccagtttctctgagaagctttctcatcytgaagattacgggggactcatttttaccagccccagagyagtggaagcagcagagttatgtttggagcaaaacaataaaactgaaktctgggaaaggtctctgaaagaaaaatggaatgccaagtcagtgtatgtggttggaaatgctactgyttctctagtgagtaaaattggcctggatacagaaggagaaacctgtggaaatgcagaaaagcttgcagaatatatttgttccagtgaagaagtcaaaggaatcttttgaagtgaagaaagtgggtttggacgtgcccttatgctgatgaatcattggagtaatatctggggtttagccgcatccttggtggcaaggcggtggggaaagcccctgagggtgaggccagcctgagccccaagggaaaggggctgctgggacctcctgacctcaactcatctccaggagcgcacagggcctcgcacagatgcctcagtctgtaccgctgggagttcgtgccatctcagacctaccctccctacctgggctgtacctaaagagatactgctaggctttctctagaatgtttcatgagccagcactgtgagacattttcaagctaaaaacatacagttcaggagactgtaatctgtggtagaaagtgttcaccatttgctgctagtaaagacggttrgccctgtgcttctctggccacttgtgccacatggtgttctcggaagaggcctctccatgcaccagtgtggagaagccctctggaggccaattcaaagagcatctgaggctaagcaactgaaaggaaaaggcctgatggccaacgtgttgctttctgtggaatgttccagactggattgctgggggtcattttctttaacagcagcctagacaggcagtgactctcttttattcagccaggtgttgaaatagctgcagggaagccacagacagttgttccagctttccggatcagagagcactggttgggccccgtgccatgtggccccagccccatgggatcgctcctcaggtcatggagccacacatcagtgtggagggttcgctccaggggttcctggtacaggatgcagatgggtcttgtctggctccaggctttttgtttctaatgttgtttctagagagtcatcatcaccgcataaatggtatcaaagcccttcttttaaaaatgtagaaataaatgtaaatggtagatcttg

SEQ ID NO: 946 - DNA, 1428 bp, Homo sapiens
cggtgcgcatgcgcgagcscctagctgcgcgcagccacccacgmgaccccagtctgaggtgcggggtcctggggcccrgygcgggtggcygccgcggcccctcgggctgcgtggggagggggcttccgcccctgttgtcattgctcctgcagccttttcgctgggactgcgcgacaccgccccccgaccgggtgcccgctgtgtgccaggccgggtgctgggcacggtcccgcgagtgccctataaggactgccaggcaataatgaagkttyttttactgaaggatgcgaaggaagatgactgtggccaggatccgtrtatcagggaattaggattatatggacttgaagccactttgatccctgttttatcgtttgagtttttgtctcttcccagtttctctgagaagctttctcatcytgaagattacgggggactcatttttaccagccccagagyagtggaagcagcagagttatgtttggagcaaaacaataaaactgaaktctgggaaaggtctctgaaagaaaaatggaatgccaagtcagtgtatgtggttggaaatgctactgyttctctagtgagtaaaattggcctggatacagaaggagaaacctgtggaaatgcagaaaagcttgcagaatatatttgttccagtgaagaagtcaaaggaatcttttgaagtgaagaaagtgggtttggacgtgcccttatgctgatgaatcattggagggagtcctcagcactgcctcttctatttccctgtggaaacctcaaaagagaaatcctgccaaaagcgctcaaggacaaagggattgccatggaaagcataactgtgtatcagacagttgcacacccaggaatccaagggaacctgaacagctactattcccagcmgdgggttccagccagcatcacattttttagtccctctggcctcacatacagtctcaagcacattcaggagttatctggtgacaatatcgatcaaattaagtttgcagccatcggccccactacggctcgcgcgctggccgcccagggccttcctgtaagctgcactgcagagagccccacgcmayaagccctggccactggcatcaggaaggctctccagccccatggctgctgctgagtcagccacctagcgctggccccatgcagcctccctgggctgggctggctctggatggagccaggcatcggyaagggctctcgggagctgctgccgtcagactcctgcctcaagcctgagtggaagcacctgaggaccggggatcgggacctgacctggggctggcctcaggcccacgtgcacgtgactgccctctgtggaagccagcttaaaccctagccctgtgagagcttcctgtgcccagcaggaaggaagtcaaataaaccacactgactacctgtgcttactgagtg

SEQ ID NO: 947 - DNA, 1353 bp, Homo sapiens
cggtgcgcatgcgcgagcscctagctgcgcgcagccacccacgmgaccccagtctgaggtgcggggtcctggggcccrgygcgggtggcygccgcggcccctcgggctgcgtggggagggggcttccgcccctgttgtcattgctcctgcagccttttcgctgggactgcgcgacaccgccccccgaccgggtgcccgctgtgtgccaggccgggtgctgggcacggtcccgcgagtgccctataaggactgccaggcaataatgaagkttyttttactgaaggatgcgaaggaagatgactgtggccaggatccgtrtatcagggaattaggattatatggacttgaagccactttgatccctgttttatcgtttgagtttttgtctcttcccagtttctctgagaagctttctcatcytgaagattacgggggactcatttttaccagccccagagyagtggaagcagcagagttatgtttggagcaaaacaataaaactgaaktctgggaaaggtctctgaaagaaaaatggaatgccaagtcagtgtatgtggttggaaatgctactgyttctctagtgagtaaaattggcctggatacagaaggagaaacctgtggaaatgcagaaaagcttgcagaatatatttgttccagggagtcctcagcactgcctcttctatttccctgtggaaacctcaaaagagaaatcctgccaaaagcgctcaaggacaaagggattgccatggaaagcataactgtgtatcagacagttgcacacccaggaatccaagggaacctgaacagctactattcccagcmgdgggttccagccagcatcacattttttagtccctctggcctcacatacagtctcaagcacattcaggagttatctggtgacaatatcgatcaaattaagtttgcagccatcggccccactacggctcgcgcgctggccgcccagggccttcctgtaagctgcactgcagagagccccacgcmayaagccctggccactggcatcaggaaggctctccagccccatggctgctgctgagtcagccacctagcgctggccccatgcagcctccctgggctgggctggctctggatggagccaggcatcggyaagggctctcgggagctgctgccgtcagactcctgcctcaagcctgagtggaagcacctgaggaccggggatcgggacctgacctggggctggcctcaggcccacgtgcacgtgactgccctctgtggaagccagcttaaaccctagccctgtgagagcttcctgtgcccagcaggaaggaagtcaaataaaccacactgactacctgtgcttactgagtg

SEQ ID NO: 948 - DNA, 1847 bp, Homo sapiens
cggtgcgcatgcgcgagcscctagctgcgcgcagccacccacgmgaccccagtctgaggtgcggggtcctggggcccrgygcgggtggcygccgcggcccctcgggctgcgtggggagggggcttccgcccctgttgtcattgctcctgcagccttttcgctgggactgcgcgacaccgccccccgaccgggtgcccgctgtgtgccaggccgggtgctgggcacggtcccgcgagtgccctataaggactgccaggcaataatgaagkttyttttactgaaggatgcgaaggaagatgactgtggccaggatccgtrtatcagggaattaggattatatggacttgaagccactttgatccctgttttatcgtttgagtttttgtctcttcccagtttctctgagaagctttctcatcytgaagattacgggggactcatttttaccagccccagagyagtggaagcagcagagttatgtttggagcaaaacaataaaactgaaktctgggaaaggtctctgaaagaaaaatggaatgccaagtcagtgtatgtggttggaaatgctactgyttctctagtgagtaaaattggcctggatacagaaggagaaacctgtggaaatgcagaaaagcttgcagaatatatttgttccaacctcaaaagagaaatcctgccaaaagcgctcaaggacaaagggattgccatggaaagcataactgtgtatcagacagttgcacacccaggaatccaagggaacctgaacagctactattcccagcmgdgggttccagccagcatcacattttttagtccctctggcctcacatacagtctcaagcacattcaggagttatctggtgacaatatcgatcaaattaagaaacaccyttgaactggctccagagggactgaggagagggtgcaggatgtgacccagagcccaaggacagacactgccactcactgcagtcaggaagagcaaaaggcttcacctgccttctcacaggtgcatctcatgtggggagtatgcaccgctctcccagttttaaagatggagcacggggctcagagacatcatatggcctgtctgtaggtcacactgctgagaaggaagagctgcagttgaacctgggaagactgattccacattgtcagccatggtgatgccttgccatggtctcaggagctgctgagcagttgatgcacttctgggcagtaactgatacaattctcacaccagtccagtggagtccctgtagggcccactgtttgtacagcattgcacaacatgcaggcgcaccacaaaagatcaaagggggtgacttccgacctgaacttgctacttatccattgacttgggaagaccacgcacttgtctataaatgccacagagatgtcactgcaaagcagtagtttgcagccatcggccccactacggctcgcgcgctggccgcccagggccttcctgtaagctgcactgcagagagccccacgcmayaagccctggccactggcatcaggaaggctctccagccccatggctgctgctgagtcagccacctagcgctggccccatgcagcctccctgggctgggctggctctggatggagccaggcatcggyaagggctctcgggagctgctgccgtcagactcctgcctcaagcctgagtggaagcacctgaggaccggggatcgggacctgacctggggctggcctcaggcccacgtgcacgtgactgccctctgtggaagccagcttaaaccctagccctgtgagagcttcctgtgcccagcaggaaggaagtcaaataaaccacactgactacctgtgcttactgagtg

SEQ ID NO: 949 - DNA, 1599 bp, Homo sapiens
cggtgcgcatgcgcgagcscctagctgcgcgcagccacccacgmgaccccagtctgaggtgcggggtcctggggcccrgygcgggtggcygccgcggcccctcgggctgcgtggggagggggcttccgcccctgttgtcattgctcctgcagccttttcgctgggactgcgcgacaccgccccccgaccgggtgcccgctgtgtgccaggccgggtgctgggcacggtcccgcgagtgccctataaggactgccaggcaataatgaagkttyttttactgaaggatgcgaaggaagatgactgtggccaggatccgtrtatcagggaattaggattatatggacttgaagccactttgatccctgttttatcgtttgagtttttgtctcttcccagtttctctgagaagctttctcatcytgaagattacgggggactcatttttaccagccccagagyagtggaagcagcagagttatgtttggagcaaaacaataaaactgaaktctgggaaaggtctctgaaagaaaaatggaatgccaagtcagtgtatgtggttggaaatgctactgyttctctagtgagtaaaattggcctggatacagaaggagaaacctgtggaaatgcagaaaagcttgcagaatatatttgttccagggagtcctcagcactgcctcttctatttccctgtggaaacctcaaaagagaaatcctgccaaaagcgctcaaggacaaagggattgccatggaaagcataactgtgtatcagacagttgcacacccaggaatccaagggaacctgaacagctactattcccagcmgdgggttccagccagcatcacattttttagtccctctggcctcacatacagtctcaagcacattcaggagttatctggtgacaatatcgatcaaattaagatgaggagatggaggccagagaggatgggccacsggccaaggtcattgtcctgtggagctgggatttaaatcccaaccctgtgcccacagagccctgaccttgatggctctactttcttggggattcagtcactgcccctgccacaccatcctccccttgatcagacccagggcccccaacacccgaagaagaactgtctgcagctagagcctctgaggaaggactgcactgacacagccgtgatgtttgcagccatcggccccactacggctcgcgcgctggccgcccagggccttcctgtaagctgcactgcagagagccccacgcmayaagccctggccactggcatcaggaaggctctccagccccatggctgctgctgagtcagccacctagcgctggccccatgcagcctccctgggctgggctggctctggatggagccaggcatcggyaagggctctcgggagctgctgccgtcagactcctgcctcaagcctgagtggaagcacctgaggaccggggatcgggacctgacctggggctggcctcaggcccacgtgcacgtgactgccctctgtggaagccagcttaaaccctagccctgtgagagcttcctgtgcccagcaggaaggaagtcaaataaaccacactgactacctgtgcttactgagtg

SEQ ID NO: 950 - DNA, 1224 bp, Homo sapiens
ttccacaagcatttgattgccttcttcttgtgtaccgtccccatcggaaattgcttaggaagagtctttgagatctaattaagatctgtttccttgctctgtcgcagtgccctataaggactgccaggcaataatgaagkttyttttactgaaggatgcgaaggaagatgactgtggccaggatccgtrtatcagggaattaggattatatggacttgaagccactttgatccctgttttatcgtttgagtttttgtctcttcccagtttctctgagaagctttctcatcytgaagattacgggggactcatttttaccagccccagagyagtggaagcagcagagttatgtttggagcaaaacaataaaactgaaktctgggaaaggtctctgaaagaaaaatggaatgccaagtcagtgtatgtggttggaaatgctactgyttctctagtgagtaaaattggcctggatacagaaggagaaacctgtggaaatgcagaaaagcttgcagaatatatttgttccagggagtcctcagcactgcctcttctatttccctgtggaaacctcaaaagagaaatcctgccaaaagcgctcaaggacaaagggattgccatggaaagcataactgtgtatcagacagttgcacacccaggaatccaagggaacctgaacagctactattcccagcmgdgggttccagccagcatcacattttttagtccctctggcctcacatacagtctcaagcacattcaggagttatctggtgacaatatcgatcaaattaagtttgcagccatcggccccactacggctcgcgcgctggccgcccagggccttcctgtaagctgcactgcagagagccccacgcmayaagccctggccactggcatcaggaaggctctccagccccatggctgctgctgagtcagccacctagcgctggccccatgcagcctccctgggctgggctggctctggatggagccaggcatcggyaagggctctcgggagctgctgccgtcagactcctgcctcaagcctgagtggaagcacctgaggaccggggatcgggacctgacctggggctggcctcaggcccacgtgcacgtgactgccctctgtggaagccagcttaaaccctagccctgtgagagcttcctgtgcccagcaggaaggaagtcaaataaaccacactgactacctgtgcttactgagtg

SEQ ID NO: 951 - DNA, 1680 bp, Homo sapiens
cggtgcgcatgcgcgagcscctagctgcgcgcagccacccacgmgaccccagtctgaggtgcggggtcctggggcccrgygcgggtggcygccgcggcccctcgggctgcgtggggagggggcttccgcccctgttgtcattgctcctgcagccttttcgctgggactgcgcgacaccgccccccgaccgggtgcccgctgtgtgccaggccgggtgctgggcacggtcccgcgagtgccctataaggactgccaggcaataatgaagkttyttttactgaaggatgcgaaggaagatgactgtggccaggatccgtrtatcagggaattaggattatatggacttgaagccactttgatccctgttttatcgtttgagtttttgtctcttcccagtttctctgagaagctttctcatcytgaagattacgggggactcatttttaccagccccagagyagtggaagcagcagagttatgtttggagcaaaacaataaaactgaaktctgggaaaggtctctgaaagaaaaatggaatgccaagtcagtgtatgtggttggaaatgctactgyttctctagtgagtaaaattggcctggatacagaaggagaaacctgtggaaatgcagaaaagcttgcagaatatatttgttccagggagtcctcagcactgcctcttctatttccctgtggaaacctcaaaagagaaatcctgccaaaagcgctcaaggacaaagggattgccatggaaagcataactgtgtatcagacagttgcacacccaggaatccaagggaacctgaacagctactattcccagcmgdgggttccagccagcatcacattttttagtccctctggcctcacatacagtctcaagcacattcaggagttatctggtgacaatatcgatcaaattaagaaacaccyttgaactggctccagagggactgaggagagggtgcaggatgtgacccagagcccaaggacagacactgccactcactgcagtcaggaagagcaaaaggcttcacctgccttctcacaggtgcatctcatgtggggagtatgcaccgctctcccagttttaaagatggagcacggggctcagagacatcatatggcctgtctgtaggtcacactgctgagaaggaagagctgcagttgaacctgggaagactgattccacattgtcagccatggtgatgccttgccatggtctcaggagctgctgagcagttgatgcacttctgggcagtaactgatacaattctcacaccagtccagtggtgggtatccagaaaaagaggtcagtgttcctcattacaggtgaggacactgagggctagagaggtgaaacaacttgccaaagtcatgttttgagttcctagaaggcccaggactcacacaggtcaccgaggaagaaaaacaatatctgaatcttrtggttagaaagattagagagaggccgggcgctgtggctcccacctggaatcccagcactttgggaggcctcaggcggatcacctgaggtcaggtgttccagaccagcctgtccaatatgatgaaaaccccgtctttactaaaaatataaaaattagctgggcatggtggcatgcgcctataatcccagctacatgggaggctgagacaggagaatcgcttgaaccctggagactg

SEQ ID NO: 952 - DNA, 1433 bp, Homo sapiens
cggtgcgcatgcgcgagcscctagctgcgcgcagccacccacgmgaccccagtctgaggtgcggggtcctggggcccrgygcgggtggcygccgcggcccctcgggctgcgtggggagggggcttccgcccctgttgtcattgctcctgcagccttttcgctgggactgcgcgacaccgccccccgaccgggtgcccgctgtgtgccaggccgggtgctgggcacggtcccgcgagtgccctataaggactgccaggcaataatgaagkttyttttactgaaggatgcgaaggaagatgactgtggccaggatccgtrtatcagggaattaggattatatggacttgaagccactttgatccctgttttatcgtttgagtttttgtctcttcccagtttctctgagaagctttctcatcytgaagattacgggggactcatttttaccagccccagagyagtggaagcagcagagttatgtttggagcaaaacaataaaactgaaktctgggaaaggtctctgaaagaaaaatggaatgccaagtcagtgtatgtggttggaaatgctactgyttctctagtgagtaaaattggcctggatacagaaggagaaacctgtggaaatgcagaaaagcttgcagaatatatttgttccagggagtcctcagcactgcctcttctatttccctgtggaaacctcaaaagagaaatcctgccaaaagcgctcaaggacaaagggattgccatggaaagcataactgtgtatcagacagttgcacacccaggaatccaagggaacctgaacagctactattcccagcmgdgggttccagccagcatcacattttttagtccctctggcctcacatacagtctcaagcacattcaggagttatctggtgacaatatcgatcaaattaagagatggggtctcactgtgttgcctaggctgatctcaaactcctggcctcaagtaatcttcccaccttggcctcccaaaattttgcagccatcggccccactacggctcgcgcgctggccgcccagggccttcctgtaagctgcactgcagagagccccacgcmayaagccctggccactggcatcaggaaggctctccagccccatggctgctgctgagtcagccacctagcgctggccccatgcagcctccctgggctgggctggctctggatggagccaggcatcggyaagggctctcgggagctgctgccgtcagactcctgcctcaagcctgagtggaagcacctgaggaccggggatcgggacctgacctggggctggcctcaggcccacgtgcacgtgactgccctctgtggaagccagcttaaaccctagccctgtgagagcttcctgtgcccagcaggaaggaagtcaaataaaccacactgactacctgtgcttactgagtg

SEQ ID NO: 953 - DNA, 1519 bp, Homo sapiens
ggctgcggctcccggcgtgcagcttggtggcggctgagccggcagcgggccgcctcaggcagccccggccgggccgcccgggtccccggcagcggggtaggatggcgctaaagcggatccagaaggctgtacaagaagcatggtgccagcatctgcttctggtgaggcctcaggaagcttacaatcatggcagaaagcaaaggagaagcaggcgtgtcacctggaattaaccgacttgcagagggatcctcctgcccagtgttctgcaggacctgtcggtgatgacttgttccactggcaggccaccatcatgggcccgaatgacagtccttaccaaggaggtgttttcttcctgaccatccactttcctayagattacccgttcaagcccccaaaggttgctttcacaaccaaaatttatcaccctaatatcaacagcaatggcagcatctgccttgatatcctgcggtctcagtggtctccagcgttgactgtgtcaaaagttctcttgtccatctgctcgctgctctgcgaccccaaccccgatgaccccctggtgccagagatagcacacacctacaaggccgacagagagaagtacaacagactagcaagagagtggacacaaaaatatgctatgtaagtgccttggaggttttacatgagacactgtccaagagaagctggcagagaggtcttcccttaaaactttgggctgttggctgagccattcaaagagcatcatctgttcttcaaacaaatgttggtcacccastctctccagctgcagcatgttggtgccattttcagcaattacggctttgacagtgccacctctttgatgccaaatcagcaaccattgttgttatgatctgcagtcttcctggtgacactggaatctctctctctgccgcctcagtttgtctgctggtctcttggggggccaggccctgcacgtctctcctacccggcctcaaatggtgctgctgcccatgatggtaccacaccagggcctcagcctggcccctcaccacataccctttgccttttagaactcagtgccatcctgggtgcccagggcagagcaggctttgttcgcacctcatctgctgcagaaccacatcctgaggagtctcagcttatcctggagggaattgggaacagtgtcamtgggaagtgaaggcctagccctgtggcttccaccagtctcctcctgcagtgccacgtggtggcatttctcgcctcacaccaagaagcagcaagtggaaaatttcaggatacaaagcacataacaccccataagagatgattatgttttyagaagcaagagcaaaattatgaaacctctagagatttgggtcatgttactccatttgatgaagattctcactaccgcccgctcctcccataggagcctacactaagtccaagtgtgagccattcacagactagaacacaaggagggagagagactcttaaacgtaaataaaaatgcaattcactcacaactctaaatgat

SEQ ID NO: 954 - DNA, 1194 bp, Homo sapiens
ttttttttttcaaaaaaatgttggttgcaacctattaaattgatttcgtgacacactagttcataaccctcagtttgaacaactctgacctagacgcctgccaagtcttgggaaaataggaaggagacagataattaagtttgggagatgcatagtctaaggccagggttctcaatgttggcagtgcaagatcacgtgaggtacgactgaacacggagatctccaaaactgcggagagttttgcgtgtgaacgtatgcacagacatctacatggaaatggctgtaacgcatccagccataaggcgtacgagggtatatatacttacagagttaagaaccactrttctcaggagttatatgacagcctgggaagacgcccaggatgtaggaacagggagcaggcgagcgtgtggcaccttgagggtgctccgcgcgtctccgtaaagccaacgagcccctcctcttcgctggcctctccggggccttgctgactagtggtcgaagccacaggaccaggtgcgggtggccagcgtaacccgggcagccccgctgcttcccctcggccgcgccaggacgctcggcacgcggcgacgacggccccacagtgccccgcgcgcgcaagcgcaggctgcggctcccggcgtgcagcttggtggcggctgagccggcagcgggccgcctcaggcagccccggccgggccgcccgggtccccggcagcggggtaggatggcgctaaagcggatccagaaggaattaaccgacttgcagagggatcctcctgcccagtgttctgcaggacctgtcggtgatgactaatgacagtccttaccaaggaggtgttttcttcctgaccatccactttcctayagattacccgttcaagcccccaaagagtttcgctcttgttgcccaggatggagtgcaatggcgtgatctcggctcaccgcaacatccacctcccaggttcaagcaattctcctgcctcagcctcccgagtagctgggattacaggcctgcaccaccatgcccggctaattttgtatttttaatagagatggggtttctccatgttgaggctggtctcgaactgctgacctcaggtgatccgcctgtctcagcctcccaaagtgctgggattacaggtgtgagccaccatgcctggcccagtgtttggttttctgtccttgtgatag

SEQ ID NO: 955 - DNA, 2015 bp, Homo sapiens
ttttttttttcaaaaaaatgttggttgcaacctattaaattgatttcgtgacacactagttcataaccctcagtttgaacaactctgacctagacgcctgccaagtcttgggaaaataggaaggagacagataattaagtttgggagatgcatagtctaaggccagggttctcaatgttggcagtgcaagatcacgtgaggtacgactgaacacggagatctccaaaactgcggagagttttgcgtgtgaacgtatgcacagacatctacatggaaatggctgtaacgcatccagccataaggcgtacgagggtatatatacttacagagttaagaaccactrttctcaggagttatatgacagcctgggaagacgcccaggatgtaggaacagggagcaggcgagcgtgtggcaccttgagggtgctccgcgcgtctccgtaaagccaacgagcccctcctcttcgctggcctctccggggccttgctgactagtggtcgaagccacaggaccaggtgcgggtggccagcgtaacccgggcagccccgctgcttcccctcggccgcgccaggacgctcggcacgcggcgacgacggccccacagtgccccgcgcgcgcaagcgcaggctgcggctcccggcgtgcagcttggtggcggctgagccggcagcgggccgcctcaggcagccccggccgggccgcccgggtccccggcagcggggtaggatggcgctaaagcggatccagaaggaattaaccgacttgcagagggatcctcctgcccagtgttctgcaggacctgtcggtgatgactaatgacagtccttaccaaggaggtgttttcttcctgaccatccactttcctayagattacccgttcaagcccccaaaggttgctttcacaaccaaaatttatcaccctaatatcaacagcaatggcagcatctgccttgatatcctgcggtctcagtggtctccagcgttgactgtgtcaaaagttctcttgtccatctgctcgctgctctgcgaccccaaccccgatgaccccctggtgccagagatagcacacacctacaaggccgacagagagaagtacaacagactagcaagagagtggacacaaaaatatgctatgtaagtgccttggaggttttacatgagacactgtccaagagaagctggcagagaggtcttcccttaaaactttgggctgttggctgagccattcaaagagcatcatctgttcttcaaacaaatgttggtcacccastctctccagctgcagcatgttggtgccattttcagcaattacggctttgacagtgccacctctttgatgccaaatcagcaaccattgttgttatgatctgcagtcttcctggtgacactggaatctctctctctgccgcctcagtttgtctgctggtctcttggggggccaggccctgcacgtctctcctacccggcctcaaatggtgctgctgcccatgatggtaccacaccagggcctcagcctggcccctcaccacataccctttgccttttagaactcagtgccatcctgggtgcccagggcagagcaggctttgttcgcacctcatctgctgcagaaccacatcctgaggagtctcagcttatcctggagggaattgggaacagtgtcamtgggaagtgaaggcctagccctgtggcttccaccagtctcctcctgcagtgccacgtggtggcatttctcgcctcacaccaagaagcagcaagtggaaaatttcaggatacaaagcacataacaccccataagagatgattatgttttyagaagcaagagcaaaattatgaaacctctagagatttgggtcatgttactccatttgatgaagattctcactaccgcccgctcctcccataggagcctacactaagtccaagtgtgagccattcacagactagaacacaaggagggagagagactcttaaacgtaaataaaaatgcaattcactcacaactctaaatgat

SEQ ID NO: 956 - DNA, 1804 bp, Homo sapiens
ttttttttttcaaaaaaatgttggttgcaacctattaaattgatttcgtgacacactagttcataaccctcagtttgaacaactctgacctagacgcctgccaagtcttgggaaaataggaaggagacagataattaagtttgggagatgcatagtctaaggccagggttctcaatgttggcagtgcaagatcacgtgaggtacgactgaacacggagatctccaaaactgcggagagttttgcgtgtgaacgtatgcacagacatctacatggaaatggctgtaacgcatccagccataaggcgtacgagggtatatatacttacagagttaagaaccactrttctcaggagttatatgacagcctgggaagacgcccaggatgtaggaacagggagcaggcgagcgtgtggcaccttgagggtgctccgcgcgtctccgtaaagccaacgagcccctcctcttcgctggcctctccggggccttgctgactagtggtcgaagccacaggaccaggtgcgggtggccagcgtaacccgggcagccccgctgcttcccctcggccgcgccaggacgctcggcacgcggcgacgacggccccacagtgccccgcgcgcgcaagcgcaggctgcggctcccggcgtgcagcttggtggcggctgagccggcagcgggccgcctcaggcagccccggccgggccgcccgggtccccggcagcggggtaggatggcgctaaagcggatccagaaggaattaaccgacttgcagagggatcctcctgcccagtgttctgcaggacctgtcggtgatgacttgttccactggcaggccaccatcatgggcccgaatgacagtccttaccaaggaggtgttttcttcctgaccatccactttcctayagattacccgttcaagcccccaaaggttgctttcacaaccaaaatttatcaccctaatatcaacagcaatggcagcatctgccttgatatcctgcggtctcagtggtctccagcgttgactgtgtcaaaagttctcttgtccatctgctcgctgctctgcgaccccaaccccgatgaccccctggtgccagagatagcacacacctacaaggccgacagagagaagtacaacagactagcaagagagtggacacaaaaatatgctatgtaagtgccttggaggttttacatgagacactgtccaagagaagctggcagagaggtcttcccttaaaactttgggctgttggctgagccattcaaagagcatcatctgttcttcaaacaaatgttggtcacccastctctccagctgcagcatgttggtgccattttcagcaattacggctttgacagtgccacctctttgatgccaaatcagcaaccattgttgttatgatctgcagtcttcctggtgacactggaatctctctctctgccgcctcagtttgtctgctggtctcttggggggccaggccctgcacgtctctcctacccggcctcaaatggtgctgctgcccatgatggtaccacaccagggcctcagcctggcccctcaccacataccctttgccttttagaactcagtgccatcctgggtgcccagggcagagcaggctttgttcgcacctcatctgctgcagaaccacatcctgaggagtctcagcttatctcgtcatgctgccggctcttggactggtcgggctgcagccggaaccarccctcctcctgctgygccacccgcagtctctggacatcgatcaccactttgcccaggaagtcgtttcggctgacaaggtcccag

SEQ ID NO: 957 - DNA, 2118 bp, Homo sapiens
ttttttttttcaaaaaaatgttggttgcaacctattaaattgatttcgtgacacactagttcataaccctcagtttgaacaactctgacctagacgcctgccaagtcttgggaaaataggaaggagacagataattaagtttgggagatgcatagtctaaggccagggttctcaatgttggcagtgcaagatcacgtgaggtacgactgaacacggagatctccaaaactgcggagagttttgcgtgtgaacgtatgcacagacatctacatggaaatggctgtaacgcatccagccataaggcgtacgagggtatatatacttacagagttaagaaccactrttctcaggagttatatgacagcctgggaagacgcccaggatgtaggaacagggagcaggcgagcgtgtggcaccttgagggtgctccgcgcgtctccgtaaagccaacgagcccctcctcttcgctggcctctccggggccttgctgactagtggtcgaagccacaggaccaggtgcgggtggccagcgtaacccgggcagccccgctgcttcccctcggccgcgccaggacgctcggcacgcggcgacgacggccccacagtgccccgcgcgcgcaagcgcaggctgcggctcccggcgtgcagcttggtggcggctgagccggcagcgggccgcctcaggcagccccggccgggccgcccgggtccccggcagcggggtaggatggcgctaaagcggatccagaaggaattaaccgacttgcagagggatcctcctgcccagtgttctgcaggacctgtcggtgatgacttgttccactggcaggccaccatcatgggcccgaatgacagtccttaccaaggaggtgttttcttcctgaccatccactttcctayagattacccgttcaagcccccaaagagtttcgctcttgttgcccaggatggagtgcaatggcgtgatctcggctcaccgcaacatccacctcccaggttgctttcacaaccaaaatttatcaccctaatatcaacagcaatggcagcatctgccttgatatcctgcggtctcagtggtctccagcgttgactgtgtcaaaagttctcttgtccatctgctcgctgctctgcgaccccaaccccgatgaccccctggtgccagagatagcacacacctacaaggccgacagagagaagtacaacagactagcaagagagtggacacaaaaatatgctatgtaagtgccttggaggttttacatgagacactgtccaagagaagctggcagagaggtcttcccttaaaactttgggctgttggctgagccattcaaagagcatcatctgttcttcaaacaaatgttggtcacccastctctccagctgcagcatgttggtgccattttcagcaattacggctttgacagtgccacctctttgatgccaaatcagcaaccattgttgttatgatctgcagtcttcctggtgacactggaatctctctctctgccgcctcagtttgtctgctggtctcttggggggccaggccctgcacgtctctcctacccggcctcaaatggtgctgctgcccatgatggtaccacaccagggcctcagcctggcccctcaccacataccctttgccttttagaactcagtgccatcctgggtgcccagggcagagcaggctttgttcgcacctcatctgctgcagaaccacatcctgaggagtctcagcttatcctggagggaattgggaacagtgtcamtgggaagtgaaggcctagccctgtggcttccaccagtctcctcctgcagtgccacgtggtggcatttctcgcctcacaccaagaagcagcaagtggaaaatttcaggatacaaagcacataacaccccataagagatgattatgttttyagaagcaagagcaaaattatgaaacctctagagatttgggtcatgttactccatttgatgaagattctcactaccgcccgctcctcccataggagcctacactaagtccaagtgtgagccattcacagactagaacacaaggagggagagagactcttaaacgtaaataaaaatgcaattcactcacaactctaaatgat

SEQ ID NO: 958 - DNA, 1937 bp, Homo sapiens
ttttttttttcaaaaaaatgttggttgcaacctattaaattgatttcgtgacacactagttcataaccctcagtttgaacaactctgacctagacgcctgccaagtcttgggaaaataggaaggagacagataattaagtttgggagatgcatagtctaaggccagggttctcaatgttggcagtgcaagatcacgtgaggtacgactgaacacggagatctccaaaactgcggagagttttgcgtgtgaacgtatgcacagacatctacatggaaatggctgtaacgcatccagccataaggcgtacgagggtatatatacttacagagttaagaaccactrttctcaggagttatatgacagcctgggaagacgcccaggatgtaggaacagggagcaggcgagcgtgtggcaccttgagggtgctccgcgcgtctccgtaaagccaacgagcccctcctcttcgctggcctctccggggccttgctgactagtggtcgaagccacaggaccaggtgcgggtggccagcgtaacccgggcagccccgctgcttcccctcggccgcgccaggacgctcggcacgcggcgacgacggccccacagtgccccgcgcgcgcaagcgcaggctgcggctcccggcgtgcagcttggtggcggctgagccggcagcgggccgcctcaggcagccccggccgggccgcccgggtccccggcagcggggtaggatggcgctaaagcggatccagaaggaattaaccgacttgcagagggatcctcctgcccagtgttctgcaggacctgtcggtgatgactgttgctttcacaaccaaaatttatcaccctaatatcaacagcaatggcagcatctgccttgatatcctgcggtctcagtggtctccagcgttgactgtgtcaaaagttctcttgtccatctgctcgctgctctgcgaccccaaccccgatgaccccctggtgccagagatagcacacacctacaaggccgacagagagaagtacaacagactagcaagagagtggacacaaaaatatgctatgtaagtgccttggaggttttacatgagacactgtccaagagaagctggcagagaggtcttcccttaaaactttgggctgttggctgagccattcaaagagcatcatctgttcttcaaacaaatgttggtcacccastctctccagctgcagcatgttggtgccattttcagcaattacggctttgacagtgccacctctttgatgccaaatcagcaaccattgttgttatgatctgcagtcttcctggtgacactggaatctctctctctgccgcctcagtttgtctgctggtctcttggggggccaggccctgcacgtctctcctacccggcctcaaatggtgctgctgcccatgatggtaccacaccagggcctcagcctggcccctcaccacataccctttgccttttagaactcagtgccatcctgggtgcccagggcagagcaggctttgttcgcacctcatctgctgcagaaccacatcctgaggagtctcagcttatcctggagggaattgggaacagtgtcamtgggaagtgaaggcctagccctgtggcttccaccagtctcctcctgcagtgccacgtggtggcatttctcgcctcacaccaagaagcagcaagtggaaaatttcaggatacaaagcacataacaccccataagagatgattatgttttyagaagcaagagcaaaattatgaaacctctagagatttgggtcatgttactccatttgatgaagattctcactaccgcccgctcctcccataggagcctacactaagtccaagtgtgagccattcacagactagaacacaaggagggagagagactcttaaacgtaaataaaaatgcaattcactcacaactctaaatgat

SEQ ID NO: 959 - DNA, 2047 bp, Homo sapiens
ttttttttttcaaaaaaatgttggttgcaacctattaaattgatttcgtgacacactagttcataaccctcagtttgaacaactctgacctagacgcctgccaagtcttgggaaaataggaaggagacagataattaagtttgggagatgcatagtctaaggccagggttctcaatgttggcagtgcaagatcacgtgaggtacgactgaacacggagatctccaaaactgcggagagttttgcgtgtgaacgtatgcacagacatctacatggaaatggctgtaacgcatccagccataaggcgtacgagggtatatatacttacagagttaagaaccactrttctcaggagttatatgacagcctgggaagacgcccaggatgtaggaacagggagcaggcgagcgtgtggcaccttgagggtgctccgcgcgtctccgtaaagccaacgagcccctcctcttcgctggcctctccggggccttgctgactagtggtcgaagccacaggaccaggtgcgggtggccagcgtaacccgggcagccccgctgcttcccctcggccgcgccaggacgctcggcacgcggcgacgacggccccacagtgccccgcgcgcgcaagcgcaggctgcggctcccggcgtgcagcttggtggcggctgagccggcagcgggccgcctcaggcagccccggccgggccgcccgggtccccggcagcggggtaggatggcgctaaagcggatccagaaggaattaaccgacttgcagagggatcctcctgcccagtgttctgcaggacctgtcggtgatgacttgttccactggcaggccaccatcatgggcccgaatgacagtccttaccaaggaggtgttttcttcctgaccatccactttcctayagattacccgttcaagcccccaaaggttgctttcacaaccaaaatttatcaccctaatatcaacagcaatggcagcatctgccttgatatcctgcggtctcagtggtctccagcgttgactgtgtcaaaagttctcttgtccatctgctcgctgctctgcgaccccaaccccgatgaccccctggtgccagagatagcacacacctacaaggccgacagagagaagtacaacagactagcaagagagtggacacaaaaatatgctatgtaagtgccttggaggttttacatgagacactgtccaagagaagctggcagagaggtcttcccttaaaactttgggctgttggctgagccattcaaagagcatcatctgttcttcaaacaaatgttggtcacccastctctccagctgcagcatgttggtgccattttcagcaattacggctttgacagtgccacctctttgatgccaaatcagcaaccattgttgttatgatctgcagtcttcctggtgacactggaatctctctctctgccgcctcagtttgtctgctggtctcttggggggccaggccctgcacgtctctcctacccggcctcaaatggtgctgctgcccatgatggtaccacaccagggcctcagcctggcccctcaccacataccctttgccttttagaactcagtgccatcctgggtgcccagggcagagcaggctttgttcgcacctcatctgctgcagaaccacatcctgaggagtctcagcttatcctggagggaattgggaacagtgtcamtgggaagtgaaggcctagccctgtggcttccaccagtctcctcctgcagtgccacgtggtggcatttctcgcctcacaccaagaagcagcaagtggaaaatttcaggatacaaagcacataacaccccataagagatgattatgttttyagaagcaagagcaaaattatgaaacctctagagatttgggtcatgttactccatttgatgaagattctcactaccgcccgctcctcccataggagcctacactaagtccaagtgtgagccattcacagactagaacacaaggagggagagagactcttaaacgtaaataaaaatgcaattcactcacaactctaaatgat

SEQ ID NO: 960 - DNA, 2663 bp, Homo sapiens
cctttgagacagtagaaagcgttacatccagaggcgagattctagcctggggtccccgccttcccggcctcctcttcctctccctctgactccctttcctgtgcccctccccctgcctctttcccggccagagtccagccttaacccgggcagagggcggagtcccgttaagggggtgtggggaggaggcggggccagggcaggggcggggcagagccgggccaagctgggcgggtcatgcgccctggccttcgcgcatctcccaggttagctgcgtgtccgggtgctaggctgcagacccgccgccatgacgctgcgcgcggccgtcttcgaccttgacggggtgctggcgctgccagcggtgttcggmgtcctcggccgcacggaggaggccctggcgctgcccagaggacttctgaatgatgctttccagaaagggggaccagagggtgccactacccggcttatgaaaggagagatcacactttcccagtggataccactcatggaagaaaactgcaggaagtgctccgagaccgctaaagtctgcctccccaagaatttctccataaaagaaatctttgacaaggcgatttcagccagaaagatcaaccgccccatgctccaggcagctctcatgctcaggaagaaaggtggctttttgctcaggattcactactgccatcctcaccaacacctggctggacgaccgtgctgagagagatggcctggcccagctgatgtgtgagctgaagatgcactttgacttcctgatagagtcgtgtcaggtgggaatggtcaaacctgaacctcagatctacaagtttctgctggacaccctgaaggccagccccagtgaggtcgtttttttggatgacatcggggctaatctgaagccagcccgtgacttgggmatggtcaccatcctggtccaggacactgacacggccctgaaagaactggagaaagtgaccggaatccagaaatagaagaatattgcatggaagtgttatgtaaggagatggtaaccttcctggataaactgggcctctctcaagcagtgttcattggccatgactggggtggcatgctggtgtggtacatggctctcttctaccccgagagagtgagggcggtggccagtttgaatactcccttcataccagcaaatcccaacatgtcccctttggagagtatcaaagccaacccagtatttgattaccagctctacttccaagaaccaggagtggctgaggctgaactggaacagaacctgagtcggactttcaaaagcctcttcagagcaagygatgagagtgttttatccatgcataaagtctgtgaagcrggaggactttttgtaaatagcccagaagagcccagcctcagcaggatggtcactgaggaggaaatccagttctatgtgcagcagttcaagaagtctggtttcagaggtcctctaaactggtaccgaaacatggaaaggaactggaagtgggcttgcaaaagcttgggacggaagatcctgattccggccctgatggtcacggcggagaaggacttcgtgctcgttcctcagatgtcccagcacatggaggactggattccccacctgaaaaggggacacattgaggactgtgggcactggacacagatggacaagtaaggaggttgggggctcctggggwcggggagagcagggccccccgttcaccttccataaaagctttcctggtttcattgtgctggctttggcctggcttagccactcatgtcactcacctctgccttcgagttggctgggtaggtgcagacaagtgtgaatggctatttttttcttttacttctccctttcccccaggccmaccgaggtgaatcagatcctcattaagtggctggattctgatgcccggaacccaccggtggtctcaaagatgtagaacgcagcgtgtgcccacgctcagcaggtgtgccrtccttccacctgctggggcaccattcttagtatacagaggtggccttacacacatctygcatggatggcagcattgttctgaaggggtttgcagaaaaaaaagattttctttacataaagtgaatcaaatttgacattattttagatcccagagaaatcaggtgtgattagttctccaggcatgaatgcatcgtccctttatytgtaagaacccttagtgtcctgtagggggacagaatggggtggccaggtggtgatttctctttgaccaatgcatagtttggcagaaaaatcagccgttcatttagaagaatcttagcagagattgggatgccttactcaataaagctaagatgactatgctgctggctgtctttgttcttggagaggtggagtgactgttcacggagaatgcacggcatggggatgaaccctttccctctgcttttgagccctgttctgggctccaaggtgctgtatgatctaggccgtgctggccaggagacaatcctatggggatggcagtggtgtcttgtgctctgtcccctagagcagtcactggccacaggtagccacctgcctttctcccggcttccctagcagagtttgctcaggcacaaatgtgcacctggagcatttgaaatgtgctagtgaggctgaggaagagaattttaaatttcattgaatt

SEQ ID NO: 961 - DNA, 2737 bp, Homo sapiens
cctttgagacagtagaaagcgttacatccagaggcgagattctagcctggggtccccgccttcccggcctcctcttcctctccctctgactccctttcctgtgcccctccccctgcctctttcccggccagagtccagccttaacccgggcagagggcggagtcccgttaagggggtgtggggaggaggcggggccagggcaggggcggggcagagccgggccaagctgggcgggtcatgcgccctggccttcgcgcatctcccaggttagctgcgtgtccgggtgctaggctgcagacccgccgccatgacgctgcgcgcggccgtcttcgaccttgacggggtgctggcgctgccagcggtgttcggmgtcctcggccgcacggaggaggccctggcgctgcccagctctggaggctggaagtccaagatcaagatgtcagcaggaggacttctgaatgatgctttccagaaagggggaccagagggtgccactacccggcttatgaaaggagagatcacactttcccagtggataccactcatggaagaaaactgcaggaagtgctccgagaccgctaaagtctgcctccccaagaatttctccataaaagaaatctttgacaaggcgatttcagccagaaagatcaaccgccccatgctccaggcagctctcatgctcaggaagaaaggattcactactgccatcctcaccaacacctggctggacgaccgtgctgagagagatggcctggcccagctgatgtgtgagctgaagatgcactttgacttcctgatagagtcgtgtcaggtgggaatggtcaaacctgaacctcagatctacaagtttctgctggacaccctgaaggccagccccagtgaggtcgtttttttggatgacatcggggctaatctgaagccagcccgtgacttgggmatggtcaccatcctggtccaggacactgacacggccctgaaagaactggagaaagtgaccggaatccagcttctcaataccccggcccctctgccgacctcttgcaatccaagtgacatgagccatgggtacgtgacagtaaagcccagggtccgtctgcattttgtggagctgggctccggccctgctgtgtgcctctgccatggatttcccgagagktggtattcttggaggtaccagatccctgctctggcccaggcaggttaccrggtcctagctatggacatgaaaggctatggagagtcatctgctcctcccgaaatagaagaatattgcatggaagtgttatgtaaggagatggtaaccttcctggataaactgggcctctctcaagcagtgttcattggccatgactggggtggcatgctggtgtggtacatggctctcttctaccccgagagagtgagggcggtggccagtttgaatactcccttcataccagcaaatcccaacatgtcccctttggagagtatcaaagccaacccagtatttgattaccagctctacttccaagaaccaggagtggctgaggctgaactggaacagaacctgagtcggactttcaaaagcctcttcagagcaagygatgagagtgttttatccatgcataaagtctgtgaagcrggaggactttttgtaaatagcccagaagagcccagcctcagcaggatggtcactgaggaggaaatccagttctatgtgcagcagttcaagaagtctggtttcagaggtcctctaaactggtaccgaaacatggaaaggaactggaagtgggcttgcaaaagcttgggacggaagatcctgattccggccctgatggtcacggcggagaaggacttcgtgctcgttcctcagatgtcccagcacatggaggactggattccccacctgaaaaggggacacattgaggactgtgggcactggacacagatggacaagccmaccgaggtgaatcagatcctcattaagtggctggattctgatgcccggaacccaccggtggtctcaaagatgtagaacgcagcgtgtgcccacgctcagcaggtgtgccrtccttccacctgctggggcaccattcttagtatacagaggtggccttacacacatctygcatggatggcagcattgttctgaaggggtttgcagaaaaaaaagattttctttacataaagtgaatcaaatttgacattattttagatcccagagaaatcaggtgtgattagttctccaggcatgaatgcatcgtccctttatytgtaagaacccttagtgtcctgtagggggacagaatggggtggccaggtggtgatttctctttgaccaatgcatagtttggcagaaaaatcagccgttcatttagaagaatcttagcagagattgggatgccttactcaataaagctaagatgactatgctgctggctgtctttgttcttggagaggtggagtgactgttcacggagaatgcacggcatggggatgaaccctttccctctgcttttgagccctgttctgggctccaaggtgctgtatgatctaggccgtgctggccaggagacaatcctatggggatggcagtggtgtcttgtgctctgtcccctagagcagtcactggccacaggtagccacctgcctttctcccggcttccctagcagagtttgctcaggcacaaatgtgcacctggagcatttgaaatgtgctagtgaggctgaggaagagaattttaaatttcattgaatt

SEQ ID NO: 962 - DNA, 2698 bp, Homo sapiens
cctttgagacagtagaaagcgttacatccagaggcgagattctagcctggggtccccgccttcccggcctcctcttcctctccctctgactccctttcctgtgcccctccccctgcctctttcccggccagagtccagccttaacccgggcagagggcggagtcccgttaagggggtgtggggaggaggcggggccagggcaggggcggggcagagccgggccaagctgggcgggtcatgcgccctggccttcgcgcatctcccaggttagctgcgtgtccgggtgctaggctgcagacccgccgccatgacgctgcgcgcggccgtcttcgaccttgacggggtgctggcgctgccagcggtgttcggmgtcctcggccgcacggaggaggccctggcgctgcccagaggacttctgaatgatgctttccagaaagggggaccagagggtgccactacccggcttatgaaaggagagatcacactttcccagtggataccactcatggaagaaaactgcaggaagtgctccgagaccgctaaagtctgcctccccaagaatttctccataaaagaaatctttgacaaggcgatttcagccagaaagatcaaccgccccatgctccaggcagctctcatgctcaggaagaaaggattcactactgccatcctcaccaacacctggctggacgaccgtgctgagagagatggcctggcccagctgatgtgtgagctgaagatgcactttgacttcctgatagagtcgtgtcaggtgggaatggtcaaacctgaacctcagatctacaagtttctgctggacaccctgaaggccagccccagtgaggtcgtttttttggatgacatcggggctaatctgaagccagcccgtgacttgggmatggtcaccatcctggtccaggacactgacacggccctgaaagaactggagaaagtgaccggaatccagcttctcaataccccggcccctctgccgacctcttgcaatccaagtgacatgagccatgggtacgtgacagtaaagcccagggtccgtctgcattttgtggagctgggctccggccctgctgtgtgcctctgccatggatttcccgagagktggtattcttggaggtaccagatccctgctctggcccaggcaggttaccrggtcctagctatggacatgaaaggctatggagagtcatctgctcctcccgaaatagaagaatattgcatggaagtgttatgtaaggagatggtaaccttcctggataaactgggcctctctcaagcagtgttcattggccatgactggggtggcatgctggtgtggtacatggctctcttctaccccgagagagtgagggcggtggccagtttgaatactcccttcataccagcaaatcccaacatgtcccctttggagagtatcaaagccaacccagtatttgattaccagctctacttccaagaaccaggagtggctgaggctgaactggaacagaacctgagtcggactttcaaaagcctcttcagagcaagygatgagagtgttttatccatgcataaagtctgtgaagcrggaggactttttgtaaatagcccagaagagcccagcctcagcaggatggtcactgaggaggaaatccagttctatgtgcagcagttcaagaagtctggtttcagaggtcctctaaactggtaccgaaacatggaaaggaactggaagtgggcttgcaaaagcttgggacggaagatcctgattccggccctgatggtcacggcggagaaggacttcgtgctcgttcctcagatgtcccagcacatggaggactggattccccacctgaaaaggggacacattgaggactgtgggcactggacacagatggacaagccmaccgaggtgaatcagatcctcattaagtggctggattctgatgcccggaacccaccggtggtctcaaagatgtagaacgcagcgtgtgcccacgctcagcaggtgtgccrtccttccacctgctggggcaccattcttagtatacagaggtggccttacacacatctygcatggatggcagcattgttctgaaggggtttgcagaaaaaaaagattttctttacataaagtgaatcaaatttgacattattttagatcccagagaaatcaggtgtgattagttctccaggcatgaatgcatcgtccctttatytgtaagaacccttagtgtcctgtagggggacagaatggggtggccaggtggtgatttctctttgaccaatgcatagtttggcagaaaaatcagccgttcatttagaagaatcttagcagagattgggatgccttactcaataaagctaagatgactatgctgctggctgtctttgttcttggagaggtggagtgactgttcacggagaatgcacggcatggggatgaaccctttccctctgcttttgagccctgttctgggctccaaggtgctgtatgatctaggccgtgctggccaggagacaatcctatggggatggcagtggtgtcttgtgctctgtcccctagagcagtcactggccacaggtagccacctgcctttctcccggcttccctagcagagtttgctcaggcacaaatgtgcacctggagcatttgaaatgtgctagtgaggctgaggaagagaattttaaatttcattgaatt

SEQ ID NO: 963 - DNA, 3474 bp, Homo sapiens
gatgctctcctctcagaagctgcagccgtgatggaagtttgaatgttgagccgctgtgaggcgaggccgggctcaggcgagggagatgagagacagagacggcggcggcggcggcggcycggcccggcccggcctgaagcccctctcagcaacccgtgagcatccgcgggggcggcgccggcagcggcggcgtttctcgcttcttcttcgtcttttctaactgtgcagcctcttcctcggcttctcctgaaagggaaggtggaagccgtgggcttgggcgggagccggctgaggcgcggcggcggcggcacctccccctcctggagcggggggagaagcggcggcggcggcgcccccggtggccccggcggctgcagctccagggagggggtctgagtcgcctgtcaccatttccagggctgggaacgccggagagttggtctytccccttctactgcctccaacacggcggcggcggcggcggcggcggcggcacatggagggacccgggccggttttaaacctctcgtccgccgccgccgcaccccccgtggcccgggctccggaggccgctggaggaggcagccgttcggaggattattcgtcttctccccattccgctgccgccgctgccaggcctctggctgctgaggagaagcaggcccagtagctgccaccatccagcagctgctgccgcagccattacccggctgcggtccagagccaagcagcggctgagcgaggggcatcagctaccgccaagtccagagccatttccatcctgcagagccccgccaccagcagcttctgccatctctctcctcctttttcttcagccacaggctcccagacaggacagccatcatcaaagagatcgttagcagaaacaaaaggagatatcaagaggatggattcgactwakacttgacctatatttatctaaacattattgmtabgrgatttcctgcagaaagacttgaaggcgtatacaggaacaatattgatgatgtagtaaggtttttggattcaaagsataaaaaccattacaagakayacaatctttgtgctgaaagacattatgacaccrccaaatctamttacagagttgcgyaatatccttttgaagacyataacccacmayagctagaacttatcaaacccttttgtgaagatcttgacyaatggctaagtgaagatgacaatcatgttgcagcaattcactgtaaagctggaaagggacgaactggtataatgatttatgcatatttattacatcggggcaaatttttaaaggcacaagaggccctagatttctatgggkaartaaggaccagagacaaaaaggdagtaactattcccagwyagaggcgctatgtgtaktactakagctamctggtaaagaatcatstggattatagaccagtggcactgttgtttcacaagatgatgtttgaaactattccaatgttcagtgkcggaacttgmaatcctyagtttgtggtctgccagctaaaggtgaagatgtattcctccaattcaggacccacacgatgggaggacaagttcatgtattttgagttccctcagccgttacctgtgtgtggtgatatcaaagtakagttcttccacaaacagaacaagatgctaaaaaaggacaaaatgtttcacttttgggtaaatacattcttcataccaggaccagaggaaacctcagaaaaagtagaaaatggaagtctatgtgatcaagaaattgatagcatttgcagtatagagcgtgcagataatgacaaggagtatctagtacttactttaacaaaaaatgatcttgacaaagcaaataaagacaaagccaacygatacttttctccaaatkttaaggwgaagctgtacytcacaaaaacagtagaggagccgtcaaatccagaggctagcagttcaacttctgtaacaccagatgttagtgacaatgaacctgatcattatagatattctgacaccactgactctgatccagagaatgaaccttttgatgaagatcagcatacacaaattacaaaagtctgaatttttttttatcaagagggataaaacaccatgaaaacaaacttgaataaactgaaaagggacctttttttttaatggcaataggacattgtgtcagattaccagttatagaaacaattctcttttcgtgaccaatcttgttttaccctatacatccacagggttttgacacttgttgtccagttgaaaaaaggttgtgtagctgtgtcatgtatatacctttttgtgtcaaaaggacatttaaaattcaattaggattaataaagatggcactttcccattttattccagttttataaaaagtggagacagactggtgtgtatacgtaggaattttttccttttgtgttctgtcaccaactgaagtggctaaagagctttgtgatatactggttcacakcatacccctttgcacttgtggcaacagataagtttgcagttagctaagagaagtttctgaarggttttgctgcattcttgcatgtatttgggttaggggaatggagggaatgctcagaaaggaaataattttatgctggactctggaccatataccatctccagctatttacacacacctttctttagcatgctacagttattaatctggacattcgaggaattggctgctgtcactgcttgttgtttkcgcatttttttwaaagcatattggtgctagaaaaggcarctaaaggaagtgaatctgtattggggtacaggaatgaaccttctgcaacatcttaagatccacaaatgaaggratataaaaataatgtcatagataagaaacacagcaacaatgacttaaccatataaatgtggaggctatcaacaaagaatgggcttgaaacattataaaaattgacaatgatttgttaaatatgttttcttaattgtaacgacttctccatctcctgtgtaatcaaggccagtgctgaaagtcagatgctattagtacctacatcagtcaacaacttacacttattttactagttttcaatcatatacctgctgtgaatgcttcatgtgctgcctgcaagcttcttttttctcattaaatataaaatattttgtaatgctaaaaaaaaaaaaaagaacatagaagacaaacatcagaaataaacccatccactatggttaactcatttttgaatatggtgtaaagtcagtttaatgatgaaataatattattttcaacaaatagtacagaaattaaactatgcaaaaatactattaataatgatgttggatcattacctcacaccatacccccaaattaactcagaacatggcatacaccaaatataagagcaaaaactatgaaatttctagaagaagacagaaaaaaaattatgactttggcttagttgtttcttagaagtaacaggaaaagcataattcataaaagat

SEQ ID NO: 964 - DNA, 3029 bp, Homo sapiens
acattttacgacaggcgggattgttttgtggctgtcagctttcyccgtggtctgagtttgtggctgcatttttatctctggtggctctgctacggcggcgcagaaatgaggcagaagcggaaaggagatctcagccctgctgagctgatgatgctgactataggagatgttattaaacaactgattgaagcccacgagcaggggaaagacatcgatctaaataaggtgaaaaccaagacagctgccaaatatggmctttctgcccagccccgcctggtggatatcattgctgccgtccctcctcagtatcgcaaggtcttgatgcccaagttaaaggcgaaacccatcagaactgctagtgggattgctgtcgtggctgtgatgtgcaaaccccacagatgtccacacatcagttttacaggaaatatatgtgtatactgccctggtggacctgattctgattttgagtattccacccagtcttacactggctatgagccaacctccatgagagctatccgtgccagatatgaccctttcctacagacaagacaccgaatagaacagttaaaacaacttggtcatagtgtggataaagtggagtttattgtgatgggtggaacgtttatggcccttccagaagaatacagagattattttattcgaaatttacatgatgccttatcaggacatacttccaacaatatttacgaggcagtcaagtattctgagagaagcctcacaaagtgtattggaattactattgaaaccagaccagattactgcatgaagcgacatttaagtgacatgttgacctatggctgcacaaggctggagattggggtgcagagtgtttatgaagatgtggctagagacaccaacaggggccacactgtgaaggcagtgtgtgagtcatttcacctggccaaagattccggttttaaagtggtggcccatatgatgcctgacctgccaaacgtgggactagaaagagacattgaacagttcacagagttttttgagaaccctgcttttcgtcccgatgggctgaaactctatcctaccctggtgattcgtgggaccgggctttatgagctttggaaatcaggaagatataagagttactctcctagtgacctggttgaattggtggctcggatcctagccctcgtgcctccatggactcgagtgtaccgagtacagagggatattccaatgcctttagttagctcaggagtagagcatggtaacctgagagagctggcacttgcaagaatgaaagacctcggaatacagtgtcgagatgtgagaaccagagaagttggaatccaagaaattcatcacaaagtacggccataccaggttgaattggtaaggagagattatgttgcaaatggtggctgggaaacattcttgtcataygaagacccagatcaagacattttgattggcctcctacgattacgcaagtgaagcagaaagaatagctagagaagaacatgggtctgggaaaatcgctgtgatatcaggggtcggcaccaggaattattatagaaagatcggctacagattacaaggcccgtacatggtgaagatgctgaaataatggccacaccagtccactcttctgcagtatcctccctggcagaacacggagaatcaggatttcttaaatactcaacagagaggctgagcagagcaaatggggggcttcaccctcatcccgcagctgcagagactggaaactgccttcaaggccacggctggtcatctgctgaccacaccscagatccgccctctcctgcgtgcaccccaaaaaatcacttgcgtttttgaggcttaaatcatctatccagtttctacattttgcatgaggcctgcaggtggcctattttgactcagacggtgaaaaaagcaaattaactcatttggacaccataactcatgcaataaaactgattgtcattcgaggagcaaacttaagagtagtttatttatataccctggggacagaaagtcaggttgaaacaggaaaaccaccagactctaatctcagccctttaacgacatacgcattggagcgcaagttaggaaaatgagcttttgttttcatggaaatcattctgattacagtgctgatgtttagaaataaatagcagtgtgactgggaaagaggaattgcagttgtgggggtgtgagcctggcagcagccagccagcagcctctcccaggcgggagtctaccatccgagacggcgatgacaaagagcttcattccacattctttgttatctctacttcccaccctcttggcaactacagagcagtgtgggcagccccaagtgtggtccccagagagcgtttggctttcctgtctgtctatcctgagcgggtggagtctcaggttgtgtgcccctaaatcaagatttgcttccacagaagccattacttgcaattttttttttttttctgagaaagtctcgctgtgtcacccaggctggagtgcagtggcgcaatctcactgcatcctcygcctcccgggttcaagcgattctcccgcctcagcctcctgagtagctgggattacaggcacccgccgctgctaatttttgtatttttagtagagatgggggtttcaccatattggtcaggctggtctcgaactcctgacctcaggtgatcaacccaccttggcctccctaaatgccgggattacaggcatgagccaccgctcccagcctttgattttttaaggtggattttggttgttataaatggagaaaggtaagagttcaagtwcaacccgtgtgtgaaagcaaaacaatggaaaacaggattggcttcttcaaaggctcctcttgtagaactgcctctttgaaatttcgaggtaatctactttggagactctgcctggagagggtcagttcctaagttaaaagcatcgcttaaccttggctcctgtggcattttacaaaggtttaaaggaattgattcctctgaaagggcctgaaaataaaaagtctttaacat

SEQ ID NO: 965 - DNA, 3172 bp, Homo sapiens
acattttacgacaggcgggattgttttgtggctgtcagctttcyccgtggtctgagtttgtggctgcatttttatctctggtggctctgctacggcggcgcagaaatgaggcagaagcggaaaggagatctcagccctgctgagctgatgatgctgactataggagatgttattaaacaactgattgaagcccacgagcaggggaaagacatcgatctaaataaggtgaaaaccaagacagctgccaaatatggmctttctgcccagccccgcctggtggatatcattgctgccgtccctcctcagtatcgcaaggtcttgatgcccaagttaaaggcgaaacccatcagaactgctagtgggattgctgtcgtggctgtgatgtgcaaaccccacagatgtccacacatcagttttacaggaaatatatgtgtatactgccctggtggacctgattctgattttgagtattccacccagtcttacactggctatgagccaacctccatgagagctatccgtgccagatatgaccctttcctacagacaagacaccgaatagaacagttaaaacaacttggtcatagtgtggataaagtggagtttattgtgatgggtggaacgtttatggcccttccagaagaatacagagattattttattcgaaatttacatgatgccttatcaggacatacttccaacaatatttacgaggcagtcaagtattctgagagaagcctcacaaagtgtattggaattactattgaaaccagaccagattactgcatgaagcgacatttaagtgacatgttgacctatggctgcacaaggctggagattggggtgcagagtgtttatgaagatgtggctagagacaccaacaggggccacactgtgaaggcagtgtgtgagtcatttcacctggccaaagattccggttttaaagtggtggcccatatgatgcctgacctgccaaacgtgggactagaaagagacattgaacagttcacagagttttttgagaaccctgcttttcgtcccgatgggctgaaactctatcctaccctggtgattcgtgggaccgggctttatgagctttggaaatcaggaagatataagagttactctcctagtgacctggttgaattggtggctcggatcctagccctcgtgcctccatggactcgagtgtaccgagtacagagggatattccaatgcctttagttagctcaggagtagagcatggtaacctgagagagctggcacttgcaagaatgaaagacctcggaatacagtgtcgagatgtgagaaccagagaagttggaatccaagaaattcatcacaaagtacggccataccaggttgaattggtaaggagagattatgttgcaaatggtggctgggaaacattcttgtcataygaagacccagatcaagacattttgattggcctcctacgattacgcaagtgttcagaagaaactttccgtttcgaattgggtggaggtgtctccatagtacgagagctgcatgtgtatgggagtgtggtccctgtgagcagccgggatcctactaaatttcagcatcagggatttggcatgctgctgatggaggaagcagaaagaatagctagagaagaacatgggtctgggaaaatcgctgtgatatcaggggtcggcaccaggaattattatagaaagatcggctacagattacaaggcccgtacatggtgaagatgctgaaataatggccacaccagtccactcttctgcagtatcctccctggcagaacacggagaatcaggatttcttaaatactcaacagagaggctgagcagagcaaatggggggcttcaccctcatcccgcagctgcagagactggaaactgccttcaaggccacggctggtcatctgctgaccacaccscagatccgccctctcctgcgtgcaccccaaaaaatcacttgcgtttttgaggcttaaatcatctatccagtttctacattttgcatgaggcctgcaggtggcctattttgactcagacggtgaaaaaagcaaattaactcatttggacaccataactcatgcaataaaactgattgtcattcgaggagcaaacttaagagtagtttatttatataccctggggacagaaagtcaggttgaaacaggaaaaccaccagactctaatctcagccctttaacgacatacgcattggagcgcaagttaggaaaatgagcttttgttttcatggaaatcattctgattacagtgctgatgtttagaaataaatagcagtgtgactgggaaagaggaattgcagttgtgggggtgtgagcctggcagcagccagccagcagcctctcccaggcgggagtctaccatccgagacggcgatgacaaagagcttcattccacattctttgttatctctacttcccaccctcttggcaactacagagcagtgtgggcagccccaagtgtggtccccagagagcgtttggctttcctgtctgtctatcctgagcgggtggagtctcaggttgtgtgcccctaaatcaagatttgcttccacagaagccattacttgcaattttttttttttttctgagaaagtctcgctgtgtcacccaggctggagtgcagtggcgcaatctcactgcatcctcygcctcccgggttcaagcgattctcccgcctcagcctcctgagtagctgggattacaggcacccgccgctgctaatttttgtatttttagtagagatgggggtttcaccatattggtcaggctggtctcgaactcctgacctcaggtgatcaacccaccttggcctccctaaatgccgggattacaggcatgagccaccgctcccagcctttgattttttaaggtggattttggttgttataaatggagaaaggtaagagttcaagtwcaacccgtgtgtgaaagcaaaacaatggaaaacaggattggcttcttcaaaggctcctcttgtagaactgcctctttgaaatttcgaggtaatctactttggagactctgcctggagagggtcagttcctaagttaaaagcatcgcttaaccttggctcctgtggcattttacaaaggtttaaaggaattgattcctctgaaagggcctgaaaataaaaagtctttaacat

SEQ ID NO: 966 - DNA, 2325 bp, Homo sapiens
tgtgttcaaataaggcaagcgcccagttgtaaccaatctctttgtttctgtacctgatttctggttcctgtacatcactttaccttttttgtctataaattcattttgaccacgaggcacccccggagcctcggtgaatctgctgtgattttgtaggctgccggattcacaaattgtttgttgcttaatgaaactcctttaagtttaattcagctgaagtttttcttttatcagatggtgtcacaagaaggatctgaagtggagcttctagtatccccaggagcgcgaagtgaacacggaaggtacctgcaggatccaattgtgtccattgatctctcagagtggctgaggataatagagtttcttcttcaaggtctcaaggtctgaagcatcccacagaatgatcctactgaataactcccataagctgctggccctatacaaatccttggccaggagcatccctgagtccytgaaggtgtatggctctgtgtatcacatcaatcacgggaaccccttcaacatggaggtgctggtggattcctggcctgaatatcagatggttattatccggcctcaaaagcaggagatgactgatgacatggattcatacacaaacgtatatcgtatgttctccaaagascctcaaaaatcagaagaagttttgaaaaattgtgagatcgtaaactggaaacagagactccaaatccaaggtcttcaagaaagtttaggtgaggggataagagtggctacattttcaaagtcagtgaaagtagagcattcgagagcactcctcttggttacggaagatattctgaagctcaatgcctccagtaaaagcaagcttggaagctgggctgagacaggccacccagatgatgaatttgaaagtgaaactcccaactttaagtatgcccagctggatgtctcttattctgggctggtaaatgacaactggaagcgagggaagaatgagaggagcctgcattacatcaagcgctgcatagaagacctgccagcagcctgtatgctcggcccagagggagtcccrgtctcatgggtaaccatggacccttcttgtgaagtaggaatggcctacagcatggaaaaataccgaaggacaggcaacatggcacgagtgatggtgcgatacatgaaatatctgcgtcagaagaatattccattttacatctctgtgttggaagaaaatgaagactcccgcagatttgtggggcagtttggtttctttgaggcctcctgtgagtggcaccaatggacttgctacccacagaatctagttccattttagacaatgaagctgcttagtaatctctgccaagccatctcttaatattaaagcagacaccacagaatagatttcttcacttacaaatgcatattgggcacttataatacagcaggaactcttctcacctggagccttgatgttaaaagacacagccatgctcttgaggagcttacaatcctggctggaggcaggggagggtatattctttaaatatgcttaagtgttatagggaaagacggggttaccagtaaacatgtaactagaaagccaggctcagttcttacctctgggaatcagaactctttatgcaacttggttaatagaatctactatctggaagataaatgaaggattttaataaaattttcaatagaataaacctaatctgtatggatactttatcaaaaatgaatgtccctgctatttctggatttatgaggcaatggtacactaaagaatggaatcagttcagtgartagaaaggtatccaaggtgaagcctgagacgaatggctttcccaggctaccttccatcactgttgtacagaaaagaaatccagagaatcaaatggactggccttgggggtctctgctatggaaatgccattttttgtgtctcctttctcctactctttctcacatcctcttcrtgattgaagcatggcacaaggcaaggtgttgcctgcgagtctggttgtaagttcagcctttggtgtttgcactactgctatcataaggggtcagggacattccggggagaagtgaccactaaggtgaggattagagagtgagtagaagtgagccagacaaaaaaagcagaaaatgcagatgatggaaaggacatgtgccatgcactatcataagaacttcctaactgaacaytgatactacaattctgaatccctgatcttaaaaaataattatacttcaccaacaaaacttggcctcttttggttccactctgccaccctgccattggaacttggattactgtgaacattgcagctatagcaaaat

SEQ ID NO: 967 - DNA, 2194 bp, Homo sapiens
ctggcaccattctgagtgaatcccaacatttccccgtytttgttttcggtatcatgtctttttgatttcagattgcagawatgtacagccataggattgtcagatggtgtcacaagaaggatctgaagtggagcttctagtatccccaggagcgcgaagtgaacacggaaggtacctgcaggatccaattgtgtccattgatctctcagagtggctgaggataatagagtttcttcttcaaggtctcaaggtctgaagcatcccacagaatgatcctactgaataactcccataagctgctggccctatacaaatccttggccaggagcatccctgagtccytgaaggtgtatggctctgtgtatcacatcaatcacgggaaccccttcaacatggaggtgctggtggattcctggcctgaatatcagatggttattatccggcctcaaaagcaggagatgactgatgacatggattcatacacaaacgtatatcgtatgttctccaaagascctcaaaaatcagaagaagttttgaaaaattgtgagatcgtaaactggaaacagagactccaaatccaaggtcttcaagaaagtttaggtgaggggataagagtggctacattttcaaagtcagtgaaagtagagcattcgagagcactcctcttggttacggaagatattctgaagctcaatgcctccagtaaaagcaagcttggaagctgggctgagacaggccacccagatgatgaatttgaaagtgaaactcccaactttaagtatgcccagctggatgtctcttattctgggctggtaaatgacaactggaagcgagggaagaatgagaggagcctgcattacatcaagcgctgcatagaagacctgccagcagcctgtatgctcggcccagagggagtcccrgtctcatgggtaaccatggacccttcttgtgaagtaggaatggcctacagcatggaaaaataccgaaggacaggcaacatggcacgagtgatggtgcgatacatgaaatatctgcgtcagaagaatattccattttacatctctgtgttggaagaaaatgaagactcccgcagatttgtggggcagtttggtttctttgaggcctcctgtgagtggcaccaatggacttgctacccacagaatctagttccattttagacaatgaagctgcttagtaatctctgccaagccatctcttaatattaaagcagacaccacagaatagatttcttcacttacaaatgcatattgggcacttataatacagcaggaactcttctcacctggagccttgatgttaaaagacacagccatgctcttgaggagcttacaatcctggctggaggcaggggagggtatattctttaaatatgcttaagtgttatagggaaagacggggttaccagtaaacatgtaactagaaagccaggctcagttcttacctctgggaatcagaactctttatgcaacttggttaatagaatctactatctggaagataaatgaaggattttaataaaattttcaatagaataaacctaatctgtatggatactttatcaaaaatgaatgtccctgctatttctggatttatgaggcaatggtacactaaagaatggaatcagttcagtgartagaaaggtatccaaggtgaagcctgagacgaatggctttcccaggctaccttccatcactgttgtacagaaaagaaatccagagaatcaaatggactggccttgggggtctctgctatggaaatgccattttttgtgtctcctttctcctactctttctcacatcctcttcrtgattgaagcatggcacaaggcaaggtgttgcctgcgagtctggttgtaagttcagcctttggtgtttgcactactgctatcataaggggtcagggacattccggggagaagtgaccactaaggtgaggattagagagtgagtagaagtgagccagacaaaaaaagcagaaaatgcagatgatggaaaggacatgtgccatgcactatcataagaacttcctaactgaacaytgatactacaattctgaatccctgatcttaaaaaataattatacttcaccaacaaaacttggcctcttttggttccactctgccaccctgccattggaacttggattactgtgaacattgcagctatagcaaaat

SEQ ID NO: 968 - DNA, 687 bp, Homo sapiens
aaacaggagatgacagatgactttgatcactacaccaacagctaccatatctattctaaagatcccragaactgtcaagaatgccttgacatgtcaggtatcatcaactggaaacaacatttgcagatccaaagctcacagtccagactgaatgaggtaawacaaagtcttgtagctgctaaattggtcaaagtcaaaagatcacaatgccagctttatgaaatgcctgagacagcaaagaaactggttccctttctgctagagacaaagaacttatgttataaatctggaatacttaaggccattaaccaagagatgtttaaactctcatctctgaaaaccacccatgcttccttgatgaataaattctggcattttggtggcaatgagaggaaccagagattcattgagtgctgtattcagaacctcccattctgctgtctgctggggcctgaaaggaccacggtgtcctggtttgtaatggaccatactggagagctgtggatggcagccatcatgcctgagtcccggggccagggcctcatgtcctatcttatctggtcccagttccagattctggacaaacttggcttccccctatattaccatgcagacagagccaacaaatgtgtacagggtgtaagtcatgctctgcatcatattctcatgccctgtgaccagaaccaa

SEQ ID NO: 969 - DNA, 1581 bp, Homo sapiens
atggtgtatgttaaggatttaaaagagaaggtgcctaaggtatggaaaaaatataagaaacaggtttggcaaggctccgggtttttggcaaggaaagcatttggacattttacaaattcaaaaggctacacactggctttttctaaagtattttccagcttcaggtacctaaaaggttttgaagaatttgttctcaacattgagaccctgagttttttcttgaagggctcgaggactgaagcatcccacaaaatgattctattgaataattctgagcagctgctggccctattcaaatctttagcaaggagcattcctgagtccctgaaggtgaaggaacagtgggaggtgtatggctctctgtttcacatcaatcacgggaaccccttcaacatggaggtgttggtggactcctggcccgrgtatcagatggttattatccgacctcaaaaacaggagatgactgatgacatggattcatacactaatgtatatcgtatattctccaaagaccctcaaaaatcacaagaagttttgaaaaattctgagatcataaactggaaacagaaactccaaatccaaggttttcaagaaagtttaggtgaggggataaaagcagctgcattttcaaattcagtgaaggtagagcattcgagagcactcctctttgttacggaagatatcctgaagctctatgccaccaataaaagcaagcttggaagctgggctgagacaggccacccagatgacgaattggagagcgagactcccaattttaagtatgcccagctgaatgtgtcttattctgggctggtaaatgacaactggaagctagggatgaataagaggagcctgcattacatcaagcgctgcctaggagccctgccagcagtctgtatgctgggcccagagggggtcccggtctcatgggtaaccatggacccttcttgtgaaataggaatgggctacagtgtggaaaaataccgaaggagaggcaacgcgacacggatgatgatccagatgagtgtgctaagtgatacaaaatgcttttattcctctaccgttcaaccccctgagcccgatgttttagttccacgtgttttagttccaggccaaatccctggagacttcacgcagacgcgggtgcagcctgctctgggacttgaagtccgctggagcctgagcctctgcatcatccgggtggagctctctctgctgctgccaaaggatcccgcctggatgctcatcccgccaccgtcgcccaccccgcagctgcagaatggcagcaactgccacacacctaagcaacttggctggctattcgccctgcagctcccgccagygcgctgcccaagctggcaatcaaaagtctgggaaagcgcgaaagcgccacgtgcctcgcactccgcccagctgccgcgcagctcctccctggcttccactgggagacaggggactcccatgagaaggaaggagcagggcagtgattgcttagtttatcctgggacgcgggagctgtccccgtggactgagtggcgcggagaggggatcactgagaccgggaagggtcatccagacaaa

SEQ ID NO: 970 - DNA, 1299 bp, Homo sapiens
ccctgtgccagccggctgtcgacccaggttaggaagcccgaggtcggggcgttaccccaagggccctcccgcttcccctccgagggcagagaggcgtccgcgcccggacgcactgcgggaacacctggagcsccggcggagctcggctgtccccgcgggagggagcccgacgcgcatccttgggacccggacccggcgcccgcgcctcgggacggatttctgcctcggctgcaggcgcagcgcgcagacctgagcctgccccgcggaaccggggctcgagtcccggcccgagcgcggcgtcggggccagcggagaggggcggaagccgcaagggaccctcggcgcctcggcctggccgcgatgaagtccccgcccctcctcagcccgtgtctctcctggaagagaatggcgggcatctttttcctgccatttatctcatcaggttttgctcctcggtttaagcaggaagagaacttcatgcttggaagagcgcatccgtcccagcctaggtttaattggtctcatctgacccctctggagctgaagaatcgatctgtgggacttggaactgaaagcacaggtcggggtaagccccacttcacactggagggccacaagttcctgatcttcgggggctccatccactatttccgggtgcccagggagtactggagggaccgcctgctgaagctgaaggcctgtggcttcaatactgtcaccacctatgttccgtggaacctgcatgagccagaaagaggcaaatttgacttctctgggaacctggacctggaggccttcgtcctgatggccgcagagatcgggctgtgggtgattctgcgtccaggccsctacatctgcagtgagatggacctcgggggcttgcccagctggctcctgcaagacccccggttactgttgaggacaaccaacaagagcttcattgaagcagttgagaagtattttgaccacctgattcccagagtgattcctctccagtaccgccaggcaggccctgtcatcgcggtgcaagtggagaatgagtatggctcrttcaataaggataaaacatacatgccgtatctccacaaggccctgctgagaagagggattgtggagcttctcttgacctctgatggtgagaaacatgtgctgagtggccacaccaaaggagtgttggccgccatcaatttgcaaaaacttcaccaggatactttcaatcagcttcataaagtccagggagccagtatagatgcaggactgctctcagatgcctcacaagcagcaacttcttcctcctta

SEQ ID NO: 971 - DNA, 1959 bp, Homo sapiens
atggcgcaaaggcagggcaccaggaggaaagtctgttactactacgataggggtgttggaaattactattatggacaagcccacccaaggaatcctcactgaatctgcgtgactcataatttgctgctcaactatggtttctactgaaaaatggaaacccatcaccctcacaragccaatgctgaggagatgaccaagtaccacagtgatgactacattaaattcttgtgctccatctatccagattacgtgtctgagcacagcaagcggatgcagagattcaacgttagtgaggactgtccagcatttgatggcctgtttgacttctgtcagttgtctactggtggctctgtggcaagtgctgtgaaacttaatgagcagcagatggacactgctgtgaattgggctggaggcctgcaccatgcaaagaagttcaaggcatctggcttctgttatgttaatgatacaatctgggccaccttggaactgctaaagtatcaccagagggtgttgtatgttgacgttgatattcaccatgatgatggcatggaagaggccttctatattacaggctaggccaggactgtgtcctttcataaatatggagagtacttcccaggagatggggacttatgggttattggggctggcaaaggcagatattatgctattaactatctgctcctagatgggattgatgatgagtcctatgaggccattttcaaactggtcatgtccaaagtaataragatgttcctgtctagtgtggtgatcttacagcatggctcagatgccttgtctaggggtcacttagattgctttaatctgatcatcaaagggcatgccaagtgtgtggaatctgtcaagagtgtcaacctgcctatgttattgatggcagaaggtggttacaccatttataatgttgctcagtgccctggaaataagaaagagctgtggctctggatatggagatccctaatgagccttcatacaatgattactttgaatactttggaccatatttcaagccctacatcagtccttccaatatgactaaccagaacactaatgagtacctggagaagattaaacagtggctgtttgagaacctagtaatgcaggcccatccacctgcagtccaaatgcaggtgattctgaggatgctgtccctcaagagggtggcgatgagaatgaagaagaccctgacaagctcatctccatccgtttctctgacagatgaattacctgtgaggaagagttcttcgactctgatgaggagggagagcgtggctgcaagatctctcccatcttcaaaaaagccaagaggattaaaacaggatgaaaaagagagactcagagatgaagaaatgtcacagaagaggagaaaaatgaaggaggagaagccaggagccaaagaggtcaaggagcaggtcaagctggcctgagggaacctcccctgctctggcttcctgcctagtccccaatctttctctcccaaaccctcagattttatgtcttctatttctccaggtattcatataaaatttattaaatataaatagttccagggactagacagaaattaagaccctgagcccagggcagctgtgctgggtgatctcttctaggaaatgccttgccacctatccctctgcaggtcttaactctgaagcataaaaggcgccaggtctgggtgaagggaatacttttgtgcaaacagaagacaaaatcctgaaatgccaagtgcctgcttagtagctttggaaaggtgcctttattgcaccttctaaaaggggtgtctgggtcttcaaggttgccctgttcttttcagctcctaagtaacatcagccatttttagattggttccattctcataccttctcactggcctcaagtgagccaaaaaactcacactgcctgccatctgtcttccccmagttctgcaggtggaggatggta

SEQ ID NO: 972 - DNA, 2302 bp, Homo sapiens
gtggccaggatcgggtctgggaagctcggagatttcactgtgagtggagtcagagggaaggcatttggagcaaaggcttctgtaagagggagtaggatggaaattgatctttgaagaaagcaagacagaagaagggagatggaaagatgaaatcattttaaaattgctggtaacaaacgaaggagccgaatcagaaatgtcatcctcaggcacgccagacttacctgtcctactcaccgatttgaagattcaatatactaagatcttcataaacaatgaatggcatgattcagtgagtggcaagaaatttcctgtctttaatcctgcaactgaggaggagctctgccaggtagaagaaggagataaggaggatgttgacaaggcagtgaaggccgcaagacaggcttttcagattggatcyccgtggcgtactatggatgcttccgagagggggcgactattatacaagttggctgatttaatcgaaagagatcgtctgctgctggcgacaatggagtcaatgaatggtggaaaactctattccaatgcatatctgartgatttagcaggctgcatcaaaacattgcgctactgtgcaggttgggctgacaagatccagggccgtacaataccaattgatggaaatttttttacatatacaagacatgaacctattggtgtatgtggccaaatcattccttggaatttcccgttggttatgctcatttggaagatagggcctgcactgagctgtggaaacacagtggttgtcaaaccagcagagcaaactcctctcactgctctccacgtggcatctttaataaaagaggcagggtttcctcctggagtagtgaatattgttcctggttatgggcctacagcaggggcagccatttcttctcacatggatatagacaaagtagccttcacaggatcaacagaggttggcaagttgatcaaagaagctgccgggaaaagcaatctgaagagggtgaccctggagcttggaggaaagagcccttgcattgtgttagctgatgccgacttggacaatgctgttgaatttgcacaccatggggtattctaccaccagggccagtgttgtatagccgcatccaggatttttgtggaagaatcaatttatgatgagtttgttcgaaggagtgttgagcgggctaagaagtatatccttggaaatcctctgaccccaggagtcactcaaggccctcagattgacaaggaacaatatgataaaatacttgacctcattgagagtgggaagaaagaaggggccaaactggaatgtggaggaggcccgtgggggaataaaggctactttgtccagcccacagtgttctctaatgttacagatgagatgcgcattgccaaagaggagatttttggaccrgtgcagcaaatcatgaagtttaaatctttagatgacgtgatcaaaagagcaaacaatactttctatggcttatcagcaggagtgtttaccaaagacattgataaagccataacaatctcctctgmtctgcaggcaggaacagtgtgggtgaattgctatggcgtggtaagtgcccagtgcccctttggtggattcaagatgtctggaaatggaagagaactgggagagtacggtttccatgaatatacagaggtcaaaacagtcacagtgaaaatctctcagaagaactcataaagaaaatacaagagtggagagaagctcttcaatagctaagcatctccttacagtcactaatatagtagattttaaagacaaaatttttcttttcttgatttttttaaacataagctaaatcatattagtattaatactacccatagaaaacttgacatgtagcttcttctgaaagaattatttgccttctgaaatgtgacccccaagtcctatcctaaataaaaaaagacaaattcggatgtatgatctctctagctttgtcatagttatgtgattttcctttgtagctacttttgcaggataataattttatagaaaaggaacagttgcatttagcttcyttcccttagtgactcttgaagtacttaacatacacgttaactgcagagtaaattgctctgttcccagtagttataaagtccttggactgttttgaaaagtttcctaggatgtcatgtctgcttgtcaaaagaaataatccctgtaatatttagctgtaaactgaatataaagcttaataaaaacaaccttgcatgattcttgttacttttgaatttttttaagtacaagttttggttacagtgatttcttcttgtcact

SEQ ID NO: 973 - DNA, 2120 bp, Homo sapiens
gagccgaatcagaaatgtcatcctcaggcacgccagacttacctgtcctactcaccgatttgaagattcaatatactaagatcttcataaacaatgaatggcatgattcagtgagtggcaagaaatttcctgtctttaatcctgcaactgaggaggagctctgccaggtagaagaaggagataaggaggatgttgacaaggcagtgaaggccgcaagacaggcttttcagattggatcyccgtggcgtactatggatgcttccgagagggggcgactattatacaagttggctgatttaatcgaaagagatcgtctgctgctggcgacaatggagtcaatgaatggtggaaaactctattccaatgcatatctgartgatttagcaggctgcatcaaaacattgcgctactgtgcaggttgggctgacaagatccagggccgtacaataccaattgatggaaatttttttacatatacaagacatgaacctattggtgtatgtggccaaatcattccttggaatttcccgttggttatgctcatttggaagatagggcctgcactgagctgtggaaacacagtggttgtcaaaccagcagagcaaactcctctcactgctctccacgtggcatctttaataaaagaggcagggtttcctcctggagtagtgaatattgttcctggttatgggcctacagcaggggcagccatttcttctcacatggatatagacaaagtagccttcacaggatcaacagaggttggcaagttgatcaaagaagctgccgggaaaagcaatctgaagagggtgaccctggagcttggaggaaagagcccttgcattgtgttagctgatgccgacttggacaatgctgttgaatttgcacaccatggggtattctaccaccagggccagtgttgtatagccgcatccaggatttttgtggaagaatcaatttatgatgagtttgttcgaaggagtgttgagcgggctaagaagtatatccttggaaatcctctgaccccaggagtcactcaaggccctcagattgacaaggaacaatatgataaaatacttgacctcattgagagtgggaagaaagaaggggccaaactggaatgtggaggaggcccgtgggggaataaaggctactttgtccagcccacagtgttctctaatgttacagatgagatgcgcattgccaaagaggagatttttggaccrgtgcagcaaatcatgaagtttaaatctttagatgacgtgatcaaaagagcaaacaatactttctatggcttatcagcaggagtgtttaccaaagacattgataaagccataacaatctcctctgmtctgcaggcaggaacagtgtgggtgaattgctatggcgtggtaagtgcccagtgcccctttggtggattcaagatgtctggaaatggaagagaactgggagagtacggtttccatgaatatacagaggtcaaaacagtcacagtgaaaatctctcagaagaactcataaagaaaatacaagagtggagagaagctcttcaatagctaagcatctccttacagtcactaatatagtagattttaaagacaaaatttttcttttcttgatttttttaaacataagctaaatcatattagtattaatactacccatagaaaacttgacatgtagcttcttctgaaagaattatttgccttctgaaatgtgacccccaagtcctatcctaaataaaaaaagacaaattcggatgtatgatctctctagctttgtcatagttatgtgattttcctttgtagctacttttgcaggataataattttatagaaaaggaacagttgcatttagcttcyttcccttagtgactcttgaagtacttaacatacacgttaactgcagagtaaattgctctgttcccagtagttataaagtccttggactgttttgaaaagtttcctaggatgtcatgtctgcttgtcaaaagaaataatccctgtaatatttagctgtaaactgaatataaagcttaataaaaacaaccttgcatgattcttgttacttttgaatttttttaagtacaagttttggttacagtgatttcttcttgtcact

SEQ ID NO: 974 - DNA, 2165 bp, Homo sapiens
tgctctatcagaaccaaattgctgagccagtcacctgtgttccaggagccgaatcagaaatgtcatcctcaggcacgccagacttacctgtcctactcaccgatttgaagattcaatatactaagatcttcataaacaatgaatggcatgattcagtgagtggcaagaaatttcctgtctttaatcctgcaactgaggaggagctctgccaggtagaagaaggagataaggaggatgttgacaaggcagtgaaggccgcaagacaggcttttcagattggatcyccgtggcgtactatggatgcttccgagagggggcgactattatacaagttggctgatttaatcgaaagagatcgtctgctgctggcgacaatggagtcaatgaatggtggaaaactctattccaatgcatatctgartgatttagcaggctgcatcaaaacattgcgctactgtgcaggttgggctgacaagatccagggccgtacaataccaattgatggaaatttttttacatatacaagacatgaacctattggtgtatgtggccaaatcattccttggaatttcccgttggttatgctcatttggaagatagggcctgcactgagctgtggaaacacagtggttgtcaaaccagcagagcaaactcctctcactgctctccacgtggcatctttaataaaagaggcagggtttcctcctggagtagtgaatattgttcctggttatgggcctacagcaggggcagccatttcttctcacatggatatagacaaagtagccttcacaggatcaacagaggttggcaagttgatcaaagaagctgccgggaaaagcaatctgaagagggtgaccctggagcttggaggaaagagcccttgcattgtgttagctgatgccgacttggacaatgctgttgaatttgcacaccatggggtattctaccaccagggccagtgttgtatagccgcatccaggatttttgtggaagaatcaatttatgatgagtttgttcgaaggagtgttgagcgggctaagaagtatatccttggaaatcctctgaccccaggagtcactcaaggccctcagattgacaaggaacaatatgataaaatacttgacctcattgagagtgggaagaaagaaggggccaaactggaatgtggaggaggcccgtgggggaataaaggctactttgtccagcccacagtgttctctaatgttacagatgagatgcgcattgccaaagaggagatttttggaccrgtgcagcaaatcatgaagtttaaatctttagatgacgtgatcaaaagagcaaacaatactttctatggcttatcagcaggagtgtttaccaaagacattgataaagccataacaatctcctctgmtctgcaggcaggaacagtgtgggtgaattgctatggcgtggtaagtgcccagtgcccctttggtggattcaagatgtctggaaatggaagagaactgggagagtacggtttccatgaatatacagaggtcaaaacagtcacagtgaaaatctctcagaagaactcataaagaaaatacaagagtggagagaagctcttcaatagctaagcatctccttacagtcactaatatagtagattttaaagacaaaatttttcttttcttgatttttttaaacataagctaaatcatattagtattaatactacccatagaaaacttgacatgtagcttcttctgaaagaattatttgccttctgaaatgtgacccccaagtcctatcctaaataaaaaaagacaaattcggatgtatgatctctctagctttgtcatagttatgtgattttcctttgtagctacttttgcaggataataattttatagaaaaggaacagttgcatttagcttcyttcccttagtgactcttgaagtacttaacatacacgttaactgcagagtaaattgctctgttcccagtagttataaagtccttggactgttttgaaaagtttcctaggatgtcatgtctgcttgtcaaaagaaataatccctgtaatatttagctgtaaactgaatataaagcttaataaaaacaaccttgcatgattcttgttacttttgaatttttttaagtacaagttttggttacagtgatttcttcttgtcact

SEQ ID NO: 975 - DNA, 2057 bp, Homo sapiens
gtggccaggatcgggtctgggaagctcggagatttcactgtgagtggagtcagagggaaggcatttggagcaaaggcttctgtaagagggagtaggatggaaattgatctttgaagaaagcaagacagaagaagggagatggaaagatgaaatcattttaaaattgctggtaacaaacgaaggagccgaatcagaaatgtcatcctcaggcacgccagacttacctgtcctactcaccgatttgaagattcaatatactaagatcttcataaacaatgaatggcatgattcagtgagtggcaagaaatttcctgtctttaatcctgcaactgaggaggagctctgccaggtagaagaaggagataaggaggatgttgacaaggcagtgaaggccgcaagacaggcttttcagattggatcyccgtggcgtactatggatgcttccgagagggggcgactattatacaagttggctgatttaatcgaaagagatcgtctgctgctggcgacaatggagtcaatgaatggtggaaaactctattccaatgcatatctgartgatttagcaggctgcatcaaaacattgcgctactgtgcaggttgggctgacaagatccagggccgtacaataccaattgatggaaatttttttacatatacaagacatgaacctattggtgtatgtggccaaatcattccttggaatttcccgttggttatgctcatttggaagatagggcctgcactgagctgtggaaacacagtggttgtcaaaccagcagagcaaactcctctcactgctctccacgtggcatctttaataaaagaggcagggtttcctcctggagtagtgaatattgttcctggttatgggcctacagcaggggcagccatttcttctcacatggatatagacaaagtagccttcacaggatcaacagaggttggcaagttgatcaaagaagctgccgggaaaagcaatctgaagagggtgaccctggagcttggaggaaagagcccttgcattgtgttagctgatgccgacttggacaatgctgttgaatttgcacaccatggggtattctaccaccagggccagtgttgtatagccgcatccaggatttttgtggaagaatcaatttatgatgagtttgttcgaaggagtgttgagcgggctaagaagtatatccttggaaatcctctgaccccaggagtcactcaaggccctcagattgacaaggaacaatatgataaaatacttgacctcattgagagtgggaagaaagaaggggccaaactggaatgtggaggaggcccgtgggggaataaaggctactttgtccagcccacagtgttctctaatgttacagatgagatgcgcattgccaaagaggagatttttggaccrgtgcagcaaatcatgaagtttaaatctttagatgacgtgatcaaaagagcaaacaatactttctatggcttatcagcaggagtgtttaccaaagacattgataaagccataacaatctcctctgmtctgcaggcaggaacagtgtgggtgaattgctatggcgtggtaagtgcccagtgcccctttggtggattcaagatgtctggaaatggaagagaactgggagagtacggtttccatgaatatacagaggtcaaaacagtcacagtgaaaatctctcagaagaactcataaagaaaatacaagagtggagagaagctcttcaatagctaagcatctccttacagtcactaatatagtagattttaaagacaaaatttttcttttcttgatttttttaaacataagctaaatcatattagtattaatactacccatagaaaacttgacatgtagcttcttctgaaagaattatttgccttctgaaatgtgacccccaagtcctatcctaaataaaaaaagacaaattcggatgtatgatctctctagctttgtcatagttatgtgattttcctttgtagctacttttgcaggataataattttatacatacacgttaactgcagagtaaattgctctgttcccagta

SEQ ID NO: 976 - DNA, 2329 bp, Homo sapiens
aggccacggcgcggggcgggagggggcgcggcgaggcccgcggcggggcaaaaccggcctgggccctggcggccgcaggagcgcgtgcggcgtggactttgccgggctcgccacacagccccagacccgtttaggaccgggagaccgaacgcagcgtccagccggggagtttcggcggcgttctccgggcaccgcgcgcgggaagccagacgcagcggggggacacatctcgcggtggcgttgccagagtgaggagttagcaggcaggacttgacgaggctctttggtttttctagtcctcaaccactgaagaagaagcttgatgcttggctgtcagaagacatgaattacgcacggttcatcacggcagcgagcgcagccagaaacccttctcccatccggaccatgactgacatattgagcagaggaccaaaatcgatgatctccttggctggtggcttaccaaatccaaacatgtttccttttaagactgccgtaatcactgtagaaaatggaaagaccatccaatttggagaagagatgatgaagagagcacttcagtattctccgagtgctggaattccagagcttttgtcctggctaaaacagttacaaataaaattgcataatcctcctaccatccattacccacccagtcaaggacaaatggatctatgtgtcacatctggcagccaacaaggtctttgtaaggtgtttgaaatgatcattaatcctggagataatgtcctcctagatgaacctgcttattcaggaactcttcaaagtctgcacccactgggctgcaacattattaatgttgccagtgatgaaagtgggattgttccagattccctaagagacatactttccagatggaaaccagaagatgcaaagaatccccagaaaaacacccccaaatttctttatactgtyccaaatggcaacaaccctactggaaactcattaaccagtgaacgcaaaaaggaaatctatgagcttgcaagaaaatatgatttcctcataatagaagatgatccttactattttctccagtttaacaagttcagggtaccaacatttctttccatggatgttgatggacgtgtcatcagagctgactctttttcaaaaatcatttcctctgggttgagaataggatttttaactggtccaaaacccttaatagagagagttattttacacatacaagtttcaacattgcaccccagcacttttaaccagctcatgatatcacagcttctacacgaatggggagaagaaggtttcatggctcatgtagacagggttattgatttctatagtaaccagaaggatgcaatactggcagctgcagacaagtggttaactggtttggcagaatggcatgttcctgctgctggaatgtttttatggattaaagttaaaggcattaatgatgtaaaagaactgattgaagaaaaggccgttaagatgggggtattaatgctccctggaaatgctttctacgtcgatagctcagctcctagcccttacttgagagcatccttctcttcagcttctccagaacagatggatgtggccttccaggtattagcacaacttataaaagaatctttatgaagaaattaaactaggttgggcatggtggctcacacctataatcccagcactttgggaggcagaggagggaggatcacttgaacccaggaattcaaggctgcagtaagctacgatcacaccactgcactctggcctgcatgcactctggcctgcatggcagaacaagaccctgtctctaaaaaaagagaaagaaatcaaactaatcatgctgctcatggatttttccaataaatttcttgttttggcaggaagaaatgaacactggtattagacttaaagattaaatttcctcaaacatgtcctatctgtagtagttcaactagacaccttttaaagtgcctctaaattcatcagatggccaaactgtatttataatccacttaggcattttgaaaaactttcaacctgtaaaaagttacttttatcttggatttattatgaagaactttgtagttgctttgtaatttcccataaattgtctttgaaactaacattttacactgaattattttgagattttaaagaagtaattaagtgcaaaatggtatataatgtgtactttttctacttttaggaaaatttaatgagagcttattgcaaaaattgttataatttggtcattataagtgacttttagtaaaagtaccataaaccttatgttatgccacagaaattcctttaaaataaaattcttaaactaaacatacct

SEQ ID NO: 977 - DNA, 2111 bp, Homo sapiens
agcccctgggctagcctctgggccggcgcctaggccggccaacgcggacgccgggttgcggtgattcccagcggcgagtcctcaaccactgaagaagaagcttgatgcttggctgtcagaagacatgaattacgcacggttcatcacggcagcgagcgcagccagaaacccttctcccatccggaccatgactgacatattgagcagaggaccaaaatcgatgatctccttggctggtggcttaccaaatccaaacatgtttccttttaagactgccgtaatcactgtagaaaatggaaagaccatccaatttggagaagagatgatgaagagagcacttcagtattctccgagtgctggaattccagagcttttgtcctggctaaaacagttacaaataaaattgcataatcctcctaccatccattacccacccagtcaaggacaaatggatctatgtgtcacatctggcagccaacaaggtctttgtaaggtgtttgaaatgatcattaatcctggagataatgtcctcctagatgaacctgcttattcaggaactcttcaaagtctgcacccactgggctgcaacattattaatgttgccagtgatgaaagtgggattgttccagattccctaagagacatactttccagatggaaaccagaagatgcaaagaatccccagaaaaacacccccaaatttctttatactgtyccaaatggcaacaaccctactggaaactcattaaccagtgaacgcaaaaaggaaatctatgagcttgcaagaaaatatgatttcctcataatagaagatgatccttactattttctccagtttaacaagttcagggtaccaacatttctttccatggatgttgatggacgtgtcatcagagctgactctttttcaaaaatcatttcctctgggttgagaataggatttttaactggtccaaaacccttaatagagagagttattttacacatacaagtttcaacattgcaccccagcacttttaaccagctcatgatatcacagcttctacacgaatggggagaagaaggtttcatggctcatgtagacagggttattgatttctatagtaaccagaaggatgcaatactggcagctgcagacaagtggttaactggtttggcagaatggcatgttcctgctgctggaatgtttttatggattaaagttaaaggcattaatgatgtaaaagaactgattgaagaaaaggccgttaagatgggggtattaatgctccctggaaatgctttctacgtcgatagctcagctcctagcccttacttgagagcatccttctcttcagcttctccagaacagatggatgtggccttccaggtattagcacaacttataaaagaatctttatgaagaaattaaactaggttgggcatggtggctcacacctataatcccagcactttgggaggcagaggagggaggatcacttgaacccaggaattcaaggctgcagtaagctacgatcacaccactgcactctggcctgcatgcactctggcctgcatggcagaacaagaccctgtctctaaaaaaagagaaagaaatcaaactaatcatgctgctcatggatttttccaataaatttcttgttttggcaggaagaaatgaacactggtattagacttaaagattaaatttcctcaaacatgtcctatctgtagtagttcaactagacaccttttaaagtgcctctaaattcatcagatggccaaactgtatttataatccacttaggcattttgaaaaactttcaacctgtaaaaagttacttttatcttggatttattatgaagaactttgtagttgctttgtaatttcccataaattgtctttgaaactaacattttacactgaattattttgagattttaaagaagtaattaagtgcaaaatggtatataatgtgtactttttctacttttaggaaaatttaatgagagcttattgcaaaaattgttataatttggtcattataagtgacttttagtaaaagtaccataaaccttatgttatgccacagaaattcctttaaaataaaattcttaaactaaacatacct

SEQ ID NO: 978 - DNA, 3227 bp, Homo sapiens
tgtgcgtttgtcccatgctggttccgtgagtctggccttaggtgtctcgtgtctggggttgatccgagctgtcgycgccgccgccgcaatgggcaaaacggccaactctccgggttcgggagcccgacccgacccggtgcggagcttcaatcgctggaagaaaaaacacagccataggcagaacaaaaagaagcagttgaggaagcaactgaagaaacccgaatggcaggtcgagcgcgagagtatcagccgcctcatgcagaactatgaaaagataaatgtaaatgaaatcacaagattttcagattttcccttgtccaaaaaaacattgaaaggtttgcaagaagctcagtaccgtttggtgactgagatacagaagcagaccattggattggctttgcaaggtaaagatgtacttggagcggccaaaactggatctggcaagactctggcttttcttgttccagtgctggaagccttatatcgtckgcaatggacttcaacagatgggctgggggttctcataatatcacctacgagagaactggcctatcagacctttgaggttctccgaaaagtaggaaagaatcatgacttctcagctggtctcatcattggtggaaaggatctaaaacacgaagctgagaggatcaacaacataaatatactcgtgtgcacaccaggtcggcttcttcaacacatggatgaaacagtatcttttcatgctaccgacctccaaatgttagttcttgatgaagcagatagaatcttggatatgggctttgctgataccatgaatgctgttattgaaaatctccccaagaaacgtcagactttacttttctcagcaacacaaactaaatctgtaaaggaccttgcacgcttgagtttgaaaaaccctgagtatgtctgggttcatgaaaaagcaaaatatagcacccctgccactttggaacagaactacatagtctgtgagctgcagcaaaaaataagtgtgctgtattcctttttgagaagccatctgaagaagaagagcattgtatttttttccagttgcaaagaggtccagtatctgtaccgagtgttttgccggctacgtcctggtgtttctatccttgcactccatggtcgacagcagcaaatgagaagaatggaagtctataatgagtttgtccgtaagagagctgcagtactctttgctactgatattgcagccaggggtctggatttcccggccgtgaattgggttcttcagtttgattgtcctgaggatgccaacacatatattcacagagcaggtagaactgccaggtacaaagaggatggtgaagctttgctaattttgctaccctcagaaaaagctatggtgcagcagcttcttcagaagaaagtacctgtgaaggaaatcaaaatcaatccagaaaaacttatagatgtccagaaaaaattggaatctattttagctcaagatcaagatttaaaagaaagagctcaaaggtgtttcrtctcctatgtacgatctgtatatctgatgaaggataaagaagtatttgatgtgagcaagttacctatacctgaatatgccctgtctcttggtcttgctgtggcaccacgcgtaagatttcttcagaaaatgcagaaacaacccaccaaagaattggtaaggagccaagccgataaagtaattgagccaagggctccctccctcaccaatgacgaagtggaagaatttagagcctacttcaatgagaaaatgtccatccttcaaaaaggtggaaaaagactygaagggacagagcacagacaggatratgatactggtaatgaagaacaggaagaagaagaagacgatgaagaagaaatggaagagaaactggcaaaagcaaaaggatctcaagccccatctcttcctaacaccagtgaggcacagaagatcaaggaagttcctacacagttcttggacagagatgaggaggaagaagatgctgatttcttgaaggtgaagcggcataatgtgtttggattggaccttaaagacgagaaaacattacagaagaaagaaccttctaaatccagcatcaagaaaaaaatgaccaaagttgcagaagcaaaaaaagtaatgaagagaaattttaaagtgaataagaagataacatttactgatgaaggggagttggttcagcagtggccacaaatgcagaaatctgccatcaaggatgctgaggaagatgatgacacaggtggtatcaacttacataaagcaaaggaaagacttcaggaagaggacaaatttgacaaagaagaatataggaaaaaaattaaggcaaagcatcgggagaaaagactgaaagaaagggaagccagaagagaagccaacaagagacaagcaaaggccaaagatgaagaggaagcctttctggattggagtgatgatgatgatgatgatgatgatggatttgatccaagcacactcccagatccagataaatacagaagctctgaagattcagatagtgaagatatggaaaataaaataagtgataccaagaagaagcaggggatgaagaagaggagcaacagtgaagtggaagacgtgggaccaacaagtcataacagaaagaaggccaggtgggacactttagagcctttggataccggcctgtctttagcagaggatgaagagctggtgttacatctgctaagaagtcaaagctaaatacttcctgcgcctgccttctccttgaaaccttggttatgactgygtaggcaagaagttgaaaaacagttgatttgggggcacttaggtaccatatgccccattcccaaagggcacatttctggatagaagcgatcgtatctccaagtccctctcacaggacatgctttgtgccatcactgagcatactcagatcgagggtggatgataccatttcctgaccccgttttccagcatgtgttctgttagatttttatccatgggttcctacgccttgtcattggaaacactgcctttgtcttactggcaagttctggagctcttgtgtcattgttagaaatccctgtcttgcttactgtacagaagtttctgttgctgttaaaattgctcatgatttcgacgtatttaatattttcaaagagactatgatggaccagccctgagaaagaatgagtatttttgaattgagatgatcaataataaacatatttcctataaaagaaagtattaa

SEQ ID NO: 979 - DNA, 2252 bp, Homo sapiens
cggtkgcgggctgagcggtttcgagccggcgtcggggagcggcggtaccgggcggctgcggggctggctcgacccagctkgaggtctcggcgtccgcgtcctgcggtgccctggggtctcccgaggaccttgtacccgcgcggyttccttgggctggctttggacgacgctttcgccttcctgctgcctaggayccgccgacatgaatcccatcgtagtggtccacggcggcggagccggtcccatctccaaggatcggaaggagcgagtgcaccagggcatggtcagagccgccaccgtgggctacggcatcctccgggagggcgggagcgccgtggatgccgtagagggagctgtcgtcgccctggaagacgatcccgagttcaacgcaggttgtgggtctgtcttgaacacaaatggtgaggttgaaatggatgctagtatcatggatggaaaagacctgtctgcaggagcagtgtccgcagtccagtgtatagcaaatcccattaaacttgctcggcttgtcatggaaaagacacctcattgctttctgactgaccaaggcgcagcgcagtttgcagcagctatgggggttccagagattcctggagaaaaactggtgacagagagaaacaaaaagcgcctggaaaaagagaagcatgaaaaaggtgctcagaaaacagattgtcaaaaaaacttgggaaccgtgggtgctgttgccttggactgcaaagggaatgtagcctacgcaacctccacaggcggtatcgttaataaaatggtcggccgcgttggggactcaccgtgtctaggagctggaggttatgccgacaatgacatcggagccgtctcaaccacagggcatggggaaagcatcctgaaggtgaacctggctagactcaccctgttccacatagaacaaggaaagacggtagaagaggctgcggacctatcgttgggttatatgaagtcaagggttaaaggtttaggtggcctcatcgtggttagcaaaacaggagactgggtggcaaagtggacctccacctccatgccctgggcagccgccaaggacggcaagctgcacttcggaattgatcctgacgatactactatcaccgaccttccctaagccgctggaagattgtattccagatgctagcttagaggtcaagtacagtctcctcatgagacatagcctaatcaattagatctagaattggaaaaattgtcccgtctgtcacttgttttgttgccttaataagcatctgaatgtttggttgtggggcgggttctgaagcaatgagagaaatgcccgtattaggaggattacttgagcccwggaggtcaaagctgaggtgagccatgattactccactgcactccagcctgggcaacagagccaggccctgtatcaaaaaaaaaagaaaagggaaaaaagaaagaaagcagcagcatgatcctgacatgacagatgtgggagacccacagcctgcagacactgtgggctggaaggtgggaagggaggggccggtggaggtggagctgtttgaaagtgacacagcagcagtagaagcagtggtgggcgaagcccaggtgaccctcagaacgttgcacaagaacatcagggaaaagaaccagaatcctttaaggaaaatgttcttcatgtatgagagactaaagtgatttttctaagaaagttcagcccttctctgacttacctggacatttctagatacttccaaaggaccctctgggaatccatagcttcctaatctggagatgggaggtcataagggagacgctgtggggttccttgaagtttcttgggttcacagaggagccccctcacttggtgttctcccgtgagccagcctccacctgccaaagacactctggtcctcgtatagtgagtaatggggctcagggcctctccaacaacagagaggagctgatgctgtagggctgaccccgtgacttcctgagtcctcaccctgtccagtgctttgagattcttcccacctccccatcctcaccagccggatcgggcgctgtgcagtgtggtcagcatggtgaagaaagtcatttcctygktggrcagtattcctctttatctctcattacactggaaatgttatttctgctgtatcatccgtgctcaacgttttagtctgtcaggctcaccttctctctggaaagaatttgcttaacttgacattccatgtgccgctaataaaatatattttgaaagaata

SEQ ID NO: 980 - DNA, 2241 bp, Homo sapiens
tgggagacagaataacggccctcaaaggtgtcacatccgaatctccacctgtgaacactcctcacrtggcaaaagggactttgcagatgagaatagaaattgcgcagaaccgttgtgaccagagcggtkgcgggctgagcggtttcgagccggcgtcggggagcggcggtaccgggcggctgcggggctggctcgacccagctkgaggtctcggcgtccgcgtcctgcggtgccctgggayccgccgacatgaatcccatcgtagtggtccacggcggcggagccggtcccatctccaaggatcggaaggagcgagtgcaccagggcatggtcagagccgccaccgtgggctacggcatcctccgggagggcgggagcgccgtggatgccgtagagggagctgtcgtcgccctggaagacgatcccgagttcaacgcaggttgtgggtctgtcttgaacacaaatggtgaggttgaaatggatgctagtatcatggatggaaaagacctgtctgcaggagcagtgtccgcagtccagtgtatagcaaatcccattaaacttgctcggcttgtcatggaaaagacacctcattgctttctgactgaccaaggcgcagcgcagtttgcagcagctatgggggttccagagattcctggagaaaaactggtgacagagagaaacaaaaagcgcctggaaaaagagaagcatgaaaaaggtgctcagaaaacagattgtcaaaaaaacttgggaaccgtgggtgctgttgccttggactgcaaagggaatgtagcctacgcaacctccacaggcggtatcgttaataaaatggtcggccgcgttggggactcaccgtgtctaggagctggaggttatgccgacaatgacatcggagccgtctcaaccacagggcatggggaaagcatcctgaaggtgaacctggctagactcaccctgttccacatagaacaaggaaagacggtagaagaggctgcggacctatcgttgggttatatgaagtcaagggttaaaggtttaggtggcctcatcgtggttagcaaaacaggagactgggtggcaaagtggacctccacctccatgccctgggcagccgccaaggacggcaagctgcacttcggaattgatcctgacgatactactatcaccgaccttccctaagccgctggaagattgtattccagatgctagcttagaggtcaagtacagtctcctcatgagacatagcctaatcaattagatctagaattggaaaaattgtcccgtctgtcacttgttttgttgccttaataagcatctgaatgtttggttgtggggcgggttctgaagcaatgagagaaatgcccgtattaggaggattacttgagcccwggaggtcaaagctgaggtgagccatgattactccactgcactccagcctgggcaacagagccaggccctgtatcaaaaaaaaaagaaaagggaaaaaagaaagaaagcagcagcatgatcctgacatgacagatgtgggagacccacagcctgcagacactgtgggctggaaggtgggaagggaggggccggtggaggtggagctgtttgaaagtgacacagcagcagtagaagcagtggtgggcgaagcccaggtgaccctcagaacgttgcacaagaacatcagggaaaagaaccagaatcctttaaggaaaatgttcttcatgtatgagagactaaagtgatttttctaagaaagttcagcccttctctgacttacctggacatttctagatacttccaaaggaccctctgggaatccatagcttcctaatctggagatgggaggtcataagggagacgctgtggggttccttgaagtttcttgggttcacagaggagccccctcacttggtgttctcccgtgagccagcctccacctgccaaagacactctggtcctcgtatagtgagtaatggggctcagggcctctccaacaacagagaggagctgatgctgtagggctgaccccgtgacttcctgagtcctcaccctgtccagtgctttgagattcttcccacctccccatcctcaccagccggatcgggcgctgtgcagtgtggtcagcatggtgaagaaagtcatttcctygktggrcagtattcctctttatctctcattacactggtcaccttctctctggaaagaatttgcttaacttgacattccatgtgccgctaataaaatatattttga

SEQ ID NO: 981 - DNA, 2030 bp, Homo sapiens
gcctcagcctcccaagtagctaggcctttgggtgtgtgctactatgcccagctaatttttttttaagagakggggtcttgctgtgttgtccaggttggtcttgaactaggcctcaagagatcctcttgcctcggcctcccaaagtgctgggattacaggcgtgagccacggttgtgggtctgtcttgaacacaaatggtgaggttgaaatggatgctagtatcatggatggaaaagacctgtctgcaggagcagtgtccgcagtccagtgtatagcaaatcccattaaacttgctcggcttgtcatggaaaagacacctcattgctttctgactgaccaaggcgcagcgcagtttgcagcagctatgggggttccagagattcctggagaaaaactggtgacagagagaaacaaaaagcgcctggaaaaagagaagcatgaaaaaggtgctcagaaaacagattgtcaaaaaaacttgggaaccgtgggtgctgttgccttggactgcaaagggaatgtagcctacgcaacctccacaggcggtatcgttaataaaatggtcggccgcgttggggactcaccgtgtctaggagctggaggttatgccgacaatgacatcggagccgtctcaaccacagggcatggggaaagcatcctgaaggtgaacctggctagactcaccctgttccacatagaacaaggaaagacggtagaagaggctgcggacctatcgttgggttatatgaagtcaagggttaaaggtttaggtggcctcatcgtggttagcaaaacaggagactgggtggcaaagtggacctccacctccatgccctgggcagccgccaaggacggcaagctgcacttcggaattgatcctgacgatactactatcaccgaccttccctaagccgctggaagattgtattccagatgctagcttagaggtcaagtacagtctcctcatgagacatagcctaatcaattagatctagaattggaaaaattgtcccgtctgtcacttgttttgttgccttaataagcatctgaatgtttggttgtggggcgggttctgaagcaatgagagaaatgcccgtattaggaggattacttgagcccwggaggtcaaagctgaggtgagccatgattactccactgcactccagcctgggcaacagagccaggccctgtatcaaaaaaaaaagaaaagggaaaaaagaaagaaagcagcagcatgatcctgacatgacagatgtgggagacccacagcctgcagacactgtgggctggaaggtgggaagggaggggccggtggaggtggagctgtttgaaagtgacacagcagcagtagaagcagtggtgggcgaagcccaggtgaccctcagaacgttgcacaagaacatcagggaaaagaaccagaatcctttaaggaaaatgttcttcatgtatgagagactaaagtgatttttctaagaaagttcagcccttctctgacttacctggacatttctagatacttccaaaggaccctctgggaatccatagcttcctaatctggagatgggaggtcataagggagacgctgtggggttccttgaagtttcttgggttcacagaggagccccctcacttggtgttctcccgtgagccagcctccacctgccaaagacactctggtcctcgtatagtgagtaatggggctcagggcctctccaacaacagagaggagctgatgctgtagggctgaccccgtgacttcctgagtcctcaccctgtccagtgctttgagattcttcccacctccccatcctcaccagccggatcgggcgctgtgcagtgtggtcagcatggtgaagaaagtcatttcctygktggrcagtattcctctttatctctcattacactggaaatgttatttctgctgtatcatccgtgctcaacgttttagtctgtcaggctcaccttctctctggaaagaatttgcttaacttgacattccatgtgccgctaataaaatatattttgaaagaata

SEQ ID NO: 982 - DNA, 2271 bp, Homo sapiens
ccgggggcggagaggaacgcgggagggcgccgggyccctgggcttttcgtaccaagctcgaccgagccgcccctacccacccccagctgcgaacccrgccgttcagaacagagactgggcattgtccccacagggtctcccgaggaccttgtacccgcgcggyttccttgggctggctttggacgacgctttcgccttcctgctgcctaggayccgccgacatgaatcccatcgtagtggtccacggcggcggagccggtcccatctccaaggatcggaaggagcgagtgcaccagggcatggtcagagccgccaccgtgggctacggcatcctccgggagggcgggagcgccgtggatgccgtagagggagctgtcgtcgccctggaagacgatcccgagttcaacgcaggttgtgggtctgtcttgaacacaaatggtgaggttgaaatggatgctagtatcatggatggaaaagacctgtctgcaggagcagtgtccgcagtccagtgtatagcaaatcccattaaacttgctcggcttgtcatggaaaagacacctcattgctttctgactgaccaaggcgcagcgcagtttgcagcagctatgggggttccagagattcctggagaaaaactggtgacagagagaaacaaaaagcgcctggaaaaagagaagcatgaaaaaggtgctcagaaaacagattgtcaaaaaaacttgggaaccgtgggtgctgttgccttggactgcaaagggaatgtagcctacgcaacctccacaggcggtatcgttaataaaatggtcggccgcgttggggactcaccgtgtctaggagctggaggttatgccgacaatgacatcggagccgtctcaaccacagggcatggggaaagcatcctgaaggtgaacctggctagactcaccctgttccacatagaacaaggaaagacggtagaagaggctgcggacctatcgttgggttatatgaagtcaagggttaaaggtttaggtggcctcatcgtggttagcaaaacaggagactgggtggcaaagtggacctccacctccatgccctgggcagccgccaaggacggcaagctgcacttcggaattgatcctgacgatactactatcaccgaccttccctaagccgctggaagattgtattccagatgctagcttagaggtcaagtacagtctcctcatgagacatagcctaatcaattagatctagaattggaaaaattgtcccgtctgtcacttgttttgttgccttaataagcatctgaatgtttggttgtggggcgggttctgaagcaatgagagaaatgcccgtattaggaggattacttgagcccwggaggtcaaagctgaggtgagccatgattactccactgcactccagcctgggcaacagagccaggccctgtatcaaaaaaaaaagaaaagggaaaaaagaaagaaagcagcagcatgatcctgacatgacagatgtgggagacccacagcctgcagacactgtgggctggaaggtgggaagggaggggccggtggaggtggagctgtttgaaagtgacacagcagcagtagaagcagtggtgggcgaagcccaggtgaccctcagaacgttgcacaagaacatcagggaaaagaaccagaatcctttaaggaaaatgttcttcatgtatgagagactaaagtgatttttctaagaaagttcagcccttctctgacttacctggacatttctagatacttccaaaggaccctctgggaatccatagcttcctaatctggagatgggaggtcataagggagacgctgtggggttccttgaagtttcttgggttcacagaggagccccctcacttggtgttctcccgtgagccagcctccacctgccaaagacactctggtcctcgtatagtgagtaatggggctcagggcctctccaacaacagagaggagctgatgctgtagggctgaccccgtgacttcctgagtcctcaccctgtccagtgctttgagattcttcccacctccccatcctcaccagccggatcgggcgctgtgcagtgtggtcagcatggtgaagaaagtcatttcctygktggrcagtattcctctttatctctcattacactggaaatgttatttctgctgtatcatccgtgctcaacgttttagtctgtcaggctcaccttctctctggaaagaatttgcttaacttgacattccatgtgccgctaataaaatatattttgaaagaata

SEQ ID NO: 983 - DNA, 1639 bp, Homo sapiens
ggtcagggtaggcggtaggggcagggctcggggttcggggcgggggtgttcacggtgagaccaaaagtcaggtaggagcctccggggtccctgctgtgtcacccggacaggccgtgggggcgggcaggggggcggggccgggcctgtcctcagcggccgagttcagtcctgctctccgcacgccaccttaggcccgcagccgtgccgggtgctcttcagcatgtccttcatcccggtggccgaggattccgacttccccatccacaacctgccctacggcgtcttctcgaccagaggcgacccaagaccgaggataggtgtggccattggcgaccagatcctggacctcagcatcatcragcacctctttactggtcctgtcctytccaaacaccaggatgtctkcaatcakcctacactcaacagcttcatgggcctgggtcaggctgcctggaaggaggcragagtgttcttgcagaacttgctstctgtgagccaagccaggctcagagatgacaccgaacttcggaagtgtgcattcatctcccaggcttctgccacgatgcaccttccagccaccataggagactacacagacttctattcctctcggcagcatgctaccaacgtcggaatcatgttcagggacaaggagaatgcgttgatgccaaattggctgcacttaccagtgggctaccatggccgtgcctcctctgkcgtggtgtctggcaccccaatccgaaggcccatgggacagatgaaacctgatgactctaagcctcccgtatatggtgcctgcaagctcttggacatggagctggaaatggctttttttgtagrccctggaaacagattgggagagccgatccccatttccaaggcccatgagcacatttttggaatggtccttatgaacgwckggagtgcaygagacattcagaagtgggagtatgtccctctcgggccattccttgggaagagttttgggaccactgtctctcygtgrgtggtgcccatggatgctctcatgccctttgctgtgcccaacccgaagcaggaccccaggcccctgccgtatctgtgccatgacgagccctacacatttgacatcaacctctctgttaacctgaaaggagaaggaatgagccaggcggctaccatatgcaagtccaattttaagtacatgtactggacgatgctgcagcagctcactcaccactctgtcaacrgctgcaacctgyggccgggggacctcctggcttctgggaccatcagygggccggagccakaaaacttcggctccatgttggaactgtcrtggaaggkaacgaagcccatagacctggggaatggtcagaccrggaagtttctgctggacggggatgaagtcatcataacagggtactgccagggggatggttaccgcatcggctttggccagtgtgctggaaaagtgctgcctgctctcctgccatcatragattttytctgctyttytggaaacaaagggctcaagcmcycctttcaaccctgtgactggggtcctccctcgggctgtaggcctggtccgccaytcagtgacaaataaagccattgtgctctgaggcctgcactgccgcagatgcagctgtgtccactt

SEQ ID NO: 984 - DNA, 1796 bp, Homo sapiens
ggaggacctggggctcgcggggtcggggcaaggggaggggcggggctcagggagggaggagagactggaggaccctgaggcccacgggggcggggccaggggcggggcggggctctggaaggcgggcgagactgtggaggacctggagctggcagagggtcagggtaggcggtaggggcagggctcggggttcggggcgggggtgttcacggtgagaccaaaagtcaggtaggagcctccggggtccctgctgtgtcacccggacaggccgtgggggcgggcaggggggcggggccgggcctgtcctcagcggccgagttcagtcctgctctccgcacgccaccttaggcccgcagccgtgccgggtgctcttcagcatgtccttcatcccggtggccgaggattccgacttccccatccacaacctgccctacggcgtcttctcgaccagaggcgacccaagaccgaggataggtgtggccattggcgaccagatcctggacctcagcatcatcragcacctctttactggtcctgtcctytccaaacaccaggatgtctkcaatcakcctacactcaacagcttcatgggcctgggtcaggctgcctggaaggaggcragagtgttcttgcagaacttgctstctgtgagccaagccaggctcagagatgacaccgaacttcggaagtgtgcattcatctcccaggcttctgccacgatgcaccttccagccaccataggagactacacagacttctattcctctcggcagcatgctaccaacgtcggaatcatgttcagggacaaggagaatgcgttgatgccaaattggctgcacttaccagtgggctaccatggccgtgcctcctctgkcgtggtgtctggcaccccaatccgaaggcccatgggacagatgaaacctgatgactctaagcctcccgtatatggtgcctgcaagctcttggacatggagctggaaatggctttttttgtagrccctggaaacagattgggagagccgatccccatttccaaggcccatgagcacatttttggaatggtccttatgaacgwckggagtgcaygagacattcagaagtgggagtatgtccctctcgggccattccttgggaagagttttgggaccactgtctctcygtgrgtggtgcccatggatgctctcatgccctttgctgtgcccaacccgaagcaggaccccaggcccctgccgtatctgtgccatgacgagccctacacatttgacatcaacctctctgttaacctgaaaggagaaggaatgagccaggcggctaccatatgcaagtccaattttaagtacatgtactggacgatgctgcagcagctcactcaccactctgtcaacrgctgcaacctgyggccgggggacctcctggcttctgggaccatcagygggccggagccakaaaacttcggctccatgttggaactgtcrtggaaggkaacgaagcccatagacctggggaatggtcagaccrggaagtttctgctggacggggatgaagtcatcataacagggtactgccagggggatggttaccgcatcggctttggccagtgtgctggaaaagtgctgcctgctctcctgccatcatragattttytctgctyttytggaaacaaagggctcaagcmcycctttcaaccctgtgactggggtcctccctcgggctgtaggcctggtccgccaytcagtgacaaataaagccattgtgctctgaggcctgcactgccgcagatgcagctgtgtccactt

SEQ ID NO: 985 - DNA, 1752 bp, Homo sapiens
ctttctccctctctctcttctcctatttctcttttatctttcctttcctttatccccctcccctcctttcctctttttccctcccttctctctctttccacacacacataacctgtatatgccaggcactattctaggtgcttcacaaatattaattcattccattcttatatcaactttgtgaagtaggaactattatcatcaacattatacagagaaggaagctgaggtagagaaagtttaagtaacttgtccaaggttgagcatcttgtcaacgtcattttactactggcatgtgaaacaggcccgcagccgtgccgggtgctcttcagcatgtccttcatcccggtggccgaggattccgacttccccatccacaacctgccctacggcgtcttctcgaccagaggcgacccaagaccgaggataggtgtggccattggcgaccagatcctggacctcagcatcatcragcacctctttactggtcctgtcctytccaaacaccaggatgtctkcaatcakcctacactcaacagcttcatgggcctgggtcaggctgcctggaaggaggcragagtgttcttgcagaacttgctstctgtgagccaagccaggctcagagatgacaccgaacttcggaagtgtgcattcatctcccaggcttctgccacgatgcaccttccagccaccataggagactacacagacttctattcctctcggcagcatgctaccaacgtcggaatcatgttcagggacaaggagaatgcgttgatgccaaattggctgcacttaccagtgggctaccatggccgtgcctcctctgkcgtggtgtctggcaccccaatccgaaggcccatgggacagatgaaacctgatgactctaagcctcccgtatatggtgcctgcaagctcttggacatggagctggaaatggctttttttgtagrccctggaaacagattgggagagccgatccccatttccaaggcccatgagcacatttttggaatggtccttatgaacgwckggagtgcaygagacattcagaagtgggagtatgtccctctcgggccattccttgggaagagttttgggaccactgtctctcygtgrgtggtgcccatggatgctctcatgccctttgctgtgcccaacccgaagcaggaccccaggcccctgccgtatctgtgccatgacgagccctacacatttgacatcaacctctctgttaacctgaaaggagaaggaatgagccaggcggctaccatatgcaagtccaattttaagtacatgtactggacgatgctgcagcagctcactcaccactctgtcaacrgctgcaacctgyggccgggggacctcctggcttctgggaccatcagygggccggagccakaaaacttcggctccatgttggaactgtcrtggaaggkaacgaagcccatagacctggggaatggtcagaccrggaagtttctgctggacggggatgaagtcatcataacagggtactgccagggggatggttaccgcatcggctttggccagtgtgctggaaaagtgctgcctgctctcctgccatcatragattttytctgctyttytggaaacaaagggctcaagcmcycctttcaaccctgtgactggggtcctccctcgggctgtaggcctggtccgccaytcagtgacaaataaagccattgtgctctgaggcctgcactgccgcagatgcagctgtgtccactt

SEQ ID NO: 986 - DNA, 2079 bp, Homo sapiens
ggagaagaaaagaaggagaatagaggagctgctggctgagaaaatggctgttgatggtgggtgtggggacactggagactgggaaggtcgctggaaccatgtaaagaagttcctcgagcgatctggacccttcacacaccctgatttcgaaccgagcactgaatctctccagttcttgttagatacatgtaaagttctagtcattggagctggcggcttaggatgtgagctcctgaaaaatctggccttgtctggttttagacagattcatgttatagatatggacactatagatgtttccaatctaaataggcagtttttatttaggcctaaagatattggaagacctaaggctgaagttgctgcagaatttctaaatgacagagttcctaattgcaatgtagttccacatttcaacaagattcaagattttaacgacacyttctatcgacaatttcatattattgtatgtggactggactctatcatcgccagaagatggataaatggcatgctgatatctcttctaaattatgaagatggtgtcttagatccaagctccattgtccctttgatagatggggggacagaaggttttaaaggaaatgcccgggtgattctgcctggaatgactgcttgtatcgaatgcacgctggaactttatccaccacaggttaattttcccatgtgcaccattgcatctatgcccaggctaccagaacactgtattgagtatgtaaggatgttgcagtggcctaaggagcagccttttggagaaggggttccattagatggagatgatcctgaacatatacaatggattttccaaaaatccctagagagagcatcacaatataatattaggggtgttacgtataggctcactcaaggggtagtaaaaagaatcattcctgcagtagcttccacaaatgcagtcattgcagctgtgtgtgccactgaggtttttaaaatagccacaagtgcatacattcccttgaataattacttggtgtttaatgatgtagatgggctgtatacatacacatttgaagcagaaagaaaggaaaactgcccagcttgtagccagcttcctcaaaatattcagttttctccatcagctaaactacaggaggttttggattatctaaccaatagtgcttctctgcaaatgaaatctccagccatcacagccaccctagagggaaaaaatagaacactttacttacagtcggtaacctctattgaagaacgaacaaggccaaatctctccaaaacattgaaagaattggggcttgttgatggacaagaactggcggttgctgatgtcaccaccccacagactgtactattcaaacttcattttacttcttaaggaaaatctccacataatagaaaactcatggaaataatatactttgtggatgctaagaagttgaatcgatgtcatttttagcaatagtgttgccacgatttgtctttttttatataatgaaccactcttttttaactttgtaaccttcccttgaagacagaattttggtgttggtgcttgtaagcattttcattaataatatgagaaatgatacctggagagagagattatgagcaaatgtattgcttcttttagaggaggaagcatacaacctcttttgtgtgaattttgttattatggtcaaagaatgcattcctaagttttcatttgagtacccaaatacacaaaaggtgtccctttaaggaaaataaagaattaagttttaaataacattacattttacaatctgacatctggagtatattgaacataggctatttcttgatataacactcatttaattgtggccatccaaatgaatattattgcagaatttatcttgttcataatgatttgtaaatggtgttatagctgaatacctgtgcatgaaaatgggcaatattttcatctgtttacttgtagtgccatagaggccaatatgcacaatattaactaatgccaagacatggctgtttaaaaaatttaatgttcaaacagttatcactgatgcttttgcactatttattaataaaatcatatattgtgta

SEQ ID NO: 987 - DNA, 2115 bp, Homo sapiens
agaggcggagaacaatatggcggatggcgaggagccggagaagaaaagaaggagaatagaggagctgctggctgagaaaatggctgttgatggtgggtgtggggacactggagactgggaaggtcgctggaaccatgtaaagaagttcctcgagcgatctggacccttcacacaccctgatttcgaaccgagcactgaatctctccagttcttgttagatacatgtaaagttctagtcattggagctggcggcttaggatgtgagctcctgaaaaatctggccttgtctggttttagacagattcatgttatagatatggacactatagatgtttccaatctaaataggcagtttttatttaggcctaaagatattggaagacctaaggctgaagttgctgcagaatttctaaatgacagagttcctaattgcaatgtagttccacatttcaacaagattcaagattttaacgacacyttctatcgacaatttcatattattgtatgtggactggactctatcatcgccagaagatggataaatggcatgctgatatctcttctaaattatgaagatggtgtcttagatccaagctccattgtccctttgatagatggggggacagaaggttttaaaggaaatgcccgggtgattctgcctggaatgactgcttgtatcgaatgcacgctggaactttatccaccacaggttaattttcccatgtgcaccattgcatctatgcccaggctaccagaacactgtattgagtatgtaaggatgttgcagtggcctaaggagcagccttttggagaaggggttccattagatggagatgatcctgaacatatacaatggattttccaaaaatccctagagagagcatcacaatataatattaggggtgttacgtataggctcactcaaggggtagtaaaaagaatcattcctgcagtagcttccacaaatgcagtcattgcagctgtgtgtgccactgaggtttttaaaatagccacaagtgcatacattcccttgaataattacttggtgtttaatgatgtagatgggctgtatacatacacatttgaagcagaaagaaaggaaaactgcccagcttgtagccagcttcctcaaaatattcagttttctccatcagctaaactacaggaggttttggattatctaaccaatagtgcttctctgcaaatgaaatctccagccatcacagccaccctagagggaaaaaatagaacactttacttacagtcggtaacctctattgaagaacgaacaaggccaaatctctccaaaacattgaaagaattggggcttgttgatggacaagaactggcggttgctgatgtcaccaccccacagactgtactattcaaacttcattttacttcttaaggaaaatctccacataatagaaaactcatggaaataatatactttgtggatgctaagaagttgaatcgatgtcatttttagcaatagtgttgccacgatttgtctttttttatataatgaaccactcttttttaactttgtaaccttcccttgaagacagaattttggtgttggtgcttgtaagcattttcattaataatatgagaaatgatacctggagagagagattatgagcaaatgtattgcttcttttagaggaggaagcatacaacctcttttgtgtgaattttgttattatggtcaaagaatgcattcctaagttttcatttgagtacccaaatacacaaaaggtgtccctttaaggaaaataaagaattaagttttaaataacattacattttacaatctgacatctggagtatattgaacataggctatttcttgatataacactcatttaattgtggccatccaaatgaatattattgcagaatttatcttgttcataatgatttgtaaatggtgttatagctgaatacctgtgcatgaaaatgggcaatattttcatctgtttacttgtagtgccatagaggccaatatgcacaatattaactaatgccaagacatggctgtttaaaaaatttaatgttcaaacagttatcactgatgcttttgcactatttattaataaaatcatatattgtgta

SEQ ID NO: 988 - DNA, 4962 bp, Homo sapiens
aggagggggaggaagaggaggtggagaaggaggggggtgactgagctcctcttgcactctcacacacaaacgctgcccaggattacccgccagctcacgccgcgcagtgcgcttttccgctcctcgcgccccaccaccaacattgttctctcaggactcctgggtcccaggggycggaattgggcctgagcgggagaggaaagagacttggctttggccgcggggtcggaggattggggccaggccccctcccccacgcacttttgggggtgtggattatctcatccctccacctccccagcggcgccggcccgcggctgcccagcagcatgaggtggtgctggcggctccgggtcgtggcgcgaccgctgcggcggcggctgctcggggggcgctgaggtagccccccggagcggcacggaggacgcgcttctcctctgcgcgccggggcctcgaggctttttttctccagccgagaggacgcggctgtgatatacgaagactttgtgtggacagtaatgacctcacgtttccgattgcctgctggcagaacctacaatgtacgagcatcagagttggcccgagacagacagcatactgaagtggtttgcaacatccttcttctggataacactgtacaagctttcaaagtcaataaacatgatcaggggcaagtcttgttggatgtcgtcttcaagcatctagatttgactgagcaggactattttggtttacagttggctgatgattccacagataacccaaggtggctggatccaaacaaaccaataaggaagcagctaaagagaggatctccttacagtttgaactttagagtcaarttttttgtaagtgaccccaacaagttacaagaagaatatacaaggtaccagtattttttgcaaattaaacaagacattcttactggaagattaccctgtccttctaatactgctgcccttttagcttcatttgctgttcagtctgaacttggagactacgatcagtcagagaacttgtcaggctacctctcagattattctttcattcctaatcaacctcaagattttgaaaaagaaattgcaaaattacatcagcaacacataggcttatctcctgcagaagcagaatttaattacctaaacacagcacgtaccttagaactctatggagttgaattccactatgcaagggatcagagtaacaatgaaattatgattggagtgatgtcaggaggaattctgatttataagaacagggtacgaatgaatacctttccatggttgaagattgtaaaaatttcttttaagtgcaaacagttttttattcaacttagaaaagaattgcatgaatctagagaaacattattgggatttaatatggtgaattacagagcatgtaaaaatttgtggaaagcatgtgtagaacatcacacattcttccgtttggacagaccacttccacctcaaaagaatttttttgcacattattttacattaggttcaaaattccggtactgtgggagaactgaagtccaatcagttcagtatggcaaagaaaaggcaaataaagacagggtatttgcaagatccccaagtaagcccttggcacggaaattaatggattgggaagtagtaagcagaaattcaatatctgatgacaggttagaaacacaaagtcttccatcacgatctccaccgggaactcctaatcatcgaaattctacattcacgcaggaaggaacccggttacgaccatcttcagttggtcatttggtagaccatatggttcatacttccccaagcgaagtgtttgtaaatcagagatctccgtcatcaacacaagctaatagcattgttctggaatcatcaccatcacaagagacccctggagatgggaagcctccagctttaccacccaaacagtcaaagaaaaacagttggaaccaaattcattattcacattcgcaacaagatctagaaagtcatattaatgaaacatttgatattccatcttctcctgaaaaacccactcctaatggtggtattccacatgataatcttgtcctaatcagaatgaaacctgatgaaaatgggaggtttggattcaatgtaaagggaggatatgatcagaagatgcctgtgattgtgtctcgagtagcaccaggaacacctgctgacctctgtgtccctagactgaatgaaggggaccaagttgtactgatcaatggtcgggacattgcagaacacactcatgatcaggttgtgctgtttattaaagctagttgtgagagacattctggggaactcatgcttctagttcgacctaatgctgtatatgatgtagtggaagaaaagctagaaaatgagccagatttccagtatattcctgagaaagccccactagatagtgtgcatcaggatgaccattccctgcgggagtcaatgatccagctagctgaggggcttatcactggaacagtcctgacacagtttgatcaactgtatcggaaaaaacctggaatgacaatgtcctgtgccaaattacctcagaatatttccaaaaatagatacagagatatttcgccttatgatgccacacgggtcattttaaaaggtaatgaagactacatcaatgcgaactatataaatatggaaattccttcttccagcattataaatcagtacattgcttgtcaagggccattaccacacacttgtacagatttttggcagatgacttgggaacaaggctcctctatggttgtaatgttgaccacacaagttgaacgtggcagagttaaatgtcaccaatattggccagaacccacaggcagttcatcttatggatgctaccaagttacctgccactctgaagaaggaaacactgcctatatcttcaggaagatgaccctatttaaccaagagaaaaatgaaagtcgtccactcactcagatccagtacatagcctggcctgaccatggagtccctgatgattcgagtgactttctagattttgtttgtcatgtacgaaacaagagggctggcaaggaagaacccgttgttgtccattgcagtgctggaatcggaagaactggggttcttattactatggaaacagccatgtgtctcattgaatgcaatcagccagtttatccactagatattgtaagaacaatgagagatcagcgagccatgatgatccaaacacctagtcaatacagatttgtatgtgaagctattttgaaagtttatgaagaaggctttgttaaacccttaacaacatcawcaaataaataagaaagcaaaaagatctgggatatgtgttggaaaactgctttcccttatgttcactgtgccataatgctgctcgcaggaaatggcattttacaaaaaaaaaatgaagaactcaaaaaaactttgaaaacttcagcactgttgcactttatgttttaaaaaatgtcactctttcaaaatctataactcatgtatttgaagactgtttcatgctttgctccgaacaaatagtaaataactgagtatgttcagggtaatttatgaaattttgtggtggtgccatgcaatccccttttggtagaattgccacaaacaaggctcaaaattctcatcatctctgttatacacctgtatcatgaaagcaaaaagaagtaaacatcaggagtcagctctggtcttttgcagtggtttgcgtacttactatactgattaccagattttatttttaaaattttagcaatatcgttcttaatattagccaatacactgcctatggatgcagcacatttttccctgcacaccccctgtagagacctgcctgctgctcagaagaagaaagatggaatttgctgttcccaggaaatgctgcacattgtccatttaccagcatcttatagaaaatataaatatgaatctacaaattctcttggatttaataatgtaacttatatttatcataaggttggcttattccaaatcatgtgatttcacatacttgatgtaaaggaatgcatgcattgtgtcttaaccccttaagtgccttgagacgtccttgtatgtctaacgaaaaggcactcatttgaccccactaggaggtatatatgtatattgtacattcgtatatttttatgcattttgaataagttcacattttaaaaaacagctatattgagtgttatacagtcaaagaagggtaaggaaattctgtttcttactcagtactcgtgatttgctataagaagcaaagataatttgtgttctactgagtgcacactgctgctatggaattgttcaaaatctgcacattcctttacttgagggactgaggggttacggtttagcagctcaactttaaaagatgcttttatgcttcaaatttcatatttatttcatccctaactttaggaagacatctaacatgcagattaatgttaaacatattgataatctaagctaaagttagagcaaataattgtgatttattcatgtccataactaaaatattattctttagcactcatttcagttaatatcaagctttgttcacactgatatattgattgggattcttcaaacgaagaatgaaacattattgacttatttctaagtgtaataactcaataactaaattgagaattttcttgttttttgtgtacaattaaattattccattttatatatacttattaagttataagcatgttaataaggagacttttgactgtccagcctaatggaggatctgattcccattaaggatgtgggaattcccgtattttcctcttcaggtttttttgtttttaagtctacagagagatagaaccttaacattgcccagtttgataaaagtgaaaatttgctcacctatacaaatgttattttacacaattattttatgtggattggggttttaaaagattcatttcctagcagtttctgaatattt

SEQ ID NO: 989 - DNA, 5215 bp, Homo sapiens
cctgcgtgtccctctgcgctccgactggtgcgacttctccctgcgctagcgaggcagggttttggcctcgcctctcgcgagatcgcctcctgttgctgccgccgccgctcctggccactgactggcggcgcctgcgcagccgccatgttcggttgctatgctgcggcctaggagagggggtgtgcttgagggaggaggaagagatagaggaggaggagggggaggaagaggaggtggagaaggaggggggtgactgagctcctcttgcactctcacacacaaacgctgcccaggattacccgccagctcacgccgcgcagtgcgcttttccgctcctcgcgccccaccaccaacattgttctctcaggactcctgggtcccaggggycggaattgggcctgagcgggagaggaaagagacttggctttggccgcggggtcggaggattggggccaggccccctcccccacgcacttttgggggtgtggattatctcatccctgcagggaggtaggagaggtcgccggctgcccgcctccctgccacctccccagcggcgccggcccgcggctgcccagcagcatgaggtggtgctggcggctccgggtcgtggcgcgaccgctgcggcggcggctgctcggggggcgctgaggtagccccccggagcggcacggaggacgcgcttctcctctgcgcgccggggcctcgaggctttttttctccagccgagaggacgcggctgtgatatacgaagactttgtgtggacagtaatgacctcacgtttccgattgcctgctggcagaacctacaatgtacgagcatcagagttggcccgagacagacagcatactgaagtggtttgcaacatccttcttctggataacactgtacaagctttcaaagtcaataaacatgatcaggggcaagtcttgttggatgtcgtcttcaagcatctagatttgactgagcaggactattttggtttacagttggctgatgattccacagataacccaaggtggctggatccaaacaaaccaataaggaagcagctaaagagaggatctccttacagtttgaactttagagtcaarttttttgtaagtgaccccaacaagttacaagaagaatatacaaggtaccagtattttttgcaaattaaacaagacattcttactggaagattaccctgtccttctaatactgctgcccttttagcttcatttgctgttcagtctgaacttggagactacgatcagtcagagaacttgtcaggctacctctcagattattctttcattcctaatcaacctcaagattttgaaaaagaaattgcaaaattacatcagcaacacataggcttatctcctgcagaagcagaatttaattacctaaacacagcacgtaccttagaactctatggagttgaattccactatgcaagggatcagagtaacaatgaaattatgattggagtgatgtcaggaggaattctgatttataagaacagggtacgaatgaatacctttccatggttgaagattgtaaaaatttcttttaagtgcaaacagttttttattcaacttagaaaagaattgcatgaatctagagaaacattattgggatttaatatggtgaattacagagcatgtaaaaatttgtggaaagcatgtgtagaacatcacacattcttccgtttggacagaccacttccacctcaaaagaatttttttgcacattattttacattaggttcaaaattccggtactgtgggagaactgaagtccaatcagttcagtatggcaaagaaaaggcaaataaagacagggtatttgcaagatccccaagtaagcccttggcacggaaattaatggattgggaagtagtaagcagaaattcaatatctgatgacaggttagaaacacaaagtcttccatcacgatctccaccgggaactcctaatcatcgaaattctacattcacgcaggaaggaacccggttacgaccatcttcagttggtcatttggtagaccatatggttcatacttccccaagcgaagtgtttgtaaatcagagatctccgtcatcaacacaagctaatagcattgttctggaatcatcaccatcacaagagacccctggagatgggaagcctccagctttaccacccaaacagtcaaagaaaaacagttggaaccaaattcattattcacattcgcaacaagatctagaaagtcatattaatgaaacatttgatattccatcttctcctgaaaaacccactcctaatggtggtattccacatgataatcttgtcctaatcagaatgaaacctgatgaaaatgggaggtttggattcaatgtaaagggaggatatgatcagaagatgcctgtgattgtgtctcgagtagcaccaggaacacctgctgacctctgtgtccctagactgaatgaaggggaccaagttgtactgatcaatggtcgggacattgcagaacacactcatgatcaggttgtgctgtttattaaagctagttgtgagagacattctggggaactcatgcttctagttcgacctaatgctgtatatgatgtagtggaagaaaagctagaaaatgagccagatttccagtatattcctgagaaagccccactagatagtgtgcatcaggatgaccattccctgcgggagtcaatgatccagctagctgaggggcttatcactggaacagtcctgacacagtttgatcaactgtatcggaaaaaacctggaatgacaatgtcctgtgccaaattacctcagaatatttccaaaaatagatacagagatatttcgccttatgatgccacacgggtcattttaaaaggtaatgaagactacatcaatgcgaactatataaatatggaaattccttcttccagcattataaatcagtacattgcttgtcaagggccattaccacacacttgtacagatttttggcagatgacttgggaacaaggctcctctatggttgtaatgttgaccacacaagttgaacgtggcagagttaaatgtcaccaatattggccagaacccacaggcagttcatcttatggatgctaccaagttacctgccactctgaagaaggaaacactgcctatatcttcaggaagatgaccctatttaaccaagagaaaaatgaaagtcgtccactcactcagatccagtacatagcctggcctgaccatggagtccctgatgattcgagtgactttctagattttgtttgtcatgtacgaaacaagagggctggcaaggaagaacccgttgttgtccattgcagtgctggaatcggaagaactggggttcttattactatggaaacagccatgtgtctcattgaatgcaatcagccagtttatccactagatattgtaagaacaatgagagatcagcgagccatgatgatccaaacacctagtcaatacagatttgtatgtgaagctattttgaaagtttatgaagaaggctttgttaaacccttaacaacatcawcaaataaataagaaagcaaaaagatctgggatatgtgttggaaaactgctttcccttatgttcactgtgccataatgctgctcgcaggaaatggcattttacaaaaaaaaaatgaagaactcaaaaaaactttgaaaacttcagcactgttgcactttatgttttaaaaaatgtcactctttcaaaatctataactcatgtatttgaagactgtttcatgctttgctccgaacaaatagtaaataactgagtatgttcagggtaatttatgaaattttgtggtggtgccatgcaatccccttttggtagaattgccacaaacaaggctcaaaattctcatcatctctgttatacacctgtatcatgaaagcaaaaagaagtaaacatcaggagtcagctctggtcttttgcagtggtttgcgtacttactatactgattaccagattttatttttaaaattttagcaatatcgttcttaatattagccaatacactgcctatggatgcagcacatttttccctgcacaccccctgtagagacctgcctgctgctcagaagaagaaagatggaatttgctgttcccaggaaatgctgcacattgtccatttaccagcatcttatagaaaatataaatatgaatctacaaattctcttggatttaataatgtaacttatatttatcataaggttggcttattccaaatcatgtgatttcacatacttgatgtaaaggaatgcatgcattgtgtcttaaccccttaagtgccttgagacgtccttgtatgtctaacgaaaaggcactcatttgaccccactaggaggtatatatgtatattgtacattcgtatatttttatgcattttgaataagttcacattttaaaaaacagctatattgagtgttatacagtcaaagaagggtaaggaaattctgtttcttactcagtactcgtgatttgctataagaagcaaagataatttgtgttctactgagtgcacactgctgctatggaattgttcaaaatctgcacattcctttacttgagggactgaggggttacggtttagcagctcaactttaaaagatgcttttatgcttcaaatttcatatttatttcatccctaactttaggaagacatctaacatgcagattaatgttaaacatattgataatctaagctaaagttagagcaaataattgtgatttattcatgtccataactaaaatattattctttagcactcatttcagttaatatcaagctttgttcacactgatatattgattgggattcttcaaacgaagaatgaaacattattgacttatttctaagtgtaataactcaataactaaattgagaattttcttgttttttgtgtacaattaaattattccattttatatatacttattaagttataagcatgttaataaggagacttttgactgtccagcctaatggaggatctgattcccattaaggatgtgggaattcccgtattttcctcttcaggtttttttgtttttaagtctacagagagatagaaccttaacattgcccagtttgataaaagtgaaaatttgctcacctatacaaatgttattttacacaattattttatgtggattggggttttaaaagattcatttcctagcagtttctgaatattt

SEQ ID NO: 990 - DNA, 1352 bp, Homo sapiens
atggccggcctggggttttggggccaccctgctggacctctcctgctgctgctgctgctggtgctgccaccccgggccctgccagaaggacccctggtgttcgtggctctggtattccgccatggcgaccgggccccgctggcctcctaccccatggacccacacaaggaggtggcctccaccctgtggccacgaggcctgggccagctgaccacrgagggggtccgccagcagctggagctgggccgcttcctgaggagccgctacgaggccttcctgagtccggagtaccggcgggaggaggtgtacatccgcagcacggactttgaccgcacgctggagagtgcccaggccaaccttgccgggctgtttcccgaggctgctccagggagccccgaggcccgctggaggccgatcccggtgcacacggtgcccgtggctgaggataagctgctgaggttccccatgcgcagctgtccccgataccacgagctgctgcgggaggccaccgaggccgccgagtaccaggaggccctggagggctggacgggcttcctgagtcgcctggagaacttcacgggactgtcgctggttggagagccactgcgcagggcatggaaggttctggacaccctcatgtgccagcaagcccacggtcttccactaccagcctgggcctccccagatgtcctgcggactcttgcccagatctcggctttggatattggagcccacgtgggcccaccccgggcagcagagaaggcccagctgacaggggggatcctgctgaatgctatccttgcaaacttctcccgggtccagcgcctggggctgcccctcaagatggtcatgtactcagctcatgacagcaccctgctggccctccagggggccctgggcctctatgatggacacaccccgccatatgctgcctgcctcggctttgagttccggaagcacctggggaatcccgccaaagatggagggaatgtcaccgtctccctcttctaccgcaatgactccgcccacctgcccctgcctctcagcctccccgggtgcccggccccctgtccactaggccgcttctaccagctgactgccccggcccggcctcccgcccatggggtctcctgccatggcccctatgaggctgccatccccccagctccagtggtgcccctgctggccggagctgtagctgtgctggtggcactcagcttggggctgggcctgctggcctggagaccagggtgcctgcgggccttggggggccccgtgtgagccagaaaccagggcttccctacccccagctgacactggaccccaacatgtatgctcagtagctgctctgg

SEQ ID NO: 991 - DNA, 1073 bp, Homo sapiens
atggccggcctggggttttggggccaccctgctggacctctcctgctgctgctgctgctggtgctgccaccccgggccctgccagaaggacccctggtgttcgtggctctggtattccgccatggcgaccgggccccgctggcctcctaccccatggacccacacaaggaggtggcctccaccctgtggccacgaggcctgggccagctgaccacrgagggggtccgccagcagctggagctgggccgcttcctgaggagccgctacgagggcttcctgagtcgcctggagaacttcacgggactgtcgctggttggagagccactgcgcagggcatggaaggttctggacaccctcatgtgccagcaagcccacggtcttccactaccagcctgggcctccccagatgtcctgcggactcttgcccagatctcggctttggatattggagcccacgtgggcccaccccgggcagcagagaaggcccagctgacaggggggatcctgctgaatgctatccttgcaaacttctcccgggtccagcgcctggggctgcccctcaagatggtcatgtactcagctcatgacagcaccctgctggccctccagggggccctgggcctctatgatggacacaccccgccatatgctgcctgcctcggctttgagttccggaagcacctggggaatcccgccaaagatggagggaatgtcaccgtctccctcttctaccgcaatgactccgcccacctgcccctgcctctcagcctccccgggtgcccggccccctgtccactaggccgcttctaccagctgactgccccggcccggcctcccgcccatggggtctcctgccatggcccctatgaggctgccatccccccagctccagtggtgcccctgctggccggagctgtagctgtgctggtggcactcagcttggggctgggcctgctggcctggagaccagggtgcctgcgggccttggggggccccgtgtgagccagaaaccagggcttccctacccccagctgacactggaccccaacatgtatgctcagtagctgctctgg

SEQ ID NO: 992 - DNA, 1097 bp, Homo sapiens
atggccggcctggggttttggggccaccctgctggacctctcctgctgctgctgctgctggtgctgccaccccgggccctgccagaaggacccctggtgttcgtggctctggtattccgccatggcgaccgggccccgctggcctcctaccccatggacccacacaaggaggtggcctccaccctgtggccacgaggcctgggccagctgaccacrgagggggtccgccagcagctggagctgggccgcttcctgaggagccgctacgaggccttcctgaccccgcgcatccagggcttcctgagtcgcctggagaacttcacgggactgtcgctggttggagagccactgcgcagggcatggaaggttctggacaccctcatgtgccagcaagcccacggtcttccactaccagcctgggcctccccagatgtcctgcggactcttgcccagatctcggctttggatattggagcccacgtgggcccaccccgggcagcagagaaggcccagctgacaggggggatcctgctgaatgctatccttgcaaacttctcccgggtccagcgcctggggctgcccctcaagatggtcatgtactcagctcatgacagcaccctgctggccctccagggggccctgggcctctatgatggacacaccccgccatatgctgcctgcctcggctttgagttccggaagcacctggggaatcccgccaaagatggagggaatgtcaccgtctccctcttctaccgcaatgactccgcccacctgcccctgcctctcagcctccccgggtgcccggccccctgtccactaggccgcttctaccagctgactgccccggcccggcctcccgcccatggggtctcctgccatggcccctatgaggctgccatccccccagctccagtggtgcccctgctggccggagctgtagctgtgctggtggcactcagcttggggctgggcctgctggcctggagaccagggtgcctgcgggccttggggggccccgtgtgagccagaaaccagggcttccctacccccagctgacactggaccccaacatgtatgctcagtagctgctctgg

SEQ ID NO: 993 - DNA, 1287 bp, Homo sapiens
atggccggcctggggttttggggccaccctgctggacctctcctgctgctgctgctgctggtgctgccaccccgggccctgccagaaggacccctggtgttcgtggctctggtgaggcgcccccaccccggcctgcccttagctcccccagggctagccctgaccagtcctgtccccaggtattccgccatggcgaccgggccccgctggcctcctaccccatggacccacacaaggaggtggcctccaccctgtggccacgaggcctgggccagctgaccacrgagggggtccgccagcagctggagctgggccgcttcctgaggagccgctacgaggccttcctgagtccggagtaccggcgggaggaggtgtacatccgcagcacggactttgaccgcacgctggagagtgcccaggccaaccttgccgggctgtttcccgaggctgctccagggagccccgaggcccgctggaggccgatcccggtgcacacggtgcccgtggctgaggataagctgctgaggttccccatgcgcagctgtccccgataccacgagctgctgcgggaggccaccgaggccgccgagtaccaggaggccctggagggctggacgggcttcctgagtcgcctggagaacttcacgggactgtcgctggttggagagccactgcgcagggcatggaaggttctggacaccctcatgtgccagggatcctgctgaatgctatccttgcaaacttctcccgggtccagcgcctggggctgcccctcaagatggtcatgtactcagctcatgacagcaccctgctggccctccagggggccctgggcctctatgatggacacaccccgccatatgctgcctgcctcggctttgagttccggaagcacctggggaatcccgccaaagatggagggaatgtcaccgtctccctcttctaccgcaatgactccgcccacctgcccctgcctctcagcctccccgggtgcccggccccctgtccactaggccgcttctaccagctgactgccccggcccggcctcccgcccatggggtctcctgccatggcccctatgaggctgccatccccccagctccagtggtgcccctgctggccggagctgtagctgtgctggtggcactcagcttggggctgggcctgctggcctggagaccagggtgcctgcgggccttggggggccccgtgtgagccagaaaccagggcttccctacccccagctgacactggaccccaacatgtatgctcagtagctgctctgg

SEQ ID NO: 994 - DNA, 1420 bp, Homo sapiens
atggccggcctggggttttggggccaccctgctggacctctcctgctgctgctgctgctggtgctgccaccccgggccctgccagaaggacccctggtgttcgtggctctggtgaggcgcccccaccccggcctgcccttagctcccccagggctagccctgaccagtcctgtccccaggtattccgccatggcgaccgggccccgctggcctcctaccccatggacccacacaaggaggtggcctccaccctgtggccacgaggcctgggccagctgaccacrgagggggtccgccagcagctggagctgggccgcttcctgaggagccgctacgaggccttcctgagtccggagtaccggcgggaggaggtgtacatccgcagcacggactttgaccgcacgctggagagtgcccaggccaaccttgccgggctgtttcccgaggctgctccagggagccccgaggcccgctggaggccgatcccggtgcacacggtgcccgtggctgaggataagctgctgaggttccccatgcgcagctgtccccgataccacgagctgctgcgggaggccaccgaggccgccgagtaccaggaggccctggagggctggacgggcttcctgagtcgcctggagaacttcacgggactgtcgctggttggagagccactgcgcagggcatggaaggttctggacaccctcatgtgccagcaagcccacggtcttccactaccagcctgggcctccccagatgtcctgcggactcttgcccagatctcggctttggatattggagcccacgtgggcccaccccgggcagcagagaaggcccagctgacaggggggatcctgctgaatgctatccttgcaaacttctcccgggtccagcgcctggggctgcccctcaagatggtcatgtactcagctcatgacagcaccctgctggccctccagggggccctgggcctctatgatggacacaccccgccatatgctgcctgcctcggctttgagttccggaagcacctggggaatcccgccaaagatggagggaatgtcaccgtctccctcttctaccgcaatgactccgcccacctgcccctgcctctcagcctccccgggtgcccggccccctgtccactaggccgcttctaccagctgactgccccggcccggcctcccgcccatggggtctcctgccatggcccctatgaggctgccatccccccagctccagtggtgcccctgctggccggagctgtagctgtgctggtggcactcagcttggggctgggcctgctggcctggagaccagggtgcctgcgggccttggggggccccgtgtgagccagaaaccagggcttccctacccccagctgacactggaccccaacatgtatgctcagtagctgctctgg

SEQ ID NO: 995 - DNA, 1959 bp, Homo sapiens
tttctattcttgccaggtmtgcatggtgtggacaatgggatattaatatttgacaaggttcggatacccagggagaacctgctggataagtttggttccgtggctccagatggacagtaccattcgcctattaggaacaagagtgcaagattcaatgccatgctggcagcactgaccccttcgagattagctgtggctttccaagctatgggtgccatgaagcttgggttgaygatagccattcgctatagccacagsyggaggcagtttgggcccaaaaccaaggaagaggtgaagatcattgagcaccaaacacagaccctgcggctgatgccccacctggccacagccttggccctgaccttcgtcagcaggtatgctggggccctcctggatgaggatgtcttccagggaaaggagctggtcaacagtcgctcgctgcaggctctggtggcrgggctgaaggcctacagcacctgggagaacatccgctgcctgcaggactgccgcgagtgcactggaggcatgggttacatgatggaaaatcgaatctcaggcttaaagtgtgacacagatgtgtttgccacttttgaaggtgacgatgttgttatgcttcaggttgtggggcgggaactgctggcccaatacaccaaacagtatgaagaaaaaccactctttggcctgctccaaaactgggctgaatctgtgggggacaagctgagaaccagtttcctggcatttaacatggacacagttgatgatctcgcctttctgttgaaagcagtgaaatttcgtgaaagggttcttcagcggggtttggtggccagaatttattataaggtaaagaccaagaaggaggattttttccatgcctggaactcgtgtctgcaccacgtggcttctctgtccctggcacacactcaccgagttaccttagagcagttctccctagcagtgaagagctgtcctgaccaagaggaccagactttgttaatgaagttttgtctgttgtatggaaccaagctggtgtttcaggagcgggcctggtatttagaacataaatacttgactcccatggccagcacgaggatcaggaatcaggagagatgctgaaacacaaacaggtataagactcagtctccacatgaagggagctcatatccaaggacacaaaaccactttaaaaacataaatactggccaggtgcagtggctcatgcctgtaatcccagcactatgggaggctgaggcgggcagatctcctgagctcaggagttcgacaccatcttgggcaacatggtgaaaccctgtctactaaaatacaaaaaaattagctgggcgtggtggcatgtggctgtagtcccagctactcgggaggctgaggcacgagaatcgcttgagccctggagttggaggttgcagtgagcagagattgcgccactgtactccagtttggactacagagtgagactccatctcaaaacaaaacaaaacaacaacagcaaaaaacaacaaaacaaaacacaaatactctcacggggcatggaggttttcgaatgaacttggccataagaataaattcagagttgacagaacagacgtcttaggaataaatgccattcttatgctagaccttgaagagtagaaaattaagagatggtggcccaattgagaggggaaaatgcagttgaaacttcagacagggttgataaagtgaggacgatcatagacatggagtacttagacatattaataaacaataaagactttacctgtctaatggaaaacctggagaagtcgtcaggaaccagactacagtggaccctggagaaccttgaagaacatttttccttttcaggaaaacggaggttacagagaaaagtatatgtaatgatgctacagtaatgtatttctgtataacaaatgactccaaacttacgacttaaaacaaccaccactt

SEQ ID NO: 996 - DNA, 1002 bp, Homo sapiens
gcagaggcaggtgagcgcgatgcagccggcgccgggtctggggctcggggactcctccctgcaccgctacctggacggcgacttctggagcctcaagaacgagctgcgcggactcctcggcggcgcccgctcttccggcaaaggtatgatttaagcttggatgaaatgagagctttgacagttcagagagtgaagtttgccatggacctgcctctgttaaaacgtgcaggtcaggatctggcagagaaaacaaagaattttgtcagccgaagccttgtcataggagaagtcctctccatggcggacatggccacaggagtgaagtgcggaataatttattggctatttggtggtgctatcaggaatctcggaagccctgaacatgttactaagtggtttcagccactccaggagcagaaatacactgggatgtttgcaatgaccgagaggggccatgggagcaacgcgagagggatccagaccgaagccacctttgacctctctgcccaggagtttgtaattgacacgccgtgtgaaaatgcggagaagatgtatattggaaatgccatgtacgggaattatgcagctgtctttgcccagctcatcatagatggaagatctcaagggccccactgtttcatcgttcctgtccgggatgaaaacggaagcttgtacccaggagtcacagctattgatatgatgtacaaggagggtmtgcatggtgtggacaatgggatattaatatttgacaaggttcggatacccagggagaacctgctggataagtttggttccgtggctccagatggacagtaccattcgcctattaggaacaagagtgcaagattcaatgccatgctggcagcactgaccccttcgagattagctgtggctttccaagctatgggtgccatgaagcttgggttgaygatagccattcgctatagccacaggtccagaatcatctcccagaactgctgttcagctccagctggtctttat

SEQ ID NO: 997 - DNA, 2030 bp, Homo sapiens
ggccccactgtttcatcgttcctgtccgggatgaaaacggaagcttgtacccaggagtcacagctattgatatgatgtacaaggagggtmtgcatggtgtggacaatgggatattaatatttgacaaggttcggatacccagggagaacctgctggataagtttggttccgtggctccagatggacagtaccattcgcctattaggaacaagagtgcaagattcaatgccatgctggcagcactgaccccttcgagattagctgtggctttccaagctatgggtgccatgaagcttgggttgaygatagccattcgctatagccacagsyggaggcagtttgggcccaaaaccaaggaagaggtgaagatcattgagcaccaaacacagaccctgcggctgatgccccacctggccacagccttggccctgaccttcgtcagcaggtatgctggggccctcctggatgaggatgtcttccagggaaaggagctggtcaacagtcgctcgctgcaggctctggtggcrgggctgaaggcctacagcacctgggagaacatccgctgcctgcaggactgccgcgagtgcactggaggcatgggttacatgatggaaaatcgaatctcaggcttaaagtgtgacacagatgtgtttgccacttttgaaggtgacgatgttgttatgcttcaggttgtggggcgggaactgctggcccaatacaccaaacagtatgaagaaaaaccactctttggcctgctccaaaactgggctgaatctgtgggggacaagctgagaaccagtttcctggcatttaacatggacacagttgatgatctcgcctttctgttgaaagcagtgaaatttcgtgaaagggttcttcagcggggtttggtggccagaatttattataaggtaaagaccaagaaggaggattttttccatgcctggaactcgtgtctgcaccacgtggcttctctgtccctggcacacactcaccgagttaccttagagcagttctccctagcagtgaagagctgtcctgaccaagaggaccagactttgttaatgaagttttgtctgttgtatggaaccaagctggtgtttcaggagcgggcctggtatttagaacataaatacttgactcccatggccagcacgaggatcaggaatcaggagagatgctgaaacacaaacaggtataagactcagtctccacatgaagggagctcatatccaaggacacaaaaccactttaaaaacataaatactggccaggtgcagtggctcatgcctgtaatcccagcactatgggaggctgaggcgggcagatctcctgagctcaggagttcgacaccatcttgggcaacatggtgaaaccctgtctactaaaatacaaaaaaattagctgggcgtggtggcatgtggctgtagtcccagctactcgggaggctgaggcacgagaatcgcttgagccctggagttggaggttgcagtgagcagagattgcgccactgtactccagtttggactacagagtgagactccatctcaaaacaaaacaaaacaacaacagcaaaaaacaacaaaacaaaacacaaatactctcacggggcatggaggttttcgaatgaacttggccataagaataaattcagagttgacagaacagacgtcttaggaataaatgccattcttatgctagaccttgaagagtagaaaattaagagatggtggcccaattgagaggggaaaatgcagttgaaacttcagacagggttgataaagtgaggacgatcatagacatggagtacttagacatattaataaacaataaagactttacctgtctaatggaaaacctggagaagtcgtcaggaaccagactacagtggaccctggagaaccttgaagaacatttttccttttcaggaaaacggaggttacagagaaaagtatatgtaatgatgctacagtaatgtatttctgtataacaaatgactccaaacttacgacttaaaacaaccaccactt

SEQ ID NO: 998 - DNA, 2655 bp, Homo sapiens
gcagaggcaggtgagcgcgatgcagccggcgccgggtctggggctcggggactcctccctgcaccgctacctggacggcgacttctggagcctcaagaacgagctgcgcggactcctcggcggcgcccgctcttccggcaaaggtatgatttaagcttggatgaaatgagagctttgacagttcagagagtgaagtttgccatggacctgcctctgttaaaacgtgcaggtcaggatctggcagagaaaacaaagaattttgtcagccgaagccttgtcataggagaagtcctctccatggcggacatggccacaggagtgaagtgcggaataatttattggctatttggtggtgctatcaggaatctcggaagccctgaacatgttactaagtggtttcagccactccaggagcagaaatacactgggatgtttgcaatgaccgagaggggccatgggagcaacgcgagagggatccagaccgaagccacctttgacctctctgcccaggagtttgtaattgacacgccgtgtgaaaatgcggagaagatgtatattggaaatgccatgtacgggaattatgcagctgtctttgcccagctcatcatagatggaagatctcaagggccccactgtttcatcgttcctgtccgggatgaaaacggaagcttgtacccaggagtcacagctattgatatgatgtacaaggagggtmtgcatggtgtggacaatgggatattaatatttgacaaggttcggatacccagggagaacctgctggataagtttggttccgtggctccagatggacagtaccattcgcctattaggaacaagagtgcaagattcaatgccatgctggcagcactgaccccttcgagattagctgtggctttccaagctatgggtgccatgaagcttgggttgaygatagccattcgctatagccacagsyggaggcagtttgggcccaaaaccaaggaagaggtgaagatcattgagcaccaaacacagaccctgcggctgatgccccacctggccacagccttggccctgaccttcgtcagcaggtatgctggggccctcctggatgaggatgtcttccagggaaaggagctggtcaacagtcgctcgctgcaggctctggtggcrgggctgaaggcctacagcacctgggagaacatccgctgcctgcaggactgccgcgagtgcactggaggcatgggttacatgatggaaaatcgaatctcaggcttaaagtgtgacacagatgtgtttgccacttttgaaggtgacgatgttgttatgcttcaggttgtggggcgggaactgctggcccaatacaccaaacagtatgaagaaaaaccactctttggcctgctccaaaactgggctgaatctgtgggggacaagctgagaaccagtttcctggcatttaacatggacacagttgatgatctcgcctttctgttgaaagcagtgaaatttcgtgaaagggttcttcagcggggtttggtggccagaatttattataaggtaaagaccaagaaggaggattttttccatgcctggaactcgtgtctgcaccacgtggcttctctgtccctggcacacactcaccgagttaccttagagcagttctccctagcagtgaagagctgtcctgaccaagaggaccagactttgttaatgaagttttgtctgttgtatggaaccaagctggtgtttcaggagcgggcctggtatttagaacataaatacttgactcccatggccagcacgaggatcaggaatcaggagagatgctgaaacacaaacaggtataagactcagtctccacatgaagggagctcatatccaaggacacaaaaccactttaaaaacataaatactggccaggtgcagtggctcatgcctgtaatcccagcactatgggaggctgaggcgggcagatctcctgagctcaggagttcgacaccatcttgggcaacatggtgaaaccctgtctactaaaatacaaaaaaattagctgggcgtggtggcatgtggctgtagtcccagctactcgggaggctgaggcacgagaatcgcttgagccctggagttggaggttgcagtgagcagagattgcgccactgtactccagtttggactacagagtgagactccatctcaaaacaaaacaaaacaacaacagcaaaaaacaacaaaacaaaacacaaatactctcacggggcatggaggttttcgaatgaacttggccataagaataaattcagagttgacagaacagacgtcttaggaataaatgccattcttatgctagaccttgaagagtagaaaattaagagatggtggcccaattgagaggggaaaatgcagttgaaacttcagacagggttgataaagtgaggacgatcatagacatggagtacttagacatattaataaacaataaagactttacctgtctaatggaaaacctggagaagtcgtcaggaaccagactacagtggaccctggagaaccttgaagaacatttttccttttcaggaaaacggaggttacagagaaaagtatatgtaatgatgctacagtaatgtatttctgtataacaaatgactccaaacttacgacttaaaacaaccaccactt

SEQ ID NO: 999 - DNA, 414 bp, Homo sapiens
atggacccctttgcctggggtccctgtcacctggctgccctgggttggagtggagcacacggcagsyggaggcagtttgggcccaaaaccaaggaagaggtgaagatcattgagcaccaaacacagaccctgcggctgatgccccacctggccacagccttggccctgaccttcgtcagcaggtatgctggggccctcctggatgaggatgtcttccagggaaaggagctggtcaacagtcgctcgctgcaggctctggtggcrgggctgaaggcctacagcacctgggagaacatccgctgcctgcaggactgccgcgagtgcactggaggcatgtgcgttccagaatttcacaaagaagaacagaaacagccaaagcagggtgaaaaaaatatctacaaaattggagcgcag

SEQ ID NO: 1000 - DNA, 992 bp, Homo sapiens
ggatgtgtgtgcagtggtgaagggaacggctccttcctcataatggaccctccgcccccagcctgtgcagtgcgggggctgctggcaggcagagtgccgccccaggggccctgggagctgcagggcatattgctgctgagccagaatgagctgtaccgccagatcctgctgctgatgcacctgctgccgcaagacctgctgctgctaaagccctgccagtcttcctactgctactgtcaggaggtgctggacmggctcatccaatgcgggctcctggttgctgaggagctccgggtccggccagcctgtgacacagggcracggcgaytgagcagaaagctgctgtggaaaccgagtggggattttactgatagtgacagtgatgacttcaaagagaccgagggccagtactccaggctcagccagcagtcacactgcccagatttctttcttttcctctgcygcctgctcagcccgctgctcaaggcctttgcacaggctgccgccttcctccgccagggccagctgcccgatactgagtcgggctacacagaccagctgttccagttcctgcaggccaccgcccaggaagaagggatcttcgagtgtgcggacccaaagcttgccatcagtgctatctggaccttcagagacctaggggttctgcagcagacgccgagccctgcaggccccaggctccacctrtcccctacttttgccagccwggacaatcaggaaaaactagaacagttcatccggcagttcatttgtagctagaactgtgaggaggagcctgtgctgagacttctcagccccagaacacagctgtgtcctagagccagaagatggagaggaggctgcaaacccttagctgctctataaatataatcattgaggcttgattgtcccttgccatctcttgctttttccctyctttgatgtgataaacaaggggacgagacgagttgtcttttccccagcccagcagcatc

SEQ ID NO: 1001 - DNA, 1988 bp, Homo sapiens
gattacagacatgagccacctcgcccagccttttcatggctgagtgatattccattgtgtggatggatcacactagmtactctgacccatggatcccctgggcccagccaagccacagtggctgtggcgccgctgtctggccgggctgctgtttcagctgctggtggctgtgtgtttcttctcctacctgcgtgtgtcccgagacgatgccactggatcccctaggccagggcttatggcagtggaacctgtcaccggrgctcccaatgggtcccgctgccaggacagcatggcgacccctgcccaccccaccctactgatcctgctgtggacgtggccttttaacacacccgtggctctgccccrctgctcagagatggtgcccggcgcggccgactgcaacatcactgccgactccagtgtgtacccacaggcagacgcggtcatcgtgcaccactgggatatcatgtacaaccccagtgccaacctcccgccccccaccaggccgcargggcagcgctggatctggttcagcatggagtcccccagcaactgccggcacctggaagccctggacggatacttcaatctcaccatgtcctaccgcagcgactccracatcttcacrccctayggctggctggagcygtggtccggccagcctgcccacycaccgctcaacctctcggccaagaccgagctggtggcctgggcggtgtccaactggaagccggactcggccagggtgcgctactaccagagcctgcaggcycatctcaaggtggacgtgtacggacgctcccacaagcccctgcccmagggraccatgatggagacgctgtcccggtacaagttctatctggccttcgagaactccttgcaccccgactacatcaccgagaagctgtggaggaacgccctggaggcctgggccgtgcccgtggtgctgggccccagcagaagcaactacgagaggttcctgccrcccgacgccttcatccacgtggaygacttccagagccccaaggacctggcccggtacctgcaggagctggacaaggaccacgcccgctacctgagctactttcrctggcgggagaygctgcggcctcgctccttcagctgggcactggctttctgcaaggcctgctggaarctgcagcaggaatcyaggtaccagacggtgcgcagcatagcggcttggttcacctgagaggccggcatggggcctgggctgccrggrcctcactttcccagggcctcacctacctagggyctcactagtcgggggatttacctacctggggcctcggctgcctggggyctcggctgcctggggyctcacctgcctggggcctcacctgctggagtctttggtggccaggcatgtgacttacmtgggatttcacttgccgggcttcactgccaggagcctcccctgctggggaccttgccagctggggctggggatggtgcctactggggaccttgctttctggaggctgcacctactgaggatctcggctgttggggactttacctgctgggacctgctcccagagaccttgccacactgaatgtcacctgctaggagcctcacccgctgggaggcacagggcccaagggagctggatgtgttgcccaaggtgtgcagggcaggtcagggaagggcagggtcccctaaggaggagggcgaagggtatgtgtgtgaccatcagcagtggtgtgcacatggctgggggacactcggtttgaccgccagcggatgggtgtcacaaatgcatcactrtgggtgtgacctcggcgtgactctgatagtgcctgtggatgtgttgcgatgcctcaccctggagggcactgggccctgagaacgggtgcccttgaggccctgcccccgggcgatggtgcaggctggtttgcttgtggttttattgctgttgttaaccacccatgaggggtgcaaacagataatgctgttaacattttca

SEQ ID NO: 1002 - DNA, 2832 bp, Homo sapiens
gccaggaaagatgtgaaaaactctagctggtgaccgagaggaggagtagagtgtgcccttagttcatatgaactagagggagttggtatttgcacagcagtcagggtcacatgagtgatcatggtacagtgagaagttctccctcccagggccaggtcacagggtttgtttctgttcaatccggattcttccagtaaaagcttcaacttcccacactgaagctgagagcctcccaaagtgctggctacctgctgagcgcccccgtaactctgacacagtagtaatttgagcctctgcaattgccgtctgcttcctgtgaaagtcctttccgtgcccactgacccttgagtgggcctttgagctgctgactttcagctggaacttgaagggaccccaaccctgagacactatggccctgacctcagacctggggaaacagataaaactgaaagaggtggaggggaccctcctgcagcctgcaactgtggacaactggagccagatccagagcttcgaggccaaaccagatgatctcctcatctgcacctaccctaaagcagggacaacgtggattcaggaaattgtggatatgattgaacagaatggggacgtggagaagtgccagcgagccatcatccaacaccgccatcctttcattgagtgggctcggccaccccaaccttctggtgtggaaaaagccaaagcaatgccctctccacggatactaaagactcacctttccactcagctgctgccaccgtctttctgggaaaacaactgcaagttccttyatgtagctcgaaatgccaaagactgtatggtttcctactaccatttccaaaggatgaaccacatgcttcctgaccctggtacctgggaagagtattttgaaaccttcatcaatggaaaagtggtttggggttcctggtttgaccacgtgaaaggatggtgggagatgaaagacagacaccagattctcttcctcttctatgaggacataaagagggacccaaagcatgaaattcggaaggtgatgcagttcatgggaaagaaggtggatgaaacagtgctagataaaattgtccaggagacgtcatttgagaaaatgaaagaaaatcccatgacaaatcgttctacagtttccaaatctatcttggaccagtcaatttcckccttcatgagaaaaggaactgtgggggattggaaaaaccacttcactgttgcccagaatgagaggtttgatgaaatctatagaagaaagatggaaggaacctccataaacttctgcatggaactctgagcaagatgtaaataaaattaaaaggtggatggcaagagtgcaaatactatcttcaatccttcagtcccagccagaagaatctctgaaagcatattgtkaatgtatacaatgtagtacaaacaatctctgtgatgattaacagtatgtcaccacttcwttttttaaaaaggatcacgtctaatgcccattttcccaactattctttccaaagtaagatataaggtagcttaataaactaagtaaaacrtatgacttgagtacaawaggattgttttaatccccattattctggaaagtgcrtcctagtctcccagtctataacatcataataccttgagtataagtccaaatattaggttatatctatattaaaaacaaaatttctgtcatctgtcctggccattcaggcaactccagcctgggctcaatcctggagttctgtctggtcactatcagaaggaacactttgagggaaaccctggtgcagccagccctgaggaaacatggcctgagtgccctcactggtgggtgggaataaaatggaagtgcacagaggagatgtcagaagaccaaaacttggtgaatagtcccagtgctaggtcatataggaaacagaaagcatgacagtggccttttgggaacccaagttacrtcctggtgaaagcagaaaggaggagacaggatggctgtcaacaacgtcagcatgggcatggctcccaggcatggaggtaattgggtcttggcttcaatgccacccttttgggaagccctaaaccaagtgaggtgttcttttcccttgcttcccatatttgtcccagttgcagccctsttsttatgtatttactcttcaatttcttatytatacctctcactcaattgttaattctttgggttcagtctcatgccatatttactcctagtacctaatgcagtgcctggcacacagcaagtgcccttgagaacttgtagagggagtaaaaaagtgcatggataaatgactgcagcaaatcacaaattttgaactttgacccttttcttttagtcccaaatagtggcattccatagctgagggtagtaggagcagttcaccctgggagcagacaataagaggaagaatgaagccaactaaaattctgaatgctttttgttggatttcgtagggtattttttttaaaatagggtcttgctatgttgcccaggctggtcttaactgactgctttttattattaccatgcactggcaattccaaacaatgtcagtgttaaaatgcttctccctgaaaaagagaaaaaaaaaaggaaaaaaagaaaagaaaagtgaaaagaaaaactcttattggcctaagttctaaataatagctaggttaccactgagttttaactatatgtatatgagcttcaaataagcacctttttattatgtaaataaataaaagttatctgtatccccactgcattgtaaaatttttgttgttttgtttcatgtcttattcacctttgtatggaaattaattcagaaaccccaagcatag

SEQ ID NO: 1003 - DNA, 2865 bp, Homo sapiens
gccaggaaagatgtgaaaaactctagctggtgaccgagaggaggagtagagtgtgcccttagttcatatgaactagagggagttggtatttgcacagcagtcagggtcacatgagtgatcatggtacagtgagaagttctccctcccagggccaggtcacagggtttgtttctgttcaatccggattcttccagtaaaagcttcaacttcccacactgaagctgagagcctcccaaagtgctggctacctgctgagcgcccccgtaactctgacacagtagtaatttgagcctctgcaattgccgtctgcttcctgtgaaagtcctttccgtgcccactgacccttgagtgggcctttgagctgctgactttcagctggaacttgaagggaccccaaccctgagacactatggccctgacctcagacctggggaaacagataaaactgaaagaggtggaggggaccctcctgcagcctgcaactgtggacaactggagccagatccagagcttcgaggccaaaccagatgatctcctcatctgcacctaccctaaagcagggacaacgtggattcaggaaattgtggatatgattgaacagaatggggacgtggagaagtgccagcgagccatcatccaacaccgccatcctttcattgagtgggctcggccaccccaaccttctgagacaggatttcaccatgttgcccaggctggtctcaaactcctgagctcaagcaatccacctgcctcaacctcccaaagtgccaagattacagacctgctgccaccgtctttctgggaaaacaactgcaagttccttyatgtagctcgaaatgccaaagactgtatggtttcctactaccatttccaaaggatgaaccacatgcttcctgaccctggtacctgggaagagtattttgaaaccttcatcaatggaaaagtggtttggggttcctggtttgaccacgtgaaaggatggtgggagatgaaagacagacaccagattctcttcctcttctatgaggacataaagagggacccaaagcatgaaattcggaaggtgatgcagttcatgggaaagaaggtggatgaaacagtgctagataaaattgtccaggagacgtcatttgagaaaatgaaagaaaatcccatgacaaatcgttctacagtttccaaatctatcttggaccagtcaatttcckccttcatgagaaaaggaactgtgggggattggaaaaaccacttcactgttgcccagaatgagaggtttgatgaaatctatagaagaaagatggaaggaacctccataaacttctgcatggaactctgagcaagatgtaaataaaattaaaaggtggatggcaagagtgcaaatactatcttcaatccttcagtcccagccagaagaatctctgaaagcatattgtkaatgtatacaatgtagtacaaacaatctctgtgatgattaacagtatgtcaccacttcwttttttaaaaaggatcacgtctaatgcccattttcccaactattctttccaaagtaagatataaggtagcttaataaactaagtaaaacrtatgacttgagtacaawaggattgttttaatccccattattctggaaagtgcrtcctagtctcccagtctataacatcataataccttgagtataagtccaaatattaggttatatctatattaaaaacaaaatttctgtcatctgtcctggccattcaggcaactccagcctgggctcaatcctggagttctgtctggtcactatcagaaggaacactttgagggaaaccctggtgcagccagccctgaggaaacatggcctgagtgccctcactggtgggtgggaataaaatggaagtgcacagaggagatgtcagaagaccaaaacttggtgaatagtcccagtgctaggtcatataggaaacagaaagcatgacagtggccttttgggaacccaagttacrtcctggtgaaagcagaaaggaggagacaggatggctgtcaacaacgtcagcatgggcatggctcccaggcatggaggtaattgggtcttggcttcaatgccacccttttgggaagccctaaaccaagtgaggtgttcttttcccttgcttcccatatttgtcccagttgcagccctsttsttatgtatttactcttcaatttcttatytatacctctcactcaattgttaattctttgggttcagtctcatgccatatttactcctagtacctaatgcagtgcctggcacacagcaagtgcccttgagaacttgtagagggagtaaaaaagtgcatggataaatgactgcagcaaatcacaaattttgaactttgacccttttcttttagtcccaaatagtggcattccatagctgagggtagtaggagcagttcaccctgggagcagacaataagaggaagaatgaagccaactaaaattctgaatgctttttgttggatttcgtagggtattttttttaaaatagggtcttgctatgttgcccaggctggtcttaactgactgctttttattattaccatgcactggcaattccaaacaatgtcagtgttaaaatgcttctccctgaaaaagagaaaaaaaaaaggaaaaaaagaaaagaaaagtgaaaagaaaaactcttattggcctaagttctaaataatagctaggttaccactgagttttaactatatgtatatgagcttcaaataagcacctttttattatgtaaataaataaaagttatctgtatccccactgcattgtaaaatttttgttgttttgtttcatgtcttattcacctttgtatggaaattaattcagaaaccccaagcatag

SEQ ID NO: 1004 - DNA, 1126 bp, Homo sapiens
agagctgggctctgcgtcctcgtccagccgccaactcggccaaaggcgaagccagcagtttcttctgctgccgggcaacgcgccttttaaacctgagggagtgggcgcgtgagcacttaatggcgccsgtgacagagtgagcttaacggattaataagcgcagccaggccagctctggggtctcggcaggtggtccgcgacatgacctccgagttcttctctgcccagctccgggcccagatctctgacgacaccactcacccgatctcctactacaagcccgagttctacatgccggatgacgggggcactgctcacctgtctgtggtcgcagaggacggcagtgctgtgtccgccaccagcaccatcaacctctactttggctccaaggtgcgctccccagtcagcgrgatcctgctcaataatgaaatggaygacttcagctctaccagcatcaccaacgagtttggggtrcccccctcacctgccaatttcatccagccagggaagcagccgctctcgtccatgtgcccgacgatcatggtgggccaggacggccaggtccggatggtggtgggagctgccgggggcacgcagatcaccatggccactgcactggtatgtgtcacaccttttctccctggccrtgcccaccctgcacagccccyaagccatgctgatcacactcccatgccccaggccatcatctacaacctctggttcggctatgacgtgaagygggccgtggaggagccccggctgcacaaccagcttctgcccaacgtcacgacagtggagagaaacattgaccaggaagtgactgcagccctggagacccggcaccatcacacccagatcacgtccaccttcattgctgtggtgcaagccatcgtccgcatggctggtggctgggcagctgcctcggactccagraaaggtggggaacctgctggctactgattgctccaggcggacaaggctgacaagcaatccaggaacaaaatactcaccaggacgaggaagaggactttgggggacaggcttctcctgtgagcagcagagcagcacaataaatgaggccactgtgccaggctccaggtggcctccctggcctgtctccccactc

SEQ ID NO: 1005 - DNA, 1112 bp, Homo sapiens
agggagtcagactggtcatgcaaggtcctgggcctgcccttgggtcctggggagccacggaaggttgtgggtgccagagggttgtggtcagagccacagtcaggggccttctgagacctgtgccccctccccaccctccctccccacctccctaggccagctctggggtctcggcaggtggtccgcgacatgacctccgagttcttctctgcccagctccgggcccagatctctgacgacaccactcacccgatctcctactacaagcccgagttctacatgccggatgacgggggcactgctcacctgtctgtggtcgcagaggacggcagtgctgtgtccgccaccagcaccatcaacctctactttggctccaaggtgcgctccccagtcagcgrgatcctgctcaataatgaaatggaygacttcagctctaccagcatcaccaacgagtttggggtrcccccctcacctgccaatttcatccagccagggaagcagccgctctcgtccatgtgcccgacgatcatggtgggccaggacggccaggtccggatggtggtgggagctgccgggggcacgcagatcaccatggccactgcactggtatgtgtcacaccttttctccctggccrtgcccaccctgcacagccccyaagccatgctgatcacactcccatgccccaggccatcatctacaacctctggttcggctatgacgtgaagygggccgtggaggagccccggctgcacaaccagcttctgcccaacgtcacgacagtggagagaaacattgaccaggaagtgactgcagccctggagacccggcaccatcacacccagatcacgtccaccttcattgctgtggtgcaagccatcgtccgcatggctggtggctgggcagctgcctcggactccagraaaggtggggaacctgctggctactgattgctccaggcggacaaggctgacaagcaatccaggaacaaaatactcaccaggacgaggaagaggactttgggggacaggcttctcctgtgagcagcagagcagcacaataaatgaggccactgtgccaggctccagcagtscccccatctcagtctcccaaa

SEQ ID NO: 1006 - DNA, 1045 bp, Homo sapiens
agagctgggctctgcgtcctcgtccagccgccaactcggccaaaggcgaagccagcagtttcttctgctgccgggcaacgcgccttttaaacctgagggagtgggcgcgtgagcacttaatggcgccsgtgacagagtgagcttaacggattaataagcgcagccaggccagctctggggtctcggcaggtggtccgcgacatgacctccgagttcttctctgcccagctccgggcccagatctctgacgacaccactcacccgatctcctactacaagcccgagttctacatgccggatgacgggggcactgctcacctgtctgtggtcgcagaggacggcagtgctgtgtccgccaccagcaccatcaacctctactttggctccaaggtgcgctccccagtcagcgrgatcctgctcaataatgaaatggaygacttcagctctaccagcatcaccaacgagtttggggtrcccccctcacctgccaatttcatccagccagggaagcagccgctctcgtccatgtgcccgacgatcatggtgggccaggacggccaggtccggatggtggtgggagctgccgggggcacgcagatcaccatggccactgcactggccatcatctacaacctctggttcggctatgacgtgaagygggccgtggaggagccccggctgcacaaccagcttctgcccaacgtcacgacagtggagagaaacattgaccaggaagtgactgcagccctggagacccggcaccatcacacccagatcacgtccaccttcattgctgtggtgcaagccatcgtccgcatggctggtggctgggcagctgcctcggactccagraaaggtggggaacctgctggctactgattgctccaggcggacaaggctgacaagcaatccaggaacaaaatactcaccaggacgaggaagaggactttgggggacaggcttctcctgtgagcagcagagcagcacaataaatgaggccactgtgccaggctccaggtggcctccctggcctgtctccccactc

SEQ ID NO: 1007 - DNA, 1043 bp, Homo sapiens
agagctgggctctgcgtcctcgtccagccgccaactcggccaaaggcgaagccagcagtttcttctgctgccgggcaacgcgccttttaaacctgagggagtgggcgcgtgagcacttaatggcgccsgtgacagagtgagcttaacggattaataagcgcagccaggccagctctggggtctcggcaggtggtccgcgacatgacctccgagttcttctctgcccagctccgggcccagatctctgacgacaccactcacccgatctcctactacaagcccgagttctacatgccggatgacgggggcactgctcacctgtctgtggtcgcagaggacggcagtgctgtgtccgccaccagcaccatcaacctctactttggctccaaggtgcgctccccagtcagcgrgatcctgctcaataatgaaatggaygacttcagctctaccagcatcaccaacgagtttggggtrcccccctcacctgccaatttcatccagccagggaagcagccgctctcgtccatgtgcccgacgatcatggtgggccaggacggccaggtccggatggtggtgggagctgccgggggcacgcagatcaccatggccactgcactggccatcatctacaacctctggttcggctatgacgtgaagygggccgtggaggagccccggctgcacaaccagcttctgcccaacgtcacgacagtggagagaaacattgaccaggaagtgactgcagccctggagacccggcaccatcacacccagatcacgtccaccttcattgctgtggtgcaagccatcgtccgcatggctggtggctgggcagctgcctcggactccagraaaggtggggaacctgctggctactgattgctccaggcggacaaggctgacaagcaatccaggaacaaaatactcaccaggacgaggaagaggactttgggggacaggcttctcctgtgagcagcagagcagcacaataaatgaggccactgtgccaggctccagcagtscccccatctcagtctcccaaa

SEQ ID NO: 1008 - DNA, 883 bp, Homo sapiens
gacagggagtcagactggtcatgcaaggtggtccgcgacatgacctccgagttcttctctgcccagctccgggcccagatctctgacgacaccactcacccgatctcctactacaagcccgagttctacatgccggatgacgggggcactgctcacctgtctgtggtcgcagaggacggcagtgctgtgtccgccaccagcaccatcaacctctactttggctccaaggtgcgctccccagtcagcgrgatcctgctcaataatgaaatggaygacttcagctctaccagcatcaccaacgagtttggggtrcccccctcacctgccaatttcatccagccagggaagcagccgctctcgtccatgtgcccgacgatcatggtgggccaggacggccaggtccggatggtggtgggagctgccgggggcacgcagatcaccatggccactgcactggccatcatctacaacctctggttcggctatgacgtgaagygggccgtggaggagccccggctgcacaaccagcttctgcccaacgtcacgacagtggagagaaacattgaccaggaagtgactgcagccctggagacccggcaccatcacacccagatcacgtccaccttcattgctgtggtgcaagccatcgtccgcatggctggtggctgggcagctgcctcggactccagraaaggtggggaacctgctggctactgattgctccaggcggacaaggctgacaagcaatccaggaacaaaatactcaccaggacgaggaagaggactttgggggacaggcttctcctgtgagcagcagagcagcacaataaatgaggccactgtgccaggctccaggtggcctccctggcctgtctccccactc

SEQ ID NO: 1009 - DNA, 1124 bp, Homo sapiens
agagctgggctctgcgtcctcgtccagccgccaactcggccaaaggcgaagccagcagtttcttctgctgccgggcaacgcgccttttaaacctgagggagtgggcgcgtgagcacttaatggcgccsgtgacagagtgagcttaacggattaataagcgcagccaggccagctctggggtctcggcaggtggtccgcgacatgacctccgagttcttctctgcccagctccgggcccagatctctgacgacaccactcacccgatctcctactacaagcccgagttctacatgccggatgacgggggcactgctcacctgtctgtggtcgcagaggacggcagtgctgtgtccgccaccagcaccatcaacctctactttggctccaaggtgcgctccccagtcagcgrgatcctgctcaataatgaaatggaygacttcagctctaccagcatcaccaacgagtttggggtrcccccctcacctgccaatttcatccagccagggaagcagccgctctcgtccatgtgcccgacgatcatggtgggccaggacggccaggtccggatggtggtgggagctgccgggggcacgcagatcaccatggccactgcactggtatgtgtcacaccttttctccctggccrtgcccaccctgcacagccccyaagccatgctgatcacactcccatgccccaggccatcatctacaacctctggttcggctatgacgtgaagygggccgtggaggagccccggctgcacaaccagcttctgcccaacgtcacgacagtggagagaaacattgaccaggaagtgactgcagccctggagacccggcaccatcacacccagatcacgtccaccttcattgctgtggtgcaagccatcgtccgcatggctggtggctgggcagctgcctcggactccagraaaggtggggaacctgctggctactgattgctccaggcggacaaggctgacaagcaatccaggaacaaaatactcaccaggacgaggaagaggactttgggggacaggcttctcctgtgagcagcagagcagcacaataaatgaggccactgtgccaggctccagcagtscccccatctcagtctcccaaa

SEQ ID NO: 1010 - DNA, 1033 bp, Homo sapiens
agggagtcagactggtcatgcaaggtcctgggcctgcccttgggtcctggggagccacggaaggttgtgggtgccagagggttgtggtcagagccacagtcaggggccttctgagacctgtgccccctccccaccctccctccccacctccctaggccagctctggggtctcggcaggtggtccgcgacatgacctccgagttcttctctgcccagctccgggcccagatctctgacgacaccactcacccgatctcctactacaagcccgagttctacatgccggatgacgggggcactgctcacctgtctgtggtcgcagaggacggcagtgctgtgtccgccaccagcaccatcaacctctactttggctccaaggtgcgctccccagtcagcgrgatcctgctcaataatgaaatggaygacttcagctctaccagcatcaccaacgagtttggggtrcccccctcacctgccaatttcatccagccagggaagcagccgctctcgtccatgtgcccgacgatcatggtgggccaggacggccaggtccggatggtggtgggagctgccgggggcacgcagatcaccatggccactgcactggccatcatctacaacctctggttcggctatgacgtgaagygggccgtggaggagccccggctgcacaaccagcttctgcccaacgtcacgacagtggagagaaacattgaccaggaagtgactgcagccctggagacccggcaccatcacacccagatcacgtccaccttcattgctgtggtgcaagccatcgtccgcatggctggtggctgggcagctgcctcggactccagraaaggtggggaacctgctggctactgattgctccaggcggacaaggctgacaagcaatccaggaacaaaatactcaccaggacgaggaagaggactttgggggacaggcttctcctgtgagcagcagagcagcacaataaatgaggccactgtgccaggctccaggtggcctccctggcctgtctccccactc

SEQ ID NO: 1011 - DNA, 962 bp, Homo sapiens
ggaaaagcgaaggctggagtaaacagatttggacatattggatgcctggttaccagggctgcttttaactctagcacaatggatattgttgccatcaatgaccccttcattgacctcagctaaatggtctacatgttcgagtatgattccacccatggcaagttccacagcaccatcaggctgaaaacgcgaagcttgtcaccagtggaaatcccatcaccatcttccaggaatgagatcccaccaaaatcaaaggaggtgatgctggtgctgattatgttatagagcccaccagtgtcttcactaccatggagaaggctgggacttacttagatgggggagccaaaagagtcaccatctctgccccttctgatgcccccatgtttgtgatgggtgtgaatcatgagaagtatggaaacagcctcaagattatcagcaatgcctcctgcaccaccagttgcttaacccccctggccaaggtcatccatgacaactttggcaccatggaaggactcatgaccacagttcatgccttcagtgccacctagaagactactgatggtacctctgggaaattgtagtgtgatggctgcagggctctctagaacatcattcctgccaagcctgtgggcaaagtcatccccgagctgaatgggaagctcactggcgtggccttccaygtccccaccaccaacatgttggtcatggacctgacctgccatctggagaaacctgccaaatacagtgacatcaagaggatggtgaagcaggcattgagggagatcctcaagggcatcctgggctgtactgagcacaaggtcgtctcctctgactttgacagtgacacccattcttccatcttcaatgctggggctggcattgccctcaacaatgactttgtcaagctcatttcctggtatgacagggtggtgaacctcatggtccacatggcctccaaggag

SEQ ID NO: 1012 - DNA, 3128 bp, Homo sapiens
cagcccctggagcttctccgggcagaagaggaggtgggctggactgtcaaagaaagtggctggcttccgtgggcaatccgaggttcctagtggccctctgcagaaagctgaactcccagttcccccaggcctccgtcccgcggcggactcctaggcttcctccctccctgtcgccgccagcctctcgctctccccgtcttccgcccgcactctctgggcagggctgcggccaggacccgcccccgcgtcccgcccgaccctccgccaggggtcacttcccctgtccaggtttcagcttccacatgtgtcaagcggctggctcagcccagagtccctgtctcccgcccgccggcccgagccgccgcccctcccccgcctcccgtgcgcccgggacaatcctcgccttgtctgtggcgccggcatctggagctttctgtagcctccggatacgcctttttttcagggcgtagccccagccaagctgctccccgcggcggccgcacagcagcccgagcgccccctttccrgagctcccctccggagctgggatccaggcgcgtagcggagatcccaggatcctgggtgctgtctgggcccgctccccaccatgacctcctcggggcctggaccccggttcctgctgctgctgccgctgctgctgccccctgcggcctcagcctccgaccggccccggggccgagacccggtcaacccagagaagctgctggtgatcactgtggccacagctgaaaccgaggggtacctgcgtttcctgcgctctgcggagttcttcaactacactgtgcggaccctgggcctgggagaggagtggcgagggggtgatgtggctcgaacagttggtggaggacagaaggtccggtggttaaagaaggaaatggagaaatacgctgaccgggaggatatgatcatcatgtttgtggatagctacgacgtgattctggccggcagccccacagagctgctgaagaagttcgtccagagtggcagccgcctgctcttctctgcagagagcttctgctggcccgagtgggggctggyggagcagtaccctgaggtgggcacggggaagcgcttcctcaattctggtggattcatcggttttgccaccaccatccaccaartcgtgcgccagtggaagtacaaggatgatgacgaygaccagctgttctacacacggctctacctggacccaggactgagggagaaactcagccttaatctggatcataagtctcggatctttcagaacctcaacggggctttagatgaagtggttttaaagtttgatcggaaccgtgtgcgtatccggaacgtggcctacgacacgctccccattgtggtccatggaaacggtcccactaagctgcagctcaactacctgggaaactacgtccccaatggctggactcctgagggaggctgtggcttctgcaaccaggacyggaggacactcccgggggggcagcctcccccccgggtgtttctggccgtgtttgtggaacagcctactccgtttctgccccgyttcctgcagcggctgctactcctggactatccccccgacagggtcacccttttyctgcacaacaacgaggtcttccatgaaccccacatcgctgactcctggccgcagctccaggaccacttctcagctgtgaagctcgtggggccggaggaggctctgagcccaggcgaggccagggacatggccatggacctgtgtcggcaggaccccgagtgtgagttctacttcagcctggacgccgacgctgtcctcaccaacctgcagaccctgcgtatcctcattgaggagaacaggaaggtgatcgcccccatgctgtcccgccacggcaagctgtggtccaacttctggggcgccctgagccccgatgagtactacgcccgctccgaggactacgtggagctggtgcagcggaagcgagtgggtgtgtggaatgtaccatacatctcccaggcctatgtgatccggggtgataccctgcggatggagctgccccagagggatgtgttctcgggcagtgacacagacccggacatggccttctgtaagagctttcgagacaagggcatcttcctccatctgagcaatcagyatgaatttggccggctcctggccacttccagatacgacacggagcacctgcaccccgacctctggcagatcttcgacaaccccgtcgactggaaggagcagtacatccacgagaactacagccgggccctggaaggggaaggaatcgtggagcagccatgcccggacgtgtactggttcccactgctgtcagaacaaatgtgtgatgagctggtggcagagatggagcactacggccagtggtcaggcggccggcatgaggattcaaggctggctggaggctacgagaatgtgcccaccgtggacatccacatgaagcaggtggggtacgaggaccagtggctgcagctgctgcggacgtatgtgggccccatgaccgagagcctgtttcccggttaccacaccaaggcgcgggcggtgatgaactttgtggttcgctaccggccagacgagcagccgtctctgcggccacaccacgactcatccaccttcaccctcaacgttgccctcaaccacaagggcctggactatgagggaggtggctgccgcttcctgcgctacgactgtgtgatctcctccccgaggaagggctgggcactcctgcaccccggccgcctcacccactaccacgaggggctgccaacgacctggggcacacgctacatcatggtgtcctttgtcgacccctgacactcaaccactctgccaaacctgccctgccattgtgcctttttagggggcctggcccccgtcctgggagttgggggatgggtctctctgtctccccacttcctgagttcatgttccgcgtgcctgaactgaatatgtcaccttgctcccaagacacggccctctcaggaagctcccggagtccccgcctctctcctccgcccacaggggttcgtgggcacagggcttctggggactccccgcgtgataaattattaatgttccgcagtctcactctgaataaaggacagtttgtaagtcttga

SEQ ID NO: 1013 - DNA, 3216 bp, Homo sapiens
atgggtcattttaaagatgtggtcacggtgttcttacragaaatcttattttcctttggtccttgtgaagatgctgtgatcacaaaggcagcccctggagcttctccgggcagaagaggaggtgggctggactgtcaaagaaagtggctggcttccgtgggcaatccgaggttcctagtggccctctgcagaaagctgaactcccagttcccccaggcctccgtcccgcggcggactcctaggcttcctccctccctgtcgccgccagcctctcgctctccccgtcttccgcccgcactctctgggcagggctgcggccaggacccgcccccgcgtcccgcccgaccctccgccaggggtcacttcccctgtccaggtttcagcttccacatgtgtcaagcggctggctcagcccagagtccctgtctcccgcccgccggcccgagccgccgcccctcccccgcctcccgtgcgcccgggacaatcctcgccttgtctgtggcgccggcatctggagctttctgtagcctccggatacgcctttttttcagggcgtagccccagccaagctgctccccgcggcggccgcacagcagcccgagcgccccctttccrgagctcccctccggagctgggatccaggcgcgtagcggagatcccaggatcctgggtgctgtctgggcccgctccccaccatgacctcctcggggcctggaccccggttcctgctgctgctgccgctgctgctgccccctgcggcctcagcctccgaccggccccggggccgagacccggtcaacccagagaagctgctggtgatcactgtggccacagctgaaaccgaggggtacctgcgtttcctgcgctctgcggagttcttcaactacactgtgcggaccctgggcctgggagaggagtggcgagggggtgatgtggctcgaacagttggtggaggacagaaggtccggtggttaaagaaggaaatggagaaatacgctgaccgggaggatatgatcatcatgtttgtggatagctacgacgtgattctggccggcagccccacagagctgctgaagaagttcgtccagagtggcagccgcctgctcttctctgcagagagcttctgctggcccgagtgggggctggyggagcagtaccctgaggtgggcacggggaagcgcttcctcaattctggtggattcatcggttttgccaccaccatccaccaartcgtgcgccagtggaagtacaaggatgatgacgaygaccagctgttctacacacggctctacctggacccaggactgagggagaaactcagccttaatctggatcataagtctcggatctttcagaacctcaacggggctttagatgaagtggttttaaagtttgatcggaaccgtgtgcgtatccggaacgtggcctacgacacgctccccattgtggtccatggaaacggtcccactaagctgcagctcaactacctgggaaactacgtccccaatggctggactcctgagggaggctgtggcttctgcaaccaggacyggaggacactcccgggggggcagcctcccccccgggtgtttctggccgtgtttgtggaacagcctactccgtttctgccccgyttcctgcagcggctgctactcctggactatccccccgacagggtcacccttttyctgcacaacaacgaggtcttccatgaaccccacatcgctgactcctggccgcagctccaggaccacttctcagctgtgaagctcgtggggccggaggaggctctgagcccaggcgaggccagggacatggccatggacctgtgtcggcaggaccccgagtgtgagttctacttcagcctggacgccgacgctgtcctcaccaacctgcagaccctgcgtatcctcattgaggagaacaggaaggtgatcgcccccatgctgtcccgccacggcaagctgtggtccaacttctggggcgccctgagccccgatgagtactacgcccgctccgaggactacgtggagctggtgcagcggaagcgagtgggtgtgtggaatgtaccatacatctcccaggcctatgtgatccggggtgataccctgcggatggagctgccccagagggatgtgttctcgggcagtgacacagacccggacatggccttctgtaagagctttcgagacaagggcatcttcctccatctgagcaatcagyatgaatttggccggctcctggccacttccagatacgacacggagcacctgcaccccgacctctggcagatcttcgacaaccccgtcgactggaaggagcagtacatccacgagaactacagccgggccctggaaggggaaggaatcgtggagcagccatgcccggacgtgtactggttcccactgctgtcagaacaaatgtgtgatgagctggtggcagagatggagcactacggccagtggtcaggcggccggcatgaggattcaaggctggctggaggctacgagaatgtgcccaccgtggacatccacatgaagcaggtggggtacgaggaccagtggctgcagctgctgcggacgtatgtgggccccatgaccgagagcctgtttcccggttaccacaccaaggcgcgggcggtgatgaactttgtggttcgctaccggccagacgagcagccgtctctgcggccacaccacgactcatccaccttcaccctcaacgttgccctcaaccacaagggcctggactatgagggaggtggctgccgcttcctgcgctacgactgtgtgatctcctccccgaggaagggctgggcactcctgcaccccggccgcctcacccactaccacgaggggctgccaacgacctggggcacacgctacatcatggtgtcctttgtcgacccctgacactcaaccactctgccaaacctgccctgccattgtgcctttttagggggcctggcccccgtcctgggagttgggggatgggtctctctgtctccccacttcctgagttcatgttccgcgtgcctgaactgaatatgtcaccttgctcccaagacacggccctctcaggaagctcccggagtccccgcctctctcctccgcccacaggggttcgtgggcacagggcttctggggactccccgcgtgataaattattaatgttccgcagtctcactctgaataaaggacagtttgtaagtcttga

SEQ ID NO: 1014 - DNA, 1445 bp, Homo sapiens
gcggccgccgcggggagcagcttggctggggctacgccctgaaaaaaaggcgtatccggaggctacagaaagctccagatgccggcgccacagacaaggcgaggattgtcccgggcgcacgggaggcgggggaggggcggcggctcgggccggcgggcgggagacagggactctgggctgagccagccgcttgacacatgtggaagctgaaacctggacaggggaagtgacccctggcggagggtcgggcgggacgcgggggcgggtcctggccgcagccctgcccagagagtgcgggcggaagacggggagagcgagaggctggcggcgacagggagggaggaagcctaggagtccgccgcgggacggaggcctgggggaactgggagttcagctttctgcagagggccactaggaacctcggattgcccacggaagccagccactttctttgacagtccagcccacctcctcttctgcccggagaagctccaggggctgcctttgtgatcacagcatcttcacaaggaccaaaggaaaataagatttctygtaagaacaccgtgaccacatctttaaaatgacccatttcgtggctcccacaagatttacacctccacactgaggccggaagtggttttgcccctataaaacatggcgaaaagctttcttgtctccaaggaaacgccacgtaatgagtcaaagctgtggcgcacgcgcagaagtacaagctaccggaagtgatggcgcccctactaaagccttgggttcgctcccaggaccccgggcagcggcgggtgctggaccgggctgcccggcagcgtcgcatcaaccggcagctggaggccctggagaatgacaacttccaggatgacccccacgcgggactccctcagctcggcaagagactgcctcagtttgatgaygatgcggacactggaaagaaaaagaagaaaacccgaggtgatcattttaaacttcgcttccgaaaaaactttcaggccctgttggaggagcagaacttgagtgtggccgagggccctaactacctgacggcctgtgcgggacccccatcgcggccccagcgccccttytgtgctgtctgtggcttcccatccccctacacctgtgtcagctgcggtgcccggtactgcactgtgcgctgtctggggacccaccaggagaccaggtgtctgaagtggactgtgtgagcctgggcattcccagagaggaagggccgctgtgcactgcccggccttcagaaagrcagaatttcatcacccaatgcagggggagctcttcctggaccaagggaggagccgctcattcacccaacaaaactgtgtyttatytgccaggaaagaccagcctcactcctgggaactgtytggcaggtaggctgggccccccagtgctgttagaataaaaagcctcgtgccggaagc

SEQ ID NO: 1015 - DNA, 1514 bp, Homo sapiens
gcggccgccgcggggagcagcttggctggggctacgccctgaaaaaaaggcgtatccggaggctacagaaagctccagatgccggcgccacagacaaggcgaggattgtcccgggcgcacgggaggcgggggaggggcggcggctcgggccggcgggcgggagacagggactctgggctgagccagccgcttgacacatgtggaagctgaaacctggacaggggaagtgacccctggcggagggtcgggcgggacgcgggggcgggtcctggccgcagccctgcccagagagtgcgggcggaagacggggagagcgagaggctggcggcgacagggagggaggaagcctaggagtccgccgcgggacggaggcctgggggaactgggagttcagctttctgcagagggccactaggaacctcggattgcccacggaagccagccactttctttgacagtccagcccacctcctcttctgcccggagaagctccaggggctgcctttgtgatcacagcatcttcacaaggaccaaaggaaaataagatttctygtaagaacaccgtgaccacatctttaaaatgacccatttcgtggctcccacaagatttacacctccacactgaggccggaagtggttttgcccctataaaacatggcgaaaagctttcttgtctccaaggaaacgccacgtaatgagtcaaagctgtggcgcacgcgcagaagtacaagctaccggaagtgatggcgcccctactaaagccttggggttagtacgcgtgcgcagcagtytcttccgacagttgtgttgtgcyratggtggagaagaaaacttcggttcgctcccaggaccccgggcagcggcgggtgctggaccgggctgcccggcagcgtcgcatcaaccggcagctggaggccctggagaatgacaacttccaggatgacccccacgcgggactccctcagctcggcaagagactgcctcagtttgatgaygatgcggacactggaaagaaaaagaagaaaacccgaggtgatcattttaaacttcgcttccgaaaaaactttcaggccctgttggaggagcagaacttgagtgtggccgagggccctaactacctgacggcctgtgcgggacccccatcgcggccccagcgccccttytgtgctgtctgtggcttcccatccccctacacctgtgtcagctgcggtgcccggtactgcactgtgcgctgtctggggacccaccaggagaccaggtgtctgaagtggactgtgtgagcctgggcattcccagagaggaagggccgctgtgcactgcccggccttcagaaagrcagaatttcatcacccaatgcagggggagctcttcctggaccaagggaggagccgctcattcacccaacaaaactgtgtyttatytgccaggaaagaccagcctcactcctgggaactgtytggcaggtaggctgggccccccagtgctgttagaataaaaagcctcgtgccggaagc

SEQ ID NO: 1016 - DNA, 967 bp, Homo sapiens
tttagtggtgttgatgtccggtcaccagggttgcttttaactccagtaamgtggatattgtcaccattaatgacactttcattgacctcagttacatgatttccacgttcctgtgtgatttcacccacggcaagtttcagggcattgtcaaggctgagaacaggaagttggtcatcaacaagaatcccacctccatcttccaggagtgagattccaccaaaatcaaatggataatgctggtgctgactatgttgttgaatacactggtgtctttactatcttggagaaggcttgggctcacttagaaggtagaactaaaagggtcattatctctgaccctttcrccaattctcctacgtttgtgatgtgtgaaccataattggtatgaaaacaaccatatgattttcagctgtgcctctggcatcaccaactgcttagtccccttgccaaggtcatctatgacaactctggcctcatggagagactcataaccacattccatgccatcactgttacccagaaaatgctggatggcccctctgggagacaggggtgatgaccgtggggctctccagaacattatccctgcacctactggcactgccaaggctatggacaaggtcatctctgtgttgaatgagaagctcattaacatggccttttgtatccactgccagtgtgtcagttgtggaactggcatgctatctgaagagagttgccaaatatgataacatcaaaaagttggtgaagcaggcattggggcacttcctcaggtgcatcctggcctacactgaacaccaggttttcccctccgattttaacagtgacacccacccttcyrgctttgatgttagagctggcattgctctcaaagaccactttgtcaagctcattacctggtaatggcaatgaagttkgttgtagcaacagggtattggacctgacgggccacatggccaccaaggaa

SEQ ID NO: 1017 - DNA, 1806 bp, Homo sapiens
cccacctcscgggcgctggctgcaatgactttctctttccctttgcaattgccttgggtcctgccgcacagagcggcctgtctttatcagaggtccctctgccagggggagggccccagagaaaaccagaaagagggtgagagactgaggaagataaagcgtcccagggcctcctacaccagcgcctgagcaggaagcgggaggggccatgactacgaggccctgggaggtcactttagggagggctgtcctaaaaccagaagcttggagcagaaagtgaaaccctggtgctccagacaaagatcttagtcgggactagccggccaaggatgaagcctcacttcagaaacacagtggagcgaatgtatcgagacacattctcctacaacttttataatagacccatcctttctcgtcggaataccgtctggctgtgctacgaagtgaaaacaaagggtccctcaaggccccctttggacgcaaagatctttcgaggccaggtgtattccgaacttaagtaccacccagagatgagattcttccactggttcagcaagtggaggaagctgcatcgtgaccaggagtatgaggtcacctggtacatatcctggagcccctgcacaaagtgtacaagggatatggccacgttcctggccgaggacccgaaggttaccctgaccatctttgttgcccgcctctactacttctgggacccagattaccaggaggcgcttcgcagcctgtgtcagaaaagagacggtccgcgtgccaccatgaagatcatgaattatgacgaatttcagcactgttggagcaagttcgtgtacagccaaagagagctatttgagccttggaataatctgcctaaatattatatattactgcrcatcatgctgggggagattctcagacactcgatggatccacccacattcactttcaactttaacaatgaaccttgggtcagaggacggcatgagacttacctgtgttatgaggtggagcgcatgcacaatgacacctgggtcctgctgaaccagcgcaggggctttctatgcaaccaggctccacataaacacggtttccttgaaggccgccatgcagagctgtgcttcctggacgtgattcccttttggaagctggacctggacsaggactacagggttacctgcttcacctcctggagcccctgcttcagctgtgcccaggaaatggctaaattcatttcaaaaaacaaacacgtgagcctgtgcatcttcactgcccgcatctatgatgatcaaggaagatgtcaggaggggctgcgcaccctggccgaggctggggccaaaatttcaataatgacatacagtgaatttaagcactgctgggacacctttgtggaccaccagggatgtcccttccagccctgggatggactagatgagcacagccaagacytgagtgggaggctgcgggccattctccagaatcaggaaaactgaaggatgggcctcagtctctaaggaaggcagagacctgggttgagcctcagaataaaagatcttcttccaagaaatgcaaacaggctgttcaccaccatctccagctgatcacagacaccagcaaagcaatgcactcctgaccaagtagattcttttaaaaattagagtgcattactttgaatcaaaaatttatttatatttcaagaataaagtactaagattgtrctcaatacacagaaaagtttcaaacctactaatccagcgacaatttgaatcggttttgtaggtagaggaataaaatgaaatactaaatctttctgta

SEQ ID NO: 1018 - DNA, 1611 bp, Homo sapiens
aggccctgggaggtcactttaaggagggctgtccaactgcaaggacgctgtaagcaggaagtgaaaccacagagcttcaaaaaaagagcgggacagggacaagcgtatctaagaggctgaacatgaatccacagatcagaaatccgatggagcggatgtatcgagacacattctacgacaactttgaaaaygaacccatcctctatggtcggagctacacttggctgtgctatgaagtgaaaataaagaggggccgctcaaatctcctttgggacacaggggtctttcgaggccaggtgtatttcragcctcagtaccacgcagaaatgtgcttcctctcttggttctgtggcaaccagctgcctgcttacaagtgtttccagatcacctggtttgtatcctggaccccctgcccggactgtgtggcgaagctggccgaattcctgtctgagcaccccaatgtcaccctgaccatctcygccgcccgcctctactactactgggaaagagattaccgaagggcgctctgcaggctgagtcaggcaggagcccgcgtgamgatcatggactatgaagaatttgcatactgctgggaaaactttgtgtacaatgaaggtcagcaattcatgccttggtacaaattcgatgaaaattatgcattcctgcaccgcacgctaaaggagattctcagayacctgatggatccagacacattcactttcaactttaataatgacccyttggtccttcgacggcgccagacctacttgtgctatgaggtggagcgcctggacaatggcacctgggtcctgatggaccagcacatgggctttctatgcaacgaggctaagaatcttctctgtggcttttacggccgccatgcggagctgcgcttcttggacctggttccttctttgcagttggacccggcccagatctacagggtcacttggttcatctcctggagcccctgcttctcctggggctgtgccggggaagtgcgtgcgttccttcaggagaacacacacgtgagactgcgcatcttcgctgcccgcatctatgattacgaccccctatataaggaggcgctgcaaatgctgcgggatgctggggcccaagtctccatcatgacctacgatgagtttgagtactgctgggacacctttgtgtaccgccagggatgtcccttccagccctgggatggactagaggagcacagccaagccctgagtgggaggctgcgggccattctccagaatcagggaaactgaaggatgggcctcagtctctaaggaaggcagagacctgggttgagcagcagaataaaagatcttcttccaagaaatgcaaacagaccgttcaccaccatctccagctgctcacagacaccagcaaagcaatgtgctcctgatcaagtagattttttaaaaatcagagtcaattaattttaattgaaaatttctcttatgttccaagtgtacaagagtaagattatgctcaatattcccagaatagttttcaatgtaytaatgaagtgattaattggctccatatttagactaataaaacattaagaatcttccataattgtttccacaaacactagcaaat

SEQ ID NO: 1019 - DNA, 1876 bp, Homo sapiens
aggccctgggaggtcactttaaggagggctgtccaactgcaaggacgctgtaagcaggaagtgaaaccacagagcttcaaaaaaagagcgggacagggacaagcgtatctaagaggctgaacatgaatccacagatcagaaatccgatggagcggatgtatcgagacacattctacgacaactttgaaaaygaacccatcctctatggtcggagctacacttggctgtgctatgaagtgaaaataaagaggggccgctcaaatctcctttgggacacaggggtctttcgaggccaggtgtatttcragcctcagtaccacgcagaaatgtgcttcctctcttggttctgtggcaaccagctgcctgcttacaagtgtttccagatcacctggtttgtatcctggaccccctgcccggactgtgtggcgaagctggccgaattcctgtctgagcaccccaatgtcaccctgaccatctcygccgcccgcctctactactactgggaaagagattaccgaagggcgctctgcaggctgagtcaggcaggagcccgcgtgamgatcatggactatgaagaatttgcatactgctgggaaaactttgtgtacaatgaaggtcagcaattcatgccttggtacaaattcgatgaaaattatgcattcctgcaccgcacgctaaaggagattctcagayacctgatggatccagacacattcactttcaactttaataatgacccyttggtccttcgacggcgccagacctacttgtgctatgaggtggagcgcctggacaatggcacctgggtcctgatggaccagcacatgggctttctatgcaacgaggctaagaatcttctctgtggcttttacggccgccatgcggagctgcgcttcttggacctggttccttctttgcagttggacccggcccagatctacagggtcacttggttcatctcctggagcccctgcttctcctggggctgtgccggggaagtgcgtgcgttccttcaggagaacacacacgtgagactgcgcatcttcgctgcccgcatctatgattacgaccccctatataaggaggcgctgcaaatgctgcgggatgctggggcccaagtctccatcatgacctacgatgagtttgagtactgctgggacacctttgtgtaccgccagggatgtcccttccagccctgggatggactagaggagcacagccaagccctgagtgggaggctgcgggccattctccaggtgagggcttcctccctctgcctggtgccccatcggcctccccctcctccccrctcccctgkgccttgccttcccctctgctcagagcctcctctgggttccctgctccccacagggcgcccagctccgtccctccctttccttctcacagcctccttctctttcccacctcccgcatccctccctcctctcccgtcattgtcactgtccccaggccacctccctgtgccctctttccactctctcacctcctgctccattcaacccccctgctcttccagaatcagggaaactgaaggatgggcctcagtctctaaggaaggcagagacctgggttgagcagcagaataaaagatcttcttccaagaaatgcaaacagaccgttcaccaccatctccagctgctcacagacaccagcaaagcaatgtgctcctgatcaagtagattttttaaaaatcagagtcaattaattttaattgaaaatttctcttatgttccaagtgtacaagagtaagattatgctcaatattcccagaatagttttcaatgtaytaatgaagtgattaattggctccatatttagactaataaaacattaagaatcttccataattgtttcc

SEQ ID NO: 1020 - DNA, 1623 bp, Homo sapiens
aggccctgggaggtcactttaaggagggctgtccaactgcaaggacgctgtaagcaggaagtgaaaccacagagcttcaaaaaaagagcgggacagggacaagcgtatctaagaggctgaacatgaatccacagatcagaaatccgatggagcggatgtatcgagacacattctacgacaactttgaaaaygaacccatcctctatggtcggagctacacttggctgtgctatgaagtgaaaataaagaggggccgctcaaatctcctttgggacacaggggtctttcgaggccagctcctctcccaggtgtatttcragcctcagtaccacgcagaaatgtgcttcctctcttggttctgtggcaaccagctgcctgcttacaagtgtttccagatcacctggtttgtatcctggaccccctgcccggactgtgtggcgaagctggccgaattcctgtctgagcaccccaatgtcaccctgaccatctcygccgcccgcctctactactactgggaaagagattaccgaagggcgctctgcaggctgagtcaggcaggagcccgcgtgamgatcatggactatgaagaatttgcatactgctgggaaaactttgtgtacaatgaaggtcagcaattcatgccttggtacaaattcgatgaaaattatgcattcctgcaccgcacgctaaaggagattctcagayacctgatggatccagacacattcactttcaactttaataatgacccyttggtccttcgacggcgccagacctacttgtgctatgaggtggagcgcctggacaatggcacctgggtcctgatggaccagcacatgggctttctatgcaacgaggctaagaatcttctctgtggcttttacggccgccatgcggagctgcgcttcttggacctggttccttctttgcagttggacccggcccagatctacagggtcacttggttcatctcctggagcccctgcttctcctggggctgtgccggggaagtgcgtgcgttccttcaggagaacacacacgtgagactgcgcatcttcgctgcccgcatctatgattacgaccccctatataaggaggcgctgcaaatgctgcgggatgctggggcccaagtctccatcatgacctacgatgagtttgagtactgctgggacacctttgtgtaccgccagggatgtcccttccagccctgggatggactagaggagcacagccaagccctgagtgggaggctgcgggccattctccagaatcagggaaactgaaggatgggcctcagtctctaaggaaggcagagacctgggttgagcagcagaataaaagatcttcttccaagaaatgcaaacagaccgttcaccaccatctccagctgctcacagacaccagcaaagcaatgtgctcctgatcaagtagattttttaaaaatcagagtcaattaattttaattgaaaatttctcttatgttccaagtgtacaagagtaagattatgctcaatattcccagaatagttttcaatgtaytaatgaagtgattaattggctccatatttagactaataaaacattaagaatcttccataattgtttccacaaacactagcaaat

SEQ ID NO: 1021 - DNA, 667 bp, Homo sapiens
gtggcttccaaactcctgcgcgcggtcatcctcagacccccctgctcgggcaagggcaccgagtgccagagcatcgcccagaactttggcttccaggatttctccagtgggcacttcttgtgggagaacatcaaggccaaaaccgaagttggtgagatggcaaaacagtatataragaaaagtcttttgcttccagaccatgtgatcacacgcctaatgatgtctgagttggagaatagccgtggccagcactggctcctcgatggttttcctaggacattacgacaagccgaagccctggacaaaaatctgtgaactggatttagtaattagtttgaagattccatttgaaacacttaaagatcgtctcggctgctgttggattcaccctcctagcggaagggtatataacatggacttcaatccacctcatgtacatgggattgatgacgtcactggtgaaccattagtccagcaggaggatgataaacctgaagcagttgctgccaggctgagacagtacaaggatatggcaaagccagtcaytgaattatactagagccgaggagttctccaattttctgggacagagacgaacaaaatctggccctatgtttacacacttttctcgaacatgatcacatctattcagtccaaagaagcatat

SEQ ID NO: 1022 - DNA, 864 bp, Homo sapiens
  misc_feature (1)...(864): n = A,T,C or G
natgctgtgtgttttgatgttgacagcacggtcatcagtgaagaaggaatcggtgagctagccaaaatctgtggtgtagaggatgcggtgtcagaaatggagctggtaagtcgcctacaggagcgaaatgttcaggttttcctaatatctggtggctttaggagtattatagagcatgttgcttcaaagctcaatatcccagcaaccaatgtatttgccagtaggctgaaattctaccttaatggtaagatgttaacggtaacatagatcacaccactgcgctccagcctgggcaacagagcctccaaaaaaataaataaaaataaaaatcatttatctctcttttcttacttcttaggatgctttcattggmtttggaggaaatgtgatcaggcaacaagtcaaggataacgccaaatggtatatcactgattttgtagagctgctgggagaaccggaagaataacatccattgtcatacagctccaaacaacttcagatgaatttttacaagttacacagattgatactgtttgcttacaattgcctattacaacttgctatagaaagttggtacagatgatctgcactgtcaagtaaactacagttaggaatcctcaaagattggtttgtttgtttttaactgtagttccagtattatatgatcactatygatttcctggagagttttgtaatctgaattctttatgtatattcctagctatatttcatacaaagtgttttaagagtggagagtcaattaaacacctttactcttaggaatatagattcggcagccttcagtgaatattggtttttttccctttggtakgtcaataaaagtttatccatgtgtcagaacag

SEQ ID NO: 1023 - DNA, 558 bp, Homo sapiens
atgctgtgtgttttgatgttgacagcacggtcatcagtgaagaaggaatcggatgctttcattggmtttggaggaaatgtgatcaggcaacaagtcaaggataacgccaaatggtatatcactgattttgtagagctgctgggagaaccggaagaataacatccattgtcatacagctccaaacaacttcagatgaatttttacaagttacacagattgatactgtttgcttacaattgcctattacaacttgctatagaaagttggtacagatgatctgcactgtcaagtaaactacagttaggaatcctcaaagattggtttgtttgtttttaactgtagttccagtattatatgatcactatygatttcctggagagttttgtaatctgaattctttatgtatattcctagctatatttcatacaaagtgttttaagagtggagagtcaattaaacacctttactcttaggaatatagattcggcagccttcagtgaatattggtttttttccctttggtakgtcaataaaagtttatccatgtgtcagaacaga

SEQ ID NO: 1024 - DNA, 3376 bp, Homo sapiens
ggcggccggggagacggggtggcggctgcagcccgggtagggccaggagacccggtccacgtttgcaaacgcagccgaacgcccaggccgacccgtgccgcccgagcgccgcgctgcgtccgcgccactcttctcgccgccccgatggcgttccggggctggaggcccccgccgccaccgctgctcctgctgctgctctgggtgaccgggcaggcagcgcccgtggcgggcctgggctccgacgcggagctgcagatcgagcggcgcttcgtgcccgacgagtgcccgcgcaccgtgcgcagcggcgacttcgtgcgctaccactacgtggggacgttccccgacggccagaagttcgactccagctatgacagagactccactttcaaygtgtttgtgggaaaaggacagctgatcacagggatggaccaggctcttgttgggatgtgcgtaaacgagagacrtttcgtgaagattcccccaaagcttgcctacggaartgaaggagtttctggtgtgatcccccccaattcagtgcttcattttgatgtacttctgatggatatttggaattctgaagaccgggttcagattcacacctatttcaagccsctgagttgccctcagaccatccaggtgtctgattttgtgaggtaccactacaacgggacgttcctggacggaactctgtttgattcgagtcacaatcgcatgaaaacatatgacacgtatgtgggaattggctggctgattcctggaatggataaagggctgctggggatgtgtgtgggtgagaagcgcatcatcaccattcctccttttctggcctatggagaggatggagatgggaaagacattcccggtcaggcatctctggtgtttgatgttgcattattggacctccataaccccaaggacagcatttccattgagaacaaggyagtacctgaaaactgtgagcggwtaagtcaaagtggggactttctcaggtatcattacaatggcacrcttctggatggcaccctctttgattccagctactctcggaaccgcacgtttgacacgtacattgggcagggctacgtgattcctgggatggatraaggtctacttggtgtttgcattggagaaaagcgaaggattgtggtcccgcctcacctggggtatggagaggaaggaagagggaatatccccggctcggctgtgctggtgtttgacatccatgtgatcgacttccacaacccttcggactccatcagcatcacctcccactacaaaccccctgactgctcagtgctgagtaagaagggagattacctcaaatatcactacaatgcctcacttctggatgggaccctgctggactccacgtggaatttaggcaaaacttacartattgttctgggatctgggcaagttgtgttggggatggacatgggtctcagagagatgtgcgttggcgagaaacggacagtgatcattccgcctcacctgggctatggggaagctggcgtggatggagaagtgcccggcagtgccgtattagtgtttgacattgagctgctggagctggtggctggccttccygaggggtacatgttcatatggaatggtgaggtgtcacccaacctytttgaagaaattgacaaggatggcaacggagaagtcctcctggaagagttctcagagtacattcacgcccaggtggcatctggcaaagggaaactcgctcctggctttgatgctgagctgattgtgaagaatatgttcaccaaccaggaccggaatggagatgggaaggtcacagccgaggaatttaaactcaaagaccaggaagccaaacaggatgaactctaaacctggcacgaaccagatggtgccagggagtacgtgacaccaagccamctgtgtggcaagacgtgcagtgagggtgcaagggtctytcagaagttgcatcattagccagtagtaggtgggtcacatagtacctggtgtacacatcggggtgggttgatatatggggtgagaagtttrggctgatcgccagtgatagtaaacaaaatctgtgcagagggccttagcatgggatgtgtccagtattgaaaaggctgcactgccaaccatgatttgtgarccttctgggaaattttgttattaaargaatatatagtgtcagacrgaagttataatcatcttggaggaaccataagaaaargtgtccagggtatctatataaagagggttaaatttttttttaacttgctggttaaaacattttagaaatattctwgagatgggcaggagagtcaaagggcttgcttgccccagcagagttcccagcagacagccatggctcttcccagcagcctgtgcaaattctgatgatggccccacccccgcacacgcacacgcacatcatgcttttccagctcatcacaccccgccccactatgggcctaccattaatagtgtataacttggaggttaaaagagccttttggacagaaaactgggccaggaaaaggcatctcagaccacaaatagagaatttgattcctcatttgccacataagtcatctgcttagcttttcctttcctttttttttttttttttttttctggaggcagagtctccctttgtcgccaggctggagtgtattcaagcgattctcctgtctcagcctcctgagtagctgggactacaggtgtgcaccaccacgcccggctaatttttgtatttttggtagagacggggtttcactgtgttggccaggatggtctcaatctcgacctcgtgatccgcccacctcggcctcccaaagtgttgggattacaggcatgaatcaccatgscyagccacttagttttttgtcattyccacctttctatcccatagaacactcttttttatcttccctgaaycatattgatgagataaatagggctgggggctgggccccgctggtcactcaacagagtatttcccttggccgagatggaagttttgtcccaatagatgagctgctgagyatcaacaaggtgacatttttctgctgcccatttgtgtcctggagacggtggtaccctgaaggcagaggccagctgcygcaagacagcaatgacagtccacctgccgrcctgattcctgcatcatggaataaccacatggctaccttctatcctctgttcccaaatggtggtggcacttatcctgaagtcrtcaatgatttccctttgaaactactttattttactaatttaaactattttgtactgatgtagccctgaggtagttcatgaaaatgctgtgcactcattccatggaataaatgttggaaagctgatcttttctgatataaaatgttgaatkatatta

SEQ ID NO: 1025 - DNA, 2598 bp, Homo sapiens
ccttccggtcgttaacgcccacgggctcgcgcggcgccgcctcctgggctcagttaccgcggacgccagtgccgggctccaggagacgcagggcgacgccacacgccggggtggccgactgggtcagcgcgggctgcgcctcctcgccatgggccccctctcggcgcggctgctaatgcagcgcgggcgccccaagagcgaccggctggggaagatccggagtctggacctgtcaggattggagctgctttccgagcacctggaccccaarctcctgtgccgcctgacgcagctgcaggagcttgacctgtctaacaaccacctggagacgctgccggacaacctgggcctgtcccacctgcgtgtcctccgctgcgccaacaaccagctgggggatgttactgccttgtgccagttccccaagctcgaggaactcagcctggagggcaaccccttcctgacggtcaatgacaacctgaaagtctcctttctcctgcccacgctccgtaaggtcaatggcaaggatgcgtcctcaacttactctcaggtggagaacctgaatcgggagctgaccagcagggtcacagctcactgggagaagttcatggccacactgggtcctgaagaggaggctgagaaggcccaggcggactttgtgaagtcggctgtcagggatgtccgctacgggcccgagtccctcagcgagttcacccagtggcgggtgcggatgatctctgaggagctggtggcsgccagtaggacccaggtgcaaaaggctaacagcccagagaagcccccagaagctggagctgcccacargcccagggccagactggcggccttgaaacggccagacgacgtcccactcagcctctctcccagcaagcgggcgtgtgcctccccgtcggcccaggtggagggcagccctgtggcaggctccgatggcagccagcctgctgtgaagctggagcccctgcacttcctgcagtgccacagcaagaacaacagcccccaggacctcgagacccagctgtgggcctgtgccttcgagccggcctgggaggagggggccacatcccagaccgtggccacgtgcggcggggaggctgtgtgcgtaattgattgccagacgggcatcgtgctccacaagtacaaggcacccggcgaggagttcttttctgtggcctggaccgctctgatggtggtcacacaggctggccacaagaagcgctggagtgtgctggcggctgcaggcctacggggcctggtccggctgctgcacgtgcgtgccggcttctgctgcggggtcatccgagcccacaagaaggccatcgccaccctgtgcttcagccccgcccacgagacccatctcttcacggcctcctatgacaagcggatcatcctctgggacatcggggtgcccaaccaggactacgaattccaggccagccagctgctcacactggacaccacctctatccccctgcgcctctgccctgtcgcctcctgcccggacgcccgcctgctggccggctgcgagggcggctgctgctgctgggacgtgcggctggaccagccccaaaagaggagggtgtgtgaagtggaattcgtcttctctgagggctccgaggcatctggacggagagtggatgggctggcatttgtgaatgaggacatcgtggcctccaaggggagcggcctgggcaccatctgcctgtggagctggaggcagacgtgggggggccggggcagccagtccacrgtggcagtggtggtcctggcgcggctgcaatggtcgtccaccgagttggcctacttctcgctcagcgcctgccctgataaggggattgtgctctgtggggatgaggagggcaacgtgtggctctacgacgtcagcaacatcctgaagcagccacccctgctgccggcagccctgcaggcccccacacagatcctgaagtggccccagccctgggcccttggccaggtggtgaccaagaccatggtgaacacagtggtggccaatgcctccttcacctacctcaccgccctgacggactccaacatcgtagccatctgggggaggatgtagcctcacaccatcgcaaaggaccagggacacagctaactaacttattcagctttgggccgatgggggtggggggggtctttcagtgaatatttttattaaactctactgtggacaagaagcctgtggaaaggtgtttcgagttatgcaggaagaagtgttcctgctttgactgacaggcaggcccaggagttgaggcttctagagcagagactcttgggagctcatgggtttgcacacttctctccggctsagcacagcccccgcagcagcccctggaccccggatctttggtccagaatgaattcatccctgccagccggacgcccctgaaacaggtcatctgyctgcatcaagcctgacaatccatttgcttgcgaagtcaccgctgctcaagtccacatmcaggtctctyccgctatactttattaggaatataaaacctaatctatgtacaggacacgtcggtgtcagggtgaggggtggccacaaggcgggccatggctggg

SEQ ID NO: 1026 - DNA, 3647 bp, Homo sapiens
tgccccctcctaccgccccctgccctgccctgccctcccctcgcccggcgcggtcccgtccgcctctcgctcgcctcccgcctcccctcggtcttccgaggcgcccgggctcccggcgcggcggcggagggggcgggcaggccggcgggcggtgatgtggcrggactctttatgcgctgcggcaggatacgcgctcggcgctgggacgcgactgcgctcagttctctcctctcggaagctgcagccatgatggaagtttgagagttgagccgctgtgaggcgaggccgggctcaggcgagggagatgagagacggcggcggccgcggcccggagcccctctcagcgcctgtgagcagccgcgggggcagcgccctcggggagccggccggcctgcggcggcggcagcggcggcgtttctcgcctcctcttcgtcttttctaaccgtgcagcctcttcctcggcttctcctgaaagggaaggtggaagccgtgggctcgggcgggagccggctgaggcgcggcggcggcggcggcacctcccgctcctggagcgggggggagaagcggcggcggcggcggccgcggcggctgcagctccagggagggggtctgagtcgcctgtcaccatttccagggctgggaacgccggagagttggtctctccccttctactgcctccaacacggcggcggcggcggcggcacatccagggacccgggccggttttaaacctcccgtscgccgccgccgcaccccccgtggcccgggctccggaggccgccggcggaggcagccgttcggaggattattcgtcttctccccattccgctgccgccgctgccaggcctctggctgctgaggagaagcaggcccagtcgctgcaaccatccagcagccgccgcagcagccattacccggctgcggtccagagccaagcggcggcagagcgaggggcatcagctaccgccaagtccagagccatttccatcctgcagaagaagccccgccaccagcagcttctgccatctctctcctcctttttcttcagccacaggctcccagacatgacagccatcatcaaagagatcgttagcagaaacaaaaggagatatcaagaggatggattcgacttagacttgacctatatttatccaaacattattgctatgggatttcctgcagaaagacttgaaggcgtatacaggaacaatattgatgatgtagtaaggtttttggattcaaagcataaaaaccattacaagatatacaatctttgtgctgaaagacattatgacaccgccaaatttaattgcagagttgcacaatatccttttgaagaccataacccaccacagctagaacttatcaaacccttttrtgaagatcttgaccaatggctaagtgaagatgacaatcatrttgcagcaattsrcygtaaagctggaaaggraydaactggtgtaatgrtayrtgcatattkattacatcggggcaaatttttaaaggcacaagaggccctagatttctatggggaagtaaggaccagagacaaaaagggagtaactattcccagtcagaggcgctatgtgtattattatagctacctgttaaagaatcatctggattatwgaccagtggcactgttgtttcacaagatgatgtttgaaactattccaatgttcagtggcggaacttgcaatcctcagtttgtggtctgccagctaaaggtgaagatatattcctccaattcaggacccacaygacgggaagacaagttcatgtactttgagttccctyagcygttacctgtgtgtggtgatatcaaagtagagttcttccacaaacagaacaagatgctaaaaaaggacaaaatgtttcacttttgggtaaatacattcttcataccaggaccagaggaaacctcagaaaaagtagaaaatggaagtctatgtgatcaagaaatcgatagcatttgcagtatagagcgtgcagataatgacaaggaatakctagtacttacttwaacaaaaaatgatcttgacaaagcaaataaagacaaagccaaccgatacttttctccaaattttaaggtgaagctgtacttcacaaaaacagtagaggagccgtcaaatccagaggctagcagttcaacttctgtaacaccagatgttagtgacaatgaacctgatcattatagatattctgacaccactgactctgatccagagaatgaaccttttgatgaagatcagcatacacaaattacaaaagtctgaatttttttttatcaagagggataaaacaccatgaaaataaacttgaataaactgaaaatggaccyttttttttttaatggcaataggacattgtgtcagattaccagttataggaacaattctcttttcctgaccaatcttgttttaccctatacatccacagggttttgacacttgttgtccagttgaaaaaaggttgtgtagctgtgtcatgtatataccttkttgtgtcaaaaggacatttaaaattcaattaggattaataaagatggcactttcccgttttattccagttttataaaaagtggagacagactgakgtgtatacgtaggaattttttccttttgtgttctrtcaccaactgaagtggctaaagagctttgtgatatactggttcacatcctacccctttgcacttgtggcaacagataagtttgcagttggctaagagaggtttccgaagggttttgctacattctaatgcatgtattcgggttagggsaatggagggaatgctcagaaaggaaataattttatgctggactctggaccatataccatctccagctatttacacacacctttctttagcatgctacagttattaatctggacattcgaggaattggccgctgtcactgcttgttgtttgcgcatttttttttaaagcatattggtgctagaaaaggcagctaaaggaagtgaatctgtattggggtacaggaatgaaccttctgcaacatcttaagatccacaaatgaagggatataaaaataatgtcataggtaagaaacacagcaacaatgacttaaccatataaatgtggaggctatcaacaaagaatgggcttgaaacattataaaaattgacaatgatttattaaatatgttttctcaattgtaacgacttctccatctcctgtgtaatcaaggccagtgctaaaattcagatgctgktagtacctacatcagtcaacaacttacacttattttactagttttcaatcataatacctgctgtggatgcttcatgtgctgcctgcaagcttcttttttctcattaaatataaaatattttgtaatgctgcacagaaattttcaatttgagattctacagtaagcgttttttttcyttgaagatttatgatgcacttattcaatagctgtcagccgttccacccttttgaccttacacattctattacaatgaattttgcagttttgcacattttttaaatgtcattaactgttagggaattttacttgaatactgaatacatataatgtttatattaaaaaggacatttgtgttaaaaaggaaattagagttgcagtaaactttcaatgctgcacacaaaaaaaagacatttg

SEQ ID NO: 1027 - DNA, 2730 bp, Homo sapiens
gcggccgcggcggctgcagctccagggagggggtctgagtcgcctgtcaccatttccagagccatttccatcctgcagaagaagccccgccaccagcagcttctgccatctctctcctcctttttcttcagccacaggctcccagacatgacagccatcatcaaagagatcgttagcagaaacaaaaggagatatcaagaggatggattcgacttagacttgacctatatttatccaaacattattgctatgggatttcctgcagaaagacttgaaggcgtatacaggaacaatattgatgatgtagtaaggtttttggattcaaagcataaaaaccattacaagatatacaatctttgtgctgaaagacattatgacaccgccaaatttaattgcagagttgcacaatatccttttgaagaccataacccaccacagctagaacttatcaaacccttttrtgaagatcttgaccaatggctaagtgaagatgacaatcatrttgcagcaattsrcygtaaagctggaaaggraydaactggtgtaatgrtayrtgcatattkattacatcggggcaaatttttaaaggcacaagaggccctagatttctatggggaagtaaggaccagagacaaaaagggagtaactattcccagtcagaggcgctatgtgtattattatagctacctgttaaagaatcatctggattatwgaccagtggcactgttgtttcacaagatgatgtttgaaactattccaatgttcagtggcggaacttgcaatcctcagtttgtggtctgccagctaaaggtgaagatatattcctccaattcaggacccacaygacgggaagacaagttcatgtactttgagttccctyagcygttacctgtgtgtggtgatatcaaagtagagttcttccacaaacagaacaagatgctaaaaaaggacaaaatgtttcacttttgggtaaatacattcttcataccaggaccagaggaaacctcagaaaaagtagaaaatggaagtctatgtgatcaagaaatcgatagcatttgcagtatagagcgtgcagataatgacaaggaatakctagtacttacttwaacaaaaaatgatcttgacaaagcaaataaagacaaagccaaccgatacttttctccaaattttaaggtgaagctgtacttcacaaaaacagtagaggagccgtcaaatccagaggctagcagttcaacttctgtaacaccagatgttagtgacaatgaacctgatcattatagatattctgacaccactgactctgatccagagaatgaaccttttgatgaagatcagcatacacaaattacaaaagtctgaatttttttttatcaagagggataaaacaccatgaaaataaacttgaataaactgaaaatggaccyttttttttttaatggcaataggacattgtgtcagattaccagttataggaacaattctcttttcctgaccaatcttgttttaccctatacatccacagggttttgacacttgttgtccagttgaaaaaaggttgtgtagctgtgtcatgtatataccttkttgtgtcaaaaggacatttaaaattcaattaggattaataaagatggcactttcccgttttattccagttttataaaaagtggagacagactgakgtgtatacgtaggaattttttccttttgtgttctrtcaccaactgaagtggctaaagagctttgtgatatactggttcacatcctacccctttgcacttgtggcaacagataagtttgcagttggctaagagaggtttccgaagggttttgctacattctaatgcatgtattcgggttagggsaatggagggaatgctcagaaaggaaataattttatgctggactctggaccatataccatctccagctatttacacacacctttctttagcatgctacagttattaatctggacattcgaggaattggccgctgtcactgcttgttgtttgcgcatttttttttaaagcatattggtgctagaaaaggcagctaaaggaagtgaatctgtattggggtacaggaatgaaccttctgcaacatcttaagatccacaaatgaagggatataaaaataatgtcataggtaagaaacacagcaacaatgacttaaccatataaatgtggaggctatcaacaaagaatgggcttgaaacattataaaaattgacaatgatttattaaatatgttttctcaattgtaacgacttctccatctcctgtgtaatcaaggccagtgctaaaattcagatgctgktagtacctacatcagtcaacaacttacacttattttactagttttcaatcataatacctgctgtggatgcttcatgtgctgcctgcaagcttcttttttctcattaaatataaaatattttgtaatgctgcacagaaattttcaatttgagattctacagtaagcgttttttttcyttgaagatttatgatgcacttattcaatagctgtcagccgttccacccttttgaccttacacattctattacaatgaattttgcagttttgcacattttttaaatgtcattaactgttagggaattttacttgaatactgaatacatataatgtttatattaaaaaggacatttgtgttaaaaaggaaattagagttgcagtaaactttcaatgctgcacacaaaaaaaagacatttg

SEQ ID NO: 1028 - DNA, 3401 bp, Homo sapiens
gttctctcctctcggaagctgcagccatgatggaagtttgagagttgagccgctgtgaggcgaggccgggctcaggcgagggagatgagagacggcggcggccgcggcccggagcccctctcagcgcctgtgagcagccgcgggggcacggcggcggcagcggcggcgtttctcgcctcctcttcgtcttttctaaccgtgcagcctcttcctcggcttctcctgaaagggaaggtggaagccgtgggctcgggcgggagccggctgaggcgcggcggcggcggcggcacctcccgctcctggagcgggggggagaagcggcggcggcggcggccgcggcggctgcagctccagggagggggtctgagtcgcctgtcaccatttccagggctgggaacgccggagagttggtctctccccttctactgcctccaacacggcggcggcggcggcggcacatccagggacccgggccggttttaaacctcccgtscgccgccgccgcaccccccgtggcccgggctccggaggccgccggcggaggcagccgttcggaggattattcgtcttctccccattccgctgccgccgctgccaggcctctggctgctgaggagaagcaggcccagtcgctgcaaccatccagcagccgccgcagcagccattacccggctgcggtccagagccaagcggcggcagagcgaggggcatcagctaccgccaagtccagagccatttccatcctgcagaagaagccccgccaccagcagcttctgccatctctctcctcctttttcttcagccacaggctcccagacatgacagccatcatcaaagagatcgttagcagaaacaaaaggagatatcaagaggatggattcgacttagacttgacctatatttatccaaacattattgctatgggatttcctgcagaaagacttgaaggcgtatacaggaacaatattgatgatgtagtaaggtttttggattcaaagcataaaaaccattacaagatatacaatctttgtgctgaaagacattatgacaccgccaaatttaattgcagagttgcacaatatccttttgaagaccataacccaccacagctagaacttatcaaacccttttrtgaagatcttgaccaatggctaagtgaagatgacaatcatrttgcagcaattsrcygtaaagctggaaaggraydaactggtgtaatgrtayrtgcatattkattacatcggggcaaatttttaaaggcacaagaggccctagatttctatggggaagtaaggaccagagacaaaaagggagtaactattcccagtcagaggcgctatgtgtattattatagctacctgttaaagaatcatctggattatwgaccagtggcactgttgtttcacaagatgatgtttgaaactattccaatgttcagtggcggaacttgcaatcctcagtttgtggtctgccagctaaaggtgaagatatattcctccaattcaggacccacaygacgggaagacaagttcatgtactttgagttccctyagcygttacctgtgtgtggtgatatcaaagtagagttcttccacaaacagaacaagatgctaaaaaaggacaaaatgtttcacttttgggtaaatacattcttcataccaggaccagaggaaacctcagaaaaagtagaaaatggaagtctatgtgatcaagaaatcgatagcatttgcagtatagagcgtgcagataatgacaaggaatakctagtacttacttwaacaaaaaatgatcttgacaaagcaaataaagacaaagccaaccgatacttttctccaaattttaaggtgaagctgtacttcacaaaaacagtagaggagccgtcaaatccagaggctagcagttcaacttctgtaacaccagatgttagtgacaatgaacctgatcattatagatattctgacaccactgactctgatccagagaatgaaccttttgatgaagatcagcatacacaaattacaaaagtctgaatttttttttatcaagagggataaaacaccatgaaaataaacttgaataaactgaaaatggaccyttttttttttaatggcaataggacattgtgtcagattaccagttataggaacaattctcttttcctgaccaatcttgttttaccctatacatccacagggttttgacacttgttgtccagttgaaaaaaggttgtgtagctgtgtcatgtatataccttkttgtgtcaaaaggacatttaaaattcaattaggattaataaagatggcactttcccgttttattccagttttataaaaagtggagacagactgakgtgtatacgtaggaattttttccttttgtgttctrtcaccaactgaagtggctaaagagctttgtgatatactggttcacatcctacccctttgcacttgtggcaacagataagtttgcagttggctaagagaggtttccgaagggttttgctacattctaatgcatgtattcgggttagggsaatggagggaatgctcagaaaggaaataattttatgctggactctggaccatataccatctccagctatttacacacacctttctttagcatgctacagttattaatctggacattcgaggaattggccgctgtcactgcttgttgtttgcgcatttttttttaaagcatattggtgctagaaaaggcagctaaaggaagtgaatctgtattggggtacaggaatgaaccttctgcaacatcttaagatccacaaatgaagggatataaaaataatgtcataggtaagaaacacagcaacaatgacttaaccatataaatgtggaggctatcaacaaagaatgggcttgaaacattataaaaattgacaatgatttattaaatatgttttctcaattgtaacgacttctccatctcctgtgtaatcaaggccagtgctaaaattcagatgctgktagtacctacatcagtcaacaacttacacttattttactagttttcaatcataatacctgctgtggatgcttcatgtgctgcctgcaagcttcttttttctcattaaatataaaatattttgtaatgctgcacagaaattttcaatttgagattctacagtaagcgttttttttcyttgaagatttatgatgcacttattcaatagctgtcagccgttccacccttttgaccttacacattctattacaatgaattttgcagttttgcacattttttaaatgtcattaactgttagggaattttacttgaatactgaatacatataatgtttatattaaaaaggacatttgtgttaaaaaggaaattagagttgcagtaaactttcaatgctgcacacaaaaaaaagacatttg

SEQ ID NO: 1029 - DNA, 3734 bp, Homo sapiens
ctcctttttctcttttggttaaaagagagcattgtcgttctcagccatgtgctctgtataattaagagctgacactgaagcagagtaacaacatcttctaatttttttacccctgatcacaggtgcaaacatctcaagccagttcagatgttgctgtttcctcaagttgcagttaaaacagagccaatgagcagcagtgaaacagcttcaacgacagccgacgggtctttaaacaatttctcaggttcagcaattgggagcagtagtttcagcccacgaccaactcaccagttctctccaccacagatttacccttccaacagaccatacccacatattctccctaccccttcctcacaaactatggctgcatatgggcaaacacagtttaccacaggaatgcaacaagctacagcctatgccacgtacccacagccaggacagccgtacggcatttcctcatatggtgcattgtgggcaggcatcaagactgaaggtggattgtcacagtctcagtcacctggacagacaggatttctcagctatggcacaagcttcagtacccctcaacctggacaggcaccatacagctaccagatgcaaggtagcagttttacaacatcatcaggaatatatacaggaaataattcactcacaaattcctctggatttaatagttcacagcaggactatccgtcttatcccagttttggccagggtcagtasgcacagtattataacagctcaccgtatccagcacattatatgaccagcagcaacaccagcccaacracaccatccaccaatgccacttaccagcttcaagaaccgccatctggcatcaccagccaagcagttacrgatcccacagcagagtacagcacaatccacagcccatcaacacccattaaagattcagattctgatygattgcgtygaggttcagatgggaaatcacgtggacggggcygaagaaacaataatccttcacctcccccagattctgatcttgagagagtgttcatctgggacttggatgagacaatcattgttttccactccttgcttactgggtcctacgccaacagatatgggagggatccacccacttcagtttcccttggactgcgaatggaagaaatgattttcaacttggcagacacacatttattttttaatgacttagaagaatgtgaccaagtccatatagatgatgtttcttcagatgataacggacaggacctaagcacatataactttggaacagatggctttcctgctgcagcaaccagtgctaacttatgtttggcaactggtgtacggrgyggtgtggrctggatgagaaagttggccttccgctacagacrggtaaaagagatctacaacacctacaaaaataatgttggaggtctgcttggtccagctaagagggaagcctggctgcagttgagggccgaaattgaagccctgaccgactcctggttgacactggccctgaaagcactcycgctcattcactcccggacaaactgtgtgaatattttagtaacaactactcagctcatcccagcattggcgaaagtcctgctgtatgggttaggaattgtatttccaatagaaaatatttacagtgcaactaaaataggaaaagaaagctgttttgagagaataattcaaaggtttggargaaaagtggtgtatgttgttataggagatggtgtagaagaagaacaaggagcaaaaaagcacgcgatgcccttctggaggatctccagccactcggacctcatggcccygcaccaygccttggaactggagtacctgtaacagcgctcggcactttgacagcgcacagctgctctgtgaccagggacagatccagcaggccccagtctcgcatcagcgccggcctccagaacttagcaatttccgcctggtgatgcgcagttgctgtcagtcttgacctctgcctttgtggtgaatggaggaccacgtctatttcatcagaacagctgttgactctagtactgtgaatccagtgaaaataagccatgagaatgttttagcacagcgttatgtgtctgccacattaactacacggttcaaacctgtgaagaaaggacctgcaaacgcttcagttgttagcattttcaatgtgatataaacagcttctccaatacagcaaacctaattgcacaacagagactgaaatgtgtttcctgaataccagtggaggaattttcttgtaaagaaggtttactttttggtgtctcatacccagggtaatctgtacatctctacttatttatgaacagactttttttaaaaagataaaaaaacagctttattgaggtataattcacccaccagacttttttaaacatcaaataattgaagagacaatagcattagaaataagtgattaaaggcctctgcctcacaacatggcaagtacagtactttgaattttagcacattgcatagtagttttaagtatgtctaatttaaacgtataatatgtacatcactgagacaatcatgtacagaaagaatttttggtgtaaatttgtaataatggataattcttttacatattgtttagggaaatgatattgaaaggtagcaatgcctggatagtgaagcatgaggcagcacgtgcacaaattcatgtgccgtgccttatctgagttttcggtataaatatgtagataatggattttttttttttagataatgttgtcaagaccaaaagcatggatgtcaagtgtcagtaaggattttgttttctaaaattttttcctgcatcagttcttctgagggccttgatgaaataacacagcagtttcttaaacaatttgaaacaaaatgagctctcctaccacctcactttttcatttccacactaatgtattatatgtaactacttggaaaaaataattattcaaatgcttcttcccacaaagaatatagatgatagtagatatattttattaataaaatggttcatgaatcggagactaacaaagttttcatgtgctcagaattattaattatcgtgtctgcattttctttcgataaaggaagacacacgatgctaatccggaaatcagcaaactttgcattactccctatgtgcgtattttctctttcttcctgtcaccctgaggaaggttcattgccattgtcatcaccatggaaacaacgttcctctccacctgcattatgtactacatgacaggcatcaatctggggaaataataaaattatcacctttgtcagaccataagagtttctccaaaagtggtcagtttggctgggcaatattttctctcatctaacaaacacaatccattgtcatgaaattacccttaggatgagtcttctttaatcaatcatatattgggcggaaaaaacaccagctttgacccgaagtagttgaagagctacttcattcttttctgaagttgtgtgttgctgctagaaatagtcatttgtgaattatccaaattgtttaaattcacaattgaattagttttttcttcctttttgcttgaagcaaacagttgacaatttttaaccttttcattttatgtttttgtactctgcagactgaaaagacaaagtttatcttggccttactgtataaaggtrtgctgtgtccaccgttgtgtacagaatttttcttcattaattttgtgtttaagttaataaaatttatttgtgatgtactgtaa

SEQ ID NO: 1030 - DNA, 4356 bp, Homo sapiens
aaaccaataaggttaggacaagagaatagctgtggtttgcgttgcaaaaaccaaaaaaaaaaaaaaaaaaaaaaaaagaaagccccgaggctccatgggcagacctacaaggctgcgcaaacaaatcgagggatgagattctgctgtttctttgtctagggttctcagatgctatctgccgctgctgtttggtggggaaggagcgctgggcgcaaagctgttaccaaacagaacggtgggagctgatggctccgagtttggggcgaggtagaaactctccagtgccacttccgactttaagccttcctgttgccgtccactgtggcgggtttcttcctggggaacacgttttcgctcagtcgctcggcagcccgagcctgcggcagcggccaggcgcctgccccctgcgccgagctttcccctgcagaggcgctccactcccagaagcgccgcggctgcaccagagcgcctgagagcccccgcgcgtacccatccaggagcaaaactatgtcaggaatggaggtttgctaacccagaaaattcgaaggaacacattaaactggtggatgcagcagatgtaagcgctgtgcaaacatctcaagccagttcagatgttgctgtttcctcaagttgcaggtctatggaaatgcaggatctaaccagcccgcatagccgtctgagtggtagtagtgaatccsccagtggccccaaactcggtaactctcatataaatagtaattccatgactcccaatggcaccgaagttaaaacagagccaatgagcagcagtgaaacagcttcaacgacagccgacgggtctttaaacaatttctcaggttcagcaattgggagcagtagtttcagcccacgaccaactcaccagttctctccaccacagatttacccttccaacagaccatacccacatattctccctaccccttcctcacaaactatggctgcatatgggcaaacacagtttaccacaggaatgcaacaagctacagcctatgccacgtacccacagccaggacagccgtacggcatttcctcatatggtgcattgtgggcaggcatcaagactgaaggtggattgtcacagtctcagtcacctggacagacaggatttctcagctatggcacaagcttcagtacccctcaacctggacaggcaccatacagctaccagatgcaaggtagcagttttacaacatcatcaggaatatatacaggaaataattcactcacaaattcctctggatttaatagttcacagcaggactatccgtcttatcccagttttggccagggtcagtasgcacagtattataacagctcaccgtatccagcacattatatgaccagcagcaacaccagcccaacracaccatccaccaatgccacttaccagcttcaagaaccgccatctggcatcaccagccaagcagttacrgatcccacagcagagtacagcacaatccacagcccatcaacacccattaaagattcagattctgatygattgcgtygaggttcagatgggaaatcacgtggacggggcygaagaaacaataatccttcacctcccccagattctgatcttgagagagtgttcatctgggacttggatgagacaatcattgttttccactccttgcttactgggtcctacgccaacagatatgggagggatccacccacttcagtttcccttggactgcgaatggaagaaatgattttcaacttggcagacacacatttattttttaatgacttagaagaatgtgaccaagtccatatagatgatgtttcttcagatgataacggacaggacctaagcacatataactttggaacagatggctttcctgctgcagcaaccagtgctaacttatgtttggcaactggtgtacggrgyggtgtggrctggatgagaaagttggccttccgctacagacrggtaaaagagatctacaacacctacaaaaataatgttggaggcaattcatcatgtgcttttaaatcctcaggtctgcttggtccagctaagagggaagcctggctgcagttgagggccgaaattgaagccctgaccgactcctggttgacactggccctgaaagcactcycgctcattcactcccggacaaactgtgtgaatattttagtaacaactactcagctcatcccagcattggcgaaagtcctgctgtatgggttaggaattgtatttccaatagaaaatatttacagtgcaactaaaataggaaaagaaagctgttttgagagaataattcaaaggtttggargaaaagtggtgtatgttgttataggagatggtgtagaagaagaacaaggagcaaaaaagcacgcgatgcccttctggaggatctccagccactcggacctcatggcccygcaccaygccttggaactggagtacctgtaacagcgctcggcactttgacagcgcacagctgctctgtgaccagggacagatccagcaggccccagtctcgcatcagcgccggcctccagaacttagcaatttccgcctggtgatgcgcagttgctgtcagtcttgacctctgcctttgtggtgaatggaggaccacgtctatttcatcagaacagctgttgactctagtactgtgaatccagtgaaaataagccatgagaatgttttagcacagcgttatgtgtctgccacattaactacacggttcaaacctgtgaagaaaggacctgcaaacgcttcagttgttagcattttcaatgtgatataaacagcttctccaatacagcaaacctaattgcacaacagagactgaaatgtgtttcctgaataccagtggaggaattttcttgtaaagaaggtttactttttggtgtctcatacccagggtaatctgtacatctctacttatttatgaacagactttttttaaaaagataaaaaaacagctttattgaggtataattcacccaccagacttttttaaacatcaaataattgaagagacaatagcattagaaataagtgattaaaggcctctgcctcacaacatggcaagtacagtactttgaattttagcacattgcatagtagttttaagtatgtctaatttaaacgtataatatgtacatcactgagacaatcatgtacagaaagaatttttggtgtaaatttgtaataatggataattcttttacatattgtttagggaaatgatattgaaaggtagcaatgcctggatagtgaagcatgaggcagcacgtgcacaaattcatgtgccgtgccttatctgagttttcggtataaatatgtagataatggattttttttttttagataatgttgtcaagaccaaaagcatggatgtcaagtgtcagtaaggattttgttttctaaaattttttcctgcatcagttcttctgagggccttgatgaaataacacagcagtttcttaaacaatttgaaacaaaatgagctctcctaccacctcactttttcatttccacactaatgtattatatgtaactacttggaaaaaataattattcaaatgcttcttcccacaaagaatatagatgatagtagatatattttattaataaaatggttcatgaatcggagactaacaaagttttcatgtgctcagaattattaattatcgtgtctgcattttctttcgataaaggaagacacacgatgctaatccggaaatcagcaaactttgcattactccctatgtgcgtattttctctttcttcctgtcaccctgaggaaggttcattgccattgtcatcaccatggaaacaacgttcctctccacctgcattatgtactacatgacaggcatcaatctggggaaataataaaattatcacctttgtcagaccataagagtttctccaaaagtggtcagtttggctgggcaatattttctctcatctaacaaacacaatccattgtcatgaaattacccttaggatgagtcttctttaatcaatcatatattgggcggaaaaaacaccagctttgacccgaagtagttgaagagctacttcattcttttctgaagttgtgtgttgctgctagaaatagtcatttgtgaattatccaaattgtttaaattcacaattgaattagttttttcttcctttttgcttgaagcaaacagttgacaatttttaaccttttcattttatgtttttgtactctgcagactgaaaagacaaagtttatcttggccttactgtataaaggtrtgctgtgtccaccgttgtgtacagaatttttcttcattaattttgtgtttaagttaataaaatttatttgtgatgtactgtaa

SEQ ID NO: 1031 - DNA, 4326 bp, Homo sapiens
aaaccaataaggttaggacaagagaatagctgtggtttgcgttgcaaaaaccaaaaaaaaaaaaaaaaaaaaaaaaagaaagccccgaggctccatgggcagacctacaaggctgcgcaaacaaatcgagggatgagattctgctgtttctttgtctagggttctcagatgctatctgccgctgctgtttggtggggaaggagcgctgggcgcaaagctgttaccaaacagaacggtgggagctgatggctccgagtttggggcgaggtagaaactctccagtgccacttccgactttaagccttcctgttgccgtccactgtggcgggtttcttcctggggaacacgttttcgctcagtcgctcggcagcccgagcctgcggcagcggccaggcgcctgccccctgcgccgagctttcccctgcagaggcgctccactcccagaagcgccgcggctgcaccagagcgcctgagagcccccgcgcgtacccatccaggagcaaaactatgtcaggaatggaggtttgctaacccagaaaattcgaaggaacacattaaactggtggatgcagcagatgtaagcgctgtgcaaacatctcaagccagttcagatgttgctgtttcctcaagttgcaggtctatggaaatgcaggatctaaccagcccgcatagccgtctgagtggtagtagtgaatccsccagtggccccaaactcggtaactctcatataaatagtaattccatgactcccaatggcaccgaagttaaaacagagccaatgagcagcagtgaaacagcttcaacgacagccgacgggtctttaaacaatttctcaggttcagcaattgggagcagtagtttcagcccacgaccaactcaccagttctctccaccacagatttacccttccaacagaccatacccacatattctccctaccccttcctcacaaactatggctgcatatgggcaaacacagtttaccacaggaatgcaacaagctacagcctatgccacgtacccacagccaggacagccgtacggcatttcctcatatggtgcattgtgggcaggcatcaagactgaaggtggattgtcacagtctcagtcacctggacagacaggatttctcagctatggcacaagcttcagtacccctcaacctggacaggcaccatacagctaccagatgcaaggtagcagttttacaacatcatcaggaatatatacaggaaataattcactcacaaattcctctggatttaatagttcacagcaggactatccgtcttatcccagttttggccagggtcagtasgcacagtattataacagctcaccgtatccagcacattatatgaccagcagcaacaccagcccaacracaccatccaccaatgccacttaccagcttcaagaaccgccatctggcatcaccagccaagcagttacrgatcccacagcagagtacagcacaatccacagcccatcaacacccattaaagattcagattctgatygattgcgtygaggttcagatgggaaatcacgtggacggggcygaagaaacaataatccttcacctcccccagattctgatcttgagagagtgttcatctgggacttggatgagacaatcattgttttccactccttgcttactgggtcctacgccaacagatatgggagggatccacccacttcagtttcccttggactgcgaatggaagaaatgattttcaacttggcagacacacatttattttttaatgacttagaagaatgtgaccaagtccatatagatgatgtttcttcagatgataacggacaggacctaagcacatataactttggaacagatggctttcctgctgcagcaaccagtgctaacttatgtttggcaactggtgtacggrgyggtgtggrctggatgagaaagttggccttccgctacagacrggtaaaagagatctacaacacctacaaaaataatgttggaggtctgcttggtccagctaagagggaagcctggctgcagttgagggccgaaattgaagccctgaccgactcctggttgacactggccctgaaagcactcycgctcattcactcccggacaaactgtgtgaatattttagtaacaactactcagctcatcccagcattggcgaaagtcctgctgtatgggttaggaattgtatttccaatagaaaatatttacagtgcaactaaaataggaaaagaaagctgttttgagagaataattcaaaggtttggargaaaagtggtgtatgttgttataggagatggtgtagaagaagaacaaggagcaaaaaagcacgcgatgcccttctggaggatctccagccactcggacctcatggcccygcaccaygccttggaactggagtacctgtaacagcgctcggcactttgacagcgcacagctgctctgtgaccagggacagatccagcaggccccagtctcgcatcagcgccggcctccagaacttagcaatttccgcctggtgatgcgcagttgctgtcagtcttgacctctgcctttgtggtgaatggaggaccacgtctatttcatcagaacagctgttgactctagtactgtgaatccagtgaaaataagccatgagaatgttttagcacagcgttatgtgtctgccacattaactacacggttcaaacctgtgaagaaaggacctgcaaacgcttcagttgttagcattttcaatgtgatataaacagcttctccaatacagcaaacctaattgcacaacagagactgaaatgtgtttcctgaataccagtggaggaattttcttgtaaagaaggtttactttttggtgtctcatacccagggtaatctgtacatctctacttatttatgaacagactttttttaaaaagataaaaaaacagctttattgaggtataattcacccaccagacttttttaaacatcaaataattgaagagacaatagcattagaaataagtgattaaaggcctctgcctcacaacatggcaagtacagtactttgaattttagcacattgcatagtagttttaagtatgtctaatttaaacgtataatatgtacatcactgagacaatcatgtacagaaagaatttttggtgtaaatttgtaataatggataattcttttacatattgtttagggaaatgatattgaaaggtagcaatgcctggatagtgaagcatgaggcagcacgtgcacaaattcatgtgccgtgccttatctgagttttcggtataaatatgtagataatggattttttttttttagataatgttgtcaagaccaaaagcatggatgtcaagtgtcagtaaggattttgttttctaaaattttttcctgcatcagttcttctgagggccttgatgaaataacacagcagtttcttaaacaatttgaaacaaaatgagctctcctaccacctcactttttcatttccacactaatgtattatatgtaactacttggaaaaaataattattcaaatgcttcttcccacaaagaatatagatgatagtagatatattttattaataaaatggttcatgaatcggagactaacaaagttttcatgtgctcagaattattaattatcgtgtctgcattttctttcgataaaggaagacacacgatgctaatccggaaatcagcaaactttgcattactccctatgtgcgtattttctctttcttcctgtcaccctgaggaaggttcattgccattgtcatcaccatggaaacaacgttcctctccacctgcattatgtactacatgacaggcatcaatctggggaaataataaaattatcacctttgtcagaccataagagtttctccaaaagtggtcagtttggctgggcaatattttctctcatctaacaaacacaatccattgtcatgaaattacccttaggatgagtcttctttaatcaatcatatattgggcggaaaaaacaccagctttgacccgaagtagttgaagagctacttcattcttttctgaagttgtgtgttgctgctagaaatagtcatttgtgaattatccaaattgtttaaattcacaattgaattagttttttcttcctttttgcttgaagcaaacagttgacaatttttaaccttttcattttatgtttttgtactctgcagactgaaaagacaaagtttatcttggccttactgtataaaggtrtgctgtgtccaccgttgtgtacagaatttttcttcattaattttgtgtttaagttaataaaatttatttgtgatgtactgtaa

SEQ ID NO: 1032 - DNA, 4251 bp, Homo sapiens
aaaccaataaggttaggacaagagaatagctgtggtttgcgttgcaaaaaccaaaaaaaaaaaaaaaaaaaaaaaaagaaagccccgaggctccatgggcagacctacaaggctgcgcaaacaaatcgagggatgagattctgctgtttctttgtctagggttctcagatgctatctgccgctgctgtttggtggggaaggagcgctgggcgcaaagctgttaccaaacagaacggtgggagctgatggctccgagtttggggcgaggtagaaactctccagtgccacttccgactttaagccttcctgttgccgtccactgtggcgggtttcttcctggggaacacgttttcgctcagtcgctcggcagcccgagcctgcggcagcggccaggcgcctgccccctgcgccgagctttcccctgcagaggcgctccactcccagaagcgccgcggctgcaccagagcgcctgagagcccccgcgcgtacccatccaggagcaaaactatgtcaggaatggaggtttgctaacccagaaaattcgaaggaacacattaaactggtggatgcagcagatgtaagcgctgtgcaaacatctcaagccagttcagatgttgctgtttcctcaagttgcaggtctatggaaatgcaggatctaaccagcccgcatagccgtctgagtggtagtagtgaatccsccagtggccccaaactcggtaactctcatataaatagtaattccatgactcccaatggcaccgaagttaaaacagagccaatgagcagcagtgaaacagcttcaacgacagccgacgggtctttaaacaatttctcaggttcagcaattgggagcagtagtttcagcccacgaccaactcaccagttctctccaccacagatttacccttccaacagaccatacccacatattctccctaccccttcctcacaaactatggctgcatatgggcaaacacagtttaccacaggaatgcaacaagctacagcctatgccacgtacccacagccaggacagccgtacggcatttcctcatatggcatcaagactgaaggtggattgtcacagtctcagtcacctggacagacaggatttctcagctatggcacaagcttcagtacccctcaacctggacaggcaccatacagctaccagatgcaaggtagcagttttacaacatcatcaggaatatatacaggaaataattcactcacaaattcctctggatttaatagttcacagcaggactatccgtcttatcccagttttggccagggtcagtasgcacagtattataacagctcaccgtatccagcacattatatgaccagcagcaacaccagcccaacracaccatccaccaatgccacttaccagcttcaagaaccgccatctggcatcaccagccaagcagttacrgatcccacagcagagtacagcacaatccacagcccatcaacacccattaaagattcagattctgatygattgcgtygaggttcagatgggaaatcacgtggacggggcygaagaaacaataatccttcacctcccccagattctgatcttgagagagtgttcatctgggacttggatgagacaatcattgttttccactccttgcttactgggtcctacgccaacagatatgggagggaatgtgaccaagtccatatagatgatgtttcttcagatgataacggacaggacctaagcacatataactttggaacagatggctttcctgctgcagcaaccagtgctaacttatgtttggcaactggtgtacggrgyggtgtggrctggatgagaaagttggccttccgctacagacrggtaaaagagatctacaacacctacaaaaataatgttggaggcaattcatcatgtgcttttaaatcctcaggtctgcttggtccagctaagagggaagcctggctgcagttgagggccgaaattgaagccctgaccgactcctggttgacactggccctgaaagcactcycgctcattcactcccggacaaactgtgtgaatattttagtaacaactactcagctcatcccagcattggcgaaagtcctgctgtatgggttaggaattgtatttccaatagaaaatatttacagtgcaactaaaataggaaaagaaagctgttttgagagaataattcaaaggtttggargaaaagtggtgtatgttgttataggagatggtgtagaagaagaacaaggagcaaaaaagcacgcgatgcccttctggaggatctccagccactcggacctcatggcccygcaccaygccttggaactggagtacctgtaacagcgctcggcactttgacagcgcacagctgctctgtgaccagggacagatccagcaggccccagtctcgcatcagcgccggcctccagaacttagcaatttccgcctggtgatgcgcagttgctgtcagtcttgacctctgcctttgtggtgaatggaggaccacgtctatttcatcagaacagctgttgactctagtactgtgaatccagtgaaaataagccatgagaatgttttagcacagcgttatgtgtctgccacattaactacacggttcaaacctgtgaagaaaggacctgcaaacgcttcagttgttagcattttcaatgtgatataaacagcttctccaatacagcaaacctaattgcacaacagagactgaaatgtgtttcctgaataccagtggaggaattttcttgtaaagaaggtttactttttggtgtctcatacccagggtaatctgtacatctctacttatttatgaacagactttttttaaaaagataaaaaaacagctttattgaggtataattcacccaccagacttttttaaacatcaaataattgaagagacaatagcattagaaataagtgattaaaggcctctgcctcacaacatggcaagtacagtactttgaattttagcacattgcatagtagttttaagtatgtctaatttaaacgtataatatgtacatcactgagacaatcatgtacagaaagaatttttggtgtaaatttgtaataatggataattcttttacatattgtttagggaaatgatattgaaaggtagcaatgcctggatagtgaagcatgaggcagcacgtgcacaaattcatgtgccgtgccttatctgagttttcggtataaatatgtagataatggattttttttttttagataatgttgtcaagaccaaaagcatggatgtcaagtgtcagtaaggattttgttttctaaaattttttcctgcatcagttcttctgagggccttgatgaaataacacagcagtttcttaaacaatttgaaacaaaatgagctctcctaccacctcactttttcatttccacactaatgtattatatgtaactacttggaaaaaataattattcaaatgcttcttcccacaaagaatatagatgatagtagatatattttattaataaaatggttcatgaatcggagactaacaaagttttcatgtgctcagaattattaattatcgtgtctgcattttctttcgataaaggaagacacacgatgctaatccggaaatcagcaaactttgcattactccctatgtgcgtattttctctttcttcctgtcaccctgaggaaggttcattgccattgtcatcaccatggaaacaacgttcctctccacctgcattatgtactacatgacaggcatcaatctggggaaataataaaattatcacctttgtcagaccataagagtttctccaaaagtggtcagtttggctgggcaatattttctctcatctaacaaacacaatccattgtcatgaaattacccttaggatgagtcttctttaatcaatcatatattgggcggaaaaaacaccagctttgacccgaagtagttgaagagctacttcattcttttctgaagttgtgtgttgctgctagaaatagtcatttgtgaattatccaaattgtttaaattcacaattgaattagttttttcttcctttttgcttgaagcaaacagttgacaatttttaaccttttcattttatgtttttgtactctgcagactgaaaagacaaagtttatcttggccttactgtataaaggtrtgctgtgtccaccgttgtgtacagaatttttcttcattaattttgtgtttaagttaataaaatttatttgtgatgtactgtaa

SEQ ID NO: 1033 - DNA, 954 bp, Homo sapiens
gagaggcctctctggaagttgtcccgggtgttcgccgctggagcccgggtckasaggacgaggtgccgctgcctggagaatcctccgctgccgtcggctcccggagcccagccctttcctaacccaacccaacctagcccagtcccagccgccagcgcctgtccctgtcacggaccccagcgttaccatgcatcctgccgtcttcctatccttacccgacctcagatgctcccttctgctcctggtaacttgggtttttactcctgtaacaactgaaataacaagtcttgatacagagaatatagatgaaattttaaacaatgctgatgttgctttagtaaatttttatgctgactggtgtcgtttcagtcagatgttgcatccaatttttgaggaagcttccgatgtcattaaggaagaatttccaaatgaaaatcaagtagtgtttgccagagttgattgtgatcagcactctgacatagcccagagatacaggataagcaaatacccaaccctcaaattgtttcgtaatgggatgatgatgaagagagaatacaggggtcagcgatcagtgaaagcattggcagattacatcaggcaacaaaaaagtgaccccattcaagaaattcgggacttagcagaaatcaccactcttgatcgcagcaaaagaaatatcattggatattttgagcaaaaggactcggacaactatagagtttttgaacgagtagcgaatattttgcatgatgactgtgcctttctttctgcatttggggatgtttcaaaaccggaaagatatagtggcgacaacataatctacaaaccaccagggcattctgctccggatatggtgtacttgggagctatgacaaattttgatgtgacttacaattggattcaagataaatgtgttcctcttgtccgagaaataacatttgaaaatggagaggtatg

SEQ ID NO: 1034 - DNA, 2180 bp, Homo sapiens
cagtgcgagagccactgctgctgaggagagaagcgtccacagcagcaccatgggtagctcaacagaagacccctgaaggctatgtgggatttgccaatctcccaaaccaagtatacagaaaatcagttaagagatctggttttgaggtggaacaatccaaagttttaatcaaagaaggtggtgttcagttgctgctcacaatagttgataccccaggatttggagatgcagtggataatagtaattgctggcagccttacaatcgactacattgataataaacttgaggactacgtaaatgcagaatcgcatgtgaacggacgtcagatgcctgataacggtgtagcgttgtttatacttcattgctccttcaggacatggacttaaaccattgaatattgagtttatgaagcgtttgcatgaaacagtatcatctcacttattgccacagaagacacactcacaccagaggaatgctaacagtttaaaaaacagataatgaaagaaacccaagaacataaaattaaaatatatgaatttctagaaacataataaagaagaaaataaacttgttaaaaagataaaggaccatttacctgttggtgtggtaggtagtaatactatcatcaaagttaatggcaaaatgatcagaggaaagcagcatccttggggtattgctgaagttgaaaatggtgaacactgtgattttacaattctaagaaatatgttgataagaacacacatgcaggacttgaaagaggttactaataatgtccactatgagaactacagaagcagaaaactggcagctgtgacttataatggaattgataacaacaagaataaagggcagctgaccaagagccctccggcacaaatggaagaagaaagaagggagcatgtagctaaaatgaagaagatggagctggagatggagcaggtgtttgagatgaaggtcaaagaaaaagttcaaaactgaagaactctgaagctgagctccagcggcaccatgagcaaatgaaaaggaatttggaagcacagcataaacaattagaggaaaaacgtcatcagttagaggatgagaaagcaaactgggaagctcaacaacgtattttagaacaacgaactcttcgagaaccttggaaaagaacaagaagaaaggaagatcttttaaactctctattgaccaccagttacgtattagttgccaatatgccagcttggacatcagtgtttgttggatccgtttgaccaatttgagccagttttatctataatgatggatttaagagcatgacacacattatttttgttgttgttgttcttgatggagattaagatgccgtcaattgtctagggtgttgtgtacttagaaagtaacagctctacttttcctactttttctttttctttttttattaaacagattatcttcagttgaatgcaagataacattttactgttgtataatcatgttctgacggtttgattgtttacaagatattccaaaataaaaggactctggaaggttttcattgaggataaaaggccataatatgatgcaaactatgcttctctatgataattataatacaaaggttccattcaatgcagtatatacaataatgtaatttagtctaacacagttgaccctatgttttgacacttccattgtttaaaaatacacatggaaaaaaaaccctatatgcttacagtgcacctagagcttttttataacaacttctttttgtttgttttggattctttaaatatatmttattctcatttagtgcactctttagccagaatctcattactacttcatttttgtaataacatttaatttagatagtgttcacatattggccctgctgaaatagaatatagcatctttcatatggtaggaaccaacaaggaaactttctttaactcctttttacactttatggtaagtagcagggggaaaatgcatttatagatcatttctaggcaaaattgtgaagctaatgaccaacctgtttctacctwtatgcagtctcttaattttactagaaatgggaatcacggcctcttgaagagaaaaaagtcaccattctgcatttagctgtaatcatatattgcatttctgtattttttgtttgtattgtaaaaaattcacataataaacgatgttgtgatat

SEQ ID NO: 1035 - DNA, 2350 bp, Homo sapiens
gggggtcgccttgccggcctcctgtcctcctccggcggcggcggagcccgagagaactaggtgaacaccgctttgccagcctcacacagcgtcccctggctctgccgccgctccggacgtcgccctcccgttctgcttgggtccccttagtcgctacctttgctgggatccccctcctccatcctgtggcttcgggttgccgaagagcgatgctcggagggcggccggaagtggcgttggccgccattggcctgccggccagccaccttgctgtcctccgccgccttccgggtgttacrtgcagccgggctcggccyctccccctggccggatggatccgtcggcgccacagccccgcgcggaaacctcaggcaaagacatatggcatccaggagaaagatgtcttgccccttctccagataatggaaaactttgtgaagcaagcataaaatctatcacagtggatgaaaatggcaagtcatttgcagtcgtcttatatgcagattttcaagaaaggaaaatacctcttaaacagcttcaagaagtgaaatttgttaaagattgccctaggaatcttatatttgatgatgaagatttagaaaaaccttatttcccaaaccgaaaatttccatcatcttctgttgcttttaaattatctgacaatggagactctattccttataccatcaataggtatttgagagastaccaaagagaaggaacccggtttctttatgracactacatccatggaggagggtgcattctgggtgatgacatgggacttggaaaaacagtacaggttatttcatttctggctgcagttttgcataaaaagggaactcgtgaggatattgaaaataacatgccagagtttttactaagaagtatgaaaaaggaacccctttcttctacagcaaaaaagatgtycttaatagttgctcctctttctgtcctctacaactggaaggatgaattggacacctggggatatttcagagtcactgttttacatggaaacagaaaagataatgaattaattcgtgtaaagcagaggaaatgtgaaattgctytaacaacttatgaaacactacgcttatgcctggatgaacttaacagtttggaatggtcagctgtcattgtggatgaagctcatagaatcaagaatccaaaagctagagtaacagaagttatgaaagctttgaaatgtaatgtccgcattggcctcactggaaccatccttcagaacaacatgaaggaactgtggtgtgttatggactgggctgtgccaggccttttagggagtgggacctacttcaagaagcagttttctgacccagtagaacatggtcagagacacacggcaacaaagagagaactagccactggccgaaaggccatgcaaagacttgccaaaaagatgtctggctggtttctcaggcgcaccaagactcttatcaaggatcagttgcctaagaaggaagaccggatggtgtattgttctttgacagatttccagaaagctgtctatcaaacagtgttagaaacagaggacgtgactttgatacttcaatcttctgagccttgtacctgtaggagtggccaaaaaaggagaaattgttgttataagaccaattctcatggtgaaacagtgaaaaccttgtatctcagttaccttacagtccttcagaaggtagctaaccatgtcgcgctactgcaagctgctagtacttccaaacaacaggaaacacttatcaaaaggatatgtgatcaggtattttccagattcccagattttgtgcagaaaagcaaagatgcagcctttgaaacactttctgaccctaaatacagtggaaaaatgaaggtccttcagcagcttttaaatcattgcaggaaaaacagagataaagttcttctcttttctttttccaccaagttgcttgacgtgctacagcagtactgtatggcgtctgggcttgattaccgacgacttgatggaagtacaaaatcagaggaaagactcaagattgtaaaagagttcaacagtacacaagatgttaacatttgccttgyctctacaatggctggtggactaggcctcaattttgtcggtgccaatgttgttgtattatttgatcctacttggaatccagccaatgatcttcaagccattgacagaacccaaacacattgtaggagagaaagggatgctgagcccctctcctytgctcctgggttgcagaatggaagtgagaatgcagtaccttacccctggtggtgctgtgtcacrggagcctccatttcctgctggagatgtgagatttgcaggatccaagatgtcctcgagtaa

SEQ ID NO: 1036 - DNA, 2431 bp, Homo sapiens
gggggtcgccttgccggcctcctgtcctcctccggcggcggcggagcccgagagaactaggtgaacaccgctttgccagcctcacacagcgtcccctggctctgccgccgctccggacgtcgccctcccgttctgcttgggtccccttagtcgctacctttgctgggatccccctcctccatcctgtggcttcgggttgccgaagagcgatgctcggagggcggccggaagtggcgttggccgccattggcctgccggccagccaccttgctgtcctccgccgccttccgggtgttacrtgcagccgggctcggccyctccccctggccggatggatccgtcggcgccacagccccgcgcggaaacctcaggcaaagacatatggcatccaggagaaagatgtcttgccccttctccagataatggaaaactttgtgaagcaagcataaaatctatcacagtggatgaaaatggcaagtcatttgcagtcgtcttatatgcagattttcaagaaaggaaaatacctcttaaacagcttcaagaagtgaaatttgttaaagattgccctaggaatcttatatttgatgatgaagatttagaaaaaccttatttcccaaaccgaaaatttccatcatcttctgttgcttttaaattatctgacaatggagactctattccttataccatcaataggtatttgagagastaccaaagagaaggaacccggtttctttatgracactacatccatggaggagggtgcattctgggtgatgacatgggacttggaaaaacagtacaggttatttcatttctggctgcagttttgcataaaaagggaactcgtgaggatattgaaaataacatgccagagtttttactaagaagtatgaaaaaggaacccctttcttctacagcaaaaaagatgtycttaatagttgctcctctttctgtcctctacaactggaaggatgaattggacacctggggatatttcagagtcactgttttacatggaaacagaaaagataatgaattaattcgtgtaaagcagaggaaatgtgaaattgctytaacaacttatgaaacactacgcttatgcctggatgaacttaacagtttggaatggtcagctgtcattgtggatgaagctcatagaatcaagaatccaaaagctagagtaacagaagttatgaaagctttgaaatgtaatgtccgcattggcctcactggaaccatccttcagaacaacatgaaggaactgtggtgtgttatggactgggctgtgccaggccttttagggagtgggacctacttcaagaagcagttttctgacccagtagaacatggtcagagacacacggcaacaaagagagaactagccactggccgaaaggccatgcaaagacttgccaaaaagatgtctggctggtttctcaggcgcaccaagactcttatcaaggatcagttgcctaagaaggaagaccggatggtgtattgttctttgacagatttccagaaagctgtctatcaaacagtgttagaaacagaggacgtgactttgatacttcaatcttctgagccttgtacctgtaggagtggccaaaaaaggagaaattgttgttataagaccaattctcatggtgaaacagtgaaaaccttgtatctcagttaccttacagtccttcagaaggtagctaaccatgtcgcgctactgcaagctgctagtacttccaaacaacaggaaacacttatcaaaaggatatgtgatcaggtattttccagattcccagattttgtgcagaaaagcaaagatgcagcctttgaaacactttctgaccctaaatacagtggaaaaatgaaggtccttcagcagcttttaaatcattgcaggaaaaacagagataaagttcttctcttttctttttccaccaagttgcttgacgtgctacagcagtactgtatggcgtctgggcttgattaccgacgacttgatggaagtacaaaatcagaggaaagactcaagattgtaaaagagttcaacagtacacaagatgttaacatttgccttgyctctacaatggctggtggactaggcctcaattttgtcggtgccaatgttgttgtattatttgatcctacttggaatccagccaatgatcttcaagccattgacagagcatataggattggacaatgtagagatgtcaaagtgcttaggctgatatccttgggaactgtggaggaaatcatgtatttacgacagatatacaagcagcaacttcactgtgtggtggttggaagtgaaaatgccaaacgatattttgaagcagttcaaggatctaaagagcatcaaggagagctttttgggatccataacctcttcaaatttaggtcccaagggtcttgtcttacgaaggacatcctggag

SEQ ID NO: 1037 - DNA, 1836 bp, Homo sapiens
aatcttgcactttgaaaccgcgggaccgaggcagggtgcgcgcgtgtggttggtgcctttttttttttttcttcccctccctaaactcctctgtcagtctgtaaacattacctgagaattccccagccgaaacggctgctggggcaagaaacttcttgttagaactttccacctccggcttccccctccacctcttttaccgtcccaaccttaggagacgctttttctcccccagaggagaatttatcttttttttttttttttttttctttttctcacccggtgctttgcatttgggaagaggtgatttcaagagtggccaggtgggacgcctctctcctccttattcggtttactatttattgttcggggtgttttttaattcctgtattgctcggcccggggagtttcgccccctgcccggctccgcggcgcggaggatggygtggaaacggctgggcgcgctggtgatgttccctctacagatgatctatctggtggtgaaagcagccgtcggactggtgctgcccgccaagctgcgggacctgtcgcgggagaacgtcctcatcaccggcggcgggagaggcatcgggcgtcagctcgcccgcgagttcgcggagcgcggcgccagaaagattgttctctggggccggactgagaaatgcctgaaggagacgacrgaggagatccggcagatgggcactgagtgcmattacttcatctgtgatgtgggcaaccgggaggaggtgtaccagacggccaaggccgtccgggagaaggtgggtgacatcaccatcctggtgaacaatgccgccgtggtccatgggaagrgcctaatggacagtgatgatgatgccctcctcaagtcccaacacatcaacaccctgggccagttctggaccaccaaggccttcctgccrcgtatgctggagctgcagaatggccacatcgtgtgcctcaactccgtgctggcactgtctgccatccccggtgccatcgactactgcacatccaaagcgtcagcyttcgccttcatggagagcctgaccctggggctgctggactgtccgggagtcagcgccaccacagtgctgcccttccacaccagcaccgagatgttccagggcatgagagtcaggtttcccaacctctttcccccactgaagccggagacggtggcccggaggacagtggaagctgtgcagctcaaccaggccctcctcctcctcccatggacaatgcatgccctcgttatcttgaaaagcatacttccacaggctgcactcgaggagatccacaaattctcaggaacctacacctgcatgaacactttcaaagggcggacatagagacaggatgaagacatgcttgaggagccacggagtttgggggccacagcacctgggcacacacccgagcacctgtccattggcatgcttctgctgggtgagcaggacagctcctgtccccagcgaagaatccggctgcccctgggccagtcccaggacctttgcacaggactgatgggtrtaactgacccccacagggaggcaggaaaacagccagaagccaccttgacacttttgaacatttccagttctgtagagtttattgtcaattgcttytcaagtctaaccagcctcagcagtgtgcatagaccatttccaggagggtctgtccccagatgctytgcctcccgttccaaaacccactcatcctcagcttgcacaaactggttgaacggcaggaatgaaaaataaagagagatggcttttgtgatttcctttgttcaaatcttccgtgggcagttgggagggagccagtcccaaccataaa

SEQ ID NO: 1038 - DNA, 2880 bp, Homo sapiens
gggaccggaaatgagaatggcgccgctggagatcctttcctgcttttggtttccctggcaggggttgaactgttgcatgttttgtgcaggctcttatcacgcgatggcatccactgtggaaggaggcgacacagctctgctcccagaattccccagggggcccctcgatgcctaccgagcaagagcrtccttcagctggaaggmgctggcgctgttcacggaaggggagggcatgctccgctttaagaaaaccatcttctcagctcttgagaatgaccctcttttcgctcgttcccctggagccgatctgtccttggagaagtatcgcgagctgaacttccttcgatgcaagcggatcttcgagtatgacttcctcagtgtcgaagacatgttcaagagccctctgaaggtccccgccttgattcagtgcctgggcatgtatgactcttctctggctgccaagtacctcctccatagcttggtttttggatcagcagtttacagttctggttctgaaagacatctcacatatattcaaaagatcttcaggatggagatttttggatgttttgctctgaccgaattaagccacggcagtaataccaaggccattcgcacaactgcccactacgatcctgccactgaggaattcatcatacattcccctgatttcgaagctgccaagttttgggttggcaacaygggcaagacagccactcacgcggtggtgtttgctaagctgtgtgtgccaggggaccagtgccatgggctgcatccctttatcgtgcagatccgggacccgaagacccttcttcccatgcctggagtgatggttggcgacataggaaaaaaactcgggcagaacggtctggataatggtttcgccatgttccacaaggtcagagttcctcgccagagccttctgaaccggatgggagacgtcacccccgagggcacctatgtcagcccctttaaggacgtcaggcagcgctttggagcgtccctggggagcctgtcctcgggccgggtctccatcgtgagcctggccatccttaacctaaagctggccgtggccatcgctcttcgcttctcagccactcggcgtcagtttggacccacagaggaggaggaaataccagtgcttgagtatccaatgcagcaatggcgcttgcttccatatctggcagctgtctacgccttagaccatttctccaagtcgctcttcctggacctggtggagctccagcgaggacttgcatcgggagaccgcagcgccagacaggcagagcttggacgtgagatccacgccctggcatcggccagcaagcccctggcctcgtggaccacccagcaaggaattcaggaatgycgggaggcgtgtggaggacacggctatctggccatgaaccggttgggtgtccttagagatgacaacgatcccaactgcacatacgaaggtgacaacaacatcctgctgcagcagacaagcaactatttgctgggtctcctggcacaccaggtccacgatggagcttgcttccgcagtccgctgaagtcagtggactttctggacgcctatcccggcatccttraccagaagtttgaggtctccagtgttgccgactgcttggactctgcagtcgccctggcagcatacaagtggctggtttgctacctgctccgagagacttatcaaaaattaaaccaagagaaaagatcaggaagcagtgactttgaagcaaggaacaaatgccaggtgtcccacggccgtccgttggcgctggccttcgtggagctcacggtggtccagaggttccacgagcacgtgcaccagccttccgtgccgccctcgctgcgggccgtgctggggcggctcagtgctctgtacgccctgtggtccctgagccgccacgcggccctgctctaccgaggaggatacttctcyggtgagcaggcgggagaagtgttggagagcgccgtcctggctttgtgttcccagctgaaagacgatgcagttgccctggtagacgtgatygctcctcctgactttgttctggactcaccgattggcagagccgacggcgagctctacaaaaacctctggggcgctgtcctgcaggaaagcaaggtgttggagcgggcatcctggtggccagagttttctgtgaacaaacctgtcataggaagtctgaaatcgaagctctagtgggactggcacacattcagccaagtctaatgaaacgaagggaactaatcagacgtggacctcaacttctgattccagaacacrccggagattgctgctgctttctgagcccgcacctgtgcgcctaaactgctgattggcctcaactgcccaggcggacgggagggaggcacccggccggctggactaatctgggatcgcggtgatttgcagcgtggaaaagaaatkcagatgatcatgtctacctgatgcgcygtgggttttttgataattagaatttcgcacattcagttttcagggttcagctcctttctctaaagtaaacagcccattgtcagggatcttctggtcagacaacctgtgattcatctagattttttaccgagctccacttcattgagaagtcaatgatgccagtctggttctttgtcaactctccctcggctttgtcacataattgaattatgtcataaccttattaatttgcacatagatcatctgaatgtcgtggtttaagacttaaggaggaacatctgtttgattactttcttttgtggaactggaaatttccatcgaggaaatgtttttttaaaaagtctaatgatttgaatgggcaattcagtctccaaccgcccccctccccctgccrccagttatatacaaatcactttatt

SEQ ID NO: 1039 - DNA, 2812 bp, Homo sapiens
gggaccggaaatgagaatggcgccgctggagatcctttcctgcttttggtttccctggcaggggttgaactgttgcatgttttgtgcaggctcttatcacgcgatggcatccactgtggaaggaggcgacacagctctgctcccagaattccccagggggcccctcgatgcctaccgagcaagagcrtccttcagctggaaggmgctggcgctgttcacggaaggggagggcatgctccgctttaagaaaaccatcttctcagctcttgagaatgaccctcttttcgctcgttcccctggagccgatctgtccttggagaagtatcgcgagctgaacttccttcgatgcaagcggatcttcgagtatgacttcctcagtgtcgaagacatgttcaagagccctctgaaggtccccgccttgattcagtgcctgggcatgtatgactcttctctggctgccaagtacctcctccatagcttggtttttggatcagcagtttacagttctggttctgaaagacatctcacatatattcaaaagatcttcaggatggagatttttggatgttttgctctgaccgaattaagccacggcagtaataccaaggccattcgcacaactgcccactacgatcctgccactgaggaattcatcatacattcccctgatttcgaagctgccaagttttgggttggcaacaygggcaagacagccactcacgcggtggtgtttgctaagctgtgtgtgccaggggaccagtgccatgggctgcatccctttatcgtgcagatccgggacccgaagacccttcttcccatgcctggagtgatggttggcgacataggaaaaaaactcgggcagaacggtctggataatggtttcgccatgttccacaaggtcagagttcctcgccagagccttctgaaccggatgggagacgtcacccccgagggcacctatgtcagcccctttaaggacgtcaggcagcgctttggagcgtccctggggagcctgtcctcgggccgggtctccatcgtgagcctggccatccttaacctaaagctggccgtggccatcgctcttcgcttctcagccactcggcgtcagtttggacccacagaggaggaggaaataccagtgcttgagtatccaatgcagcaatggcgcttgcttccatatctggcagctgtctacgccttagaccatttctccaagtcgctcttcctggacctggtggagctccagcgaggacttgcatcgggagaccgcagcgccagacaggcagagcttggacgtgagatccacgccctggcatcggccagcaagcccctggcctcgtggaccacccagcaaggaattcaggaatgycgggaggcgtgtggaggacacggctatctggccatgaaccggttgggtgtccttagagatgacaacgatcccaactgcacatacgaaggtgacaacaacatcctgctgcagcagacaagcaactatttgctgggtctcctggcacaccaggtccacgatggagcttgcttccgcagtccgctgaagtcagtggactttctggacgcctatcccggcatccttraccagaagtttgaggtctccagtgttgccgactgcttggactctgcagtcgccctggcagcatacaagtggctggtttgctacctgctccgagagacttatcaaaaattaaaccaagagaaaagatcaggaagcagtgactttgaagcaaggaacaaatgccaggtgtcccacggccgtccgttggcgctggccttcgtggagctcacggtggtccagaggttccacgagcacgtgcaccagccttccgtgccgccctcgctgcgggccgtgctggggcggctcagtgctctgtacgccctgtggtccctgagccgccacgcggccctgctctaccgagctgaaagacgatgcagttgccctggtagacgtgatygctcctcctgactttgttctggactcaccgattggcagagccgacggcgagctctacaaaaacctctggggcgctgtcctgcaggaaagcaaggtgttggagcgggcatcctggtggccagagttttctgtgaacaaacctgtcataggaagtctgaaatcgaagctctagtgggactggcacacattcagccaagtctaatgaaacgaagggaactaatcagacgtggacctcaacttctgattccagaacacrccggagattgctgctgctttctgagcccgcacctgtgcgcctaaactgctgattggcctcaactgcccaggcggacgggagggaggcacccggccggctggactaatctgggatcgcggtgatttgcagcgtggaaaagaaatkcagatgatcatgtctacctgatgcgcygtgggttttttgataattagaatttcgcacattcagttttcagggttcagctcctttctctaaagtaaacagcccattgtcagggatcttctggtcagacaacctgtgattcatctagattttttaccgagctccacttcattgagaagtcaatgatgccagtctggttctttgtcaactctccctcggctttgtcacataattgaattatgtcataaccttattaatttgcacatagatcatctgaatgtcgtggtttaagacttaaggaggaacatctgtttgattactttcttttgtggaactggaaatttccatcgaggaaatgtttttttaaaaagtctaatgatttgaatgggcaattcagtctccaaccgcccccctccccctgccrccagttatatacaaatcactttatt

SEQ ID NO: 1040 - DNA, 2872 bp, Homo sapiens
accggaaatgagaatggcgccgctggagatcctttcctgcttttggtttccctggcaggggttgaactgtggagtgtgtgggctcttatcacgcgatggcatccactgtggaaggaggcgacacagctctgctcccagaattccccagggggcccctcgatgcctaccgagcaagagcrtccttcagctggaaggmgctggcgctgttcacggaaggggagggcatgctccgctttaagaaaaccatcttctcagctcttgagaatgaccctcttttcgctcgttcccctggagccgatctgtccttggagaagtatcgcgagctgaacttccttcgatgcaagcggatcttcgagtatgacttcctcagtgtcgaagacatgttcaagagccctctgaaggtccccgccttgattcagtgcctgggcatgtatgactcttctctggctgccaagtacctcctccatagcttggtttttggatcagcagtttacagttctggttctgaaagacatctcacatatattcaaaagatcttcaggatggagatttttggatgttttgctctgaccgaattaagccacggcagtaataccaaggccattcgcacaactgcccactacgatcctgccactgaggaattcatcatacattcccctgatttcgaagctgccaagttttgggttggcaacaygggcaagacagccactcacgcggtggtgtttgctaagctgtgtgtgccaggggaccagtgccatgggctgcatccctttatcgtgcagatccgggacccgaagacccttcttcccatgcctggagtgatggttggcgacataggaaaaaaactcgggcagaacggtctggataatggtttcgccatgttccacaaggtcagagttcctcgccagagccttctgaaccggatgggagacgtcacccccgagggcacctatgtcagcccctttaaggacgtcaggcagcgctttggagcgtccctggggagcctgtcctcgggccgggtctccatcgtgagcctggccatccttaacctaaagctggccgtggccatcgctcttcgcttctcagccactcggcgtcagtttggacccacagaggaggaggaaataccagtgcttgagtatccaatgcagcaatggcgcttgcttccatatctggcagctgtctacgccttagaccatttctccaagtcgctcttcctggacctggtggagctccagcgaggacttgcatcgggagaccgcagcgccagacaggcagagcttggacgtgagatccacgccctggcatcggccagcaagcccctggcctcgtggaccacccagcaaggaattcaggaatgycgggaggcgtgtggaggacacggctatctggccatgaaccggttgggtgtccttagagatgacaacgatcccaactgcacatacgaaggtgacaacaacatcctgctgcagcagacaagcaactatttgctgggtctcctggcacaccaggtccacgatggagcttgcttccgcagtccgctgaagtcagtggactttctggacgcctatcccggcatccttraccagaagtttgaggtctccagtgttgccgactgcttggactctgcagtcgccctggcagcatacaagtggctggtttgctacctgctccgagagacttatcaaaaattaaaccaagagaaaagatcaggaagcagtgactttgaagcaaggaacaaatgccaggtgtcccacggccgtccgttggcgctggccttcgtggagctcacggtggtccagaggttccacgagcacgtgcaccagccttccgtgccgccctcgctgcgggccgtgctggggcggctcagtgctctgtacgccctgtggtccctgagccgccacgcggccctgctctaccgaggaggatacttctcyggtgagcaggcgggagaagtgttggagagcgccgtcctggctttgtgttcccagctgaaagacgatgcagttgccctggtagacgtgatygctcctcctgactttgttctggactcaccgattggcagagccgacggcgagctctacaaaaacctctggggcgctgtcctgcaggaaagcaaggtgttggagcgggcatcctggtggccagagttttctgtgaacaaacctgtcataggaagtctgaaatcgaagctctagtgggactggcacacattcagccaagtctaatgaaacgaagggaactaatcagacgtggacctcaacttctgattccagaacacrccggagattgctgctgctttctgagcccgcacctgtgcgcctaaactgctgattggcctcaactgcccaggcggacgggagggaggcacccggccggctggactaatctgggatcgcggtgatttgcagcgtggaaaagaaatkcagatgatcatgtctacctgatgcgcygtgggttttttgataattagaatttcgcacattcagttttcagggttcagctcctttctctaaagtaaacagcccattgtcagggatcttctggtcagacaacctgtgattcatctagattttttaccgagctccacttcattgagaagtcaatgatgccagtctggttctttgtcaactctccctcggctttgtcacataattgaattatgtcataaccttattaatttgcacatagatcatctgaatgtcgtggtttaagacttaaggaggaacatctgtttgattactttcttttgtggaactggaaatttccatcgaggaaatgtttttttaaaaagtctaatgatttgaatgggcaattcagtctccaaccgcccccctccccctgccrccagttatatacaaatcactttatt

SEQ ID NO: 1041 - DNA, 845 bp, Homo sapiens
cttaggttggatgggagagcatgtctgtgtgtctcagagccaccaaggaggagcaggggagcgacggccggggcagaagttgagaccacccagcagaggagctaggccagtccatctgcatttgtcacccaagaactcttaccatgaagaccctcctactgttggcagtgatcatgatctttggcctactgcaggcccatgggaatttggtgaatttccacagaatgatcaagttsacsacaggaaaggaagccgcactcagttatggcttctayggctgccactgtggcgtgggtggcagaggatcccccaaggatgcaacggatcgctgctgtgtcactcatgactgttgctacaaacgtctggagaaacgtggatgtggcaccaaatttctgagctacaagtttagcaactcggggagcagaatcacctgtgcaaaacaggactcctgcagaagtcaactgtgtgagtgtgataaggctgctgccacctgttttgctagaaacaagacgacctacaataaaaagtaccagtactattccaataaacactgyagagggagcacccctcgttgctgagtcccctcttccctggaaaccttccacccagtgctgaatttccctctctcataccctccctccctaccctaaccaakttccttggccatgcagaaagcatccctcacccatcctagaggccaggcaggagcccttctatacccacccagaatgagacatccagcagatttccagccttctactgctctcctccacctcaactccgtgcttaaccaaagaagctgtactcyggggggtctcttctgaataaagcaattagcaaatcaw

SEQ ID NO: 1042 - DNA, 913 bp, Homo sapiens
agatatttactttatgaattaaagctggagtcagtgtcagcccgaaggctgaaggaaaaagagcaacagatccagggagcattcacctgccctgtctccaaacagagccaccaaggaggagcaggggagcgacggccggggcagaagttgagaccacccagcagaggagctaggccagtccatctgcatttgtcacccaagaactcttaccatgaagaccctcctactgttggcagtgatcatgatctttggcctactgcaggcccatgggaatttggtgaatttccacagaatgatcaagttsacsacaggaaaggaagccgcactcagttatggcttctayggctgccactgtggcgtgggtggcagaggatcccccaaggatgcaacggatcgctgctgtgtcactcatgactgttgctacaaacgtctggagaaacgtggatgtggcaccaaatttctgagctacaagtttagcaactcggggagcagaatcacctgtgcaaaacaggactcctgcagaagtcaactgtgtgagtgtgataaggctgctgccacctgttttgctagaaacaagacgacctacaataaaaagtaccagtactattccaataaacactgyagagggagcacccctcgttgctgagtcccctcttccctggaaaccttccacccagtgctgaatttccctctctcataccctccctccctaccctaaccaakttccttggccatgcagaaagcatccctcacccatcctagaggccaggcaggagcccttctatacccacccagaatgagacatccagcagatttccagccttctactgctctcctccacctcaactccgtgcttaaccaaagaagctgtactcyggggggtctcttctgaataaagcaattagcaaatcaw

SEQ ID NO: 1043 - DNA, 975 bp, Homo sapiens
tgaaggaaaaagagcaacagatccagggagcattcacctgccctgtctccaaacagccttgtgcctcacctacccccaacctcccagagggagcagctatttaaggggagcaggwgtgcagaacaaacaagacggcctggggatacaactctggagtcctctgagagagccaccaaggaggagcaggggagcgacggccggggcagaagttgagaccacccagcagaggagctaggccagtccatctgcatttgtcacccaagaactcttaccatgaagaccctcctactgttggcagtgatcatgatctttggcctactgcaggcccatgggaatttggtgaatttccacagaatgatcaagttsacsacaggaaaggaagccgcactcagttatggcttctayggctgccactgtggcgtgggtggcagaggatcccccaaggatgcaacggatcgctgctgtgtcactcatgactgttgctacaaacgtctggagaaacgtggatgtggcaccaaatttctgagctacaagtttagcaactcggggagcagaatcacctgtgcaaaacaggactcctgcagaagtcaactgtgtgagtgtgataaggctgctgccacctgttttgctagaaacaagacgacctacaataaaaagtaccagtactattccaataaacactgyagagggagcacccctcgttgctgagtcccctcttccctggaaaccttccacccagtgctgaatttccctctctcataccctccctccctaccctaaccaakttccttggccatgcagaaagcatccctcacccatcctagaggccaggcaggagcccttctatacccacccagaatgagacatccagcagatttccagccttctactgctctcctccacctcaactccgtgcttaaccaaagaagctgtactcyggggggtctcttctgaataaagcaattagcaaatcaw

SEQ ID NO: 1044 - DNA, 684 bp, Homo sapiens
agatatttactttatgaattaaagctggagtcagtgtcagcccgaaggctgaaggaaaaagagcaacagatccagggagcattcacctgccctgtctccaaacagagccaccaaggaggagcaggggagcgacggccggggcagaagttgagaccacccagcagaggagctaggccagtccatctgcatttgtcacccaagaactcttaccatgaagaccctcctactgttggcagtgatcatgatctttggcctactgcaggcccatgggaatttggtgaatttccacagaatgatcaagttsacsacaggaaaggaagccgcactcagttatggcttctayggctgccactgtggcgtgggtggcagaggatcccccaaggatgcaacggatcgctgctgtgtcactcatgactgttgctacaaacgtctggagaaacgtggatgtggcaccaaatttctgagctacaagtttagcaactcggggagcagaatcacctgtggtaagagactcctgcagaagtcaactgtgtgagtgtgataaggctgctgccacctgttttgctagaaacaagacgacctacaataaaaatcccctcttccctggaaaccttccacccagtgctgaatttccctctctcataccctccctccctaccctaaccaakttccttggccatgcag

SEQ ID NO: 1045 - DNA, 1297 bp, Homo sapiens
caggccaggctgtgagcgaaggttctgggcggggctggactgttctaagtgagttcgggtgggggagcttcacgaggggaggctgctctgtgaaggaaccgcctttctctccgcgtgtctcacccttttctccccatatctgtttggacatgagctgagggcacggtcgcgggcggtcagccctgttcgcagctacggcgaggaggggcgcgattgytccttgttgccgctccgcttagtggccgcgtccattccgcgcggtgtcccgattttaggggtagggagaagtgtcagcttcaggcatcgcgaggcgtggcggccccatggccccgctgggaggcgccccgcggctggtactgctgttcagcggcaagaggaaatccgggaaggacttcgtgaccgaggcgctgcagagcagacttggagctgatgtctgtgctgtcctccggctctctggtccactcaaggarcagtatgctcaggagcatggcttgaacttccagagactcctggacaccagcacctacaaggaggcctttcggaaggacatgatccgctggggagaggagaaacgccaggctgacccaggcttcttttgcaggaagattgtggagggcatctcccagcccatctggctggtgagtgacacacggagagtgtctgacatccagtggtttcgggaggcctatggggccgtgacgcagacggtccgcgttgtagcgttggagcagagccgacagcagcggggctgggtgttcacgccaggggtggacgatgctgagtcagaatgtggcctggacaacttcggggactttgactgggtcatcgagaaccatggagttgaacagcgcctggaggagcagttggagaacctgatagaatttatccgctccagactttagtcactaggttctaggagtgagctggggcctgctgaggtgggggtggggctgactctgcaaaatgggggtgtcccccgatcctggccgaggtgaggaacagacagggggggtctagattctgagggggttggtggatattgggcaaggcaggaaacctctggagacctcattttctccatggggaagacagccatgctyttcaggaggagactccaagggcaaaggagggtgtcttggctgtgcttgaaggcgaaaccctgccatatccccagtgccagtcccctcagcctgtggtggccttgcatcctgactggatgttytcagccccttgttytgggcaaraacccagagctccccagtgtggatactaataaacctcttggagcacactctca

SEQ ID NO: 1046 - DNA, 1022 bp, Homo sapiens
caggccaggctgtgagcgaaggttctgggcggggctggactgttctaagtgagttcgggtgggggagcttcacgaggggaggctgctctgtgaaggaaccgcctttctctccgcgtgtctcacccttttctccccatatctgtttggacatgagctgagggcacggtcgcgggcggtcagccctgttcgcagctacggcgaggaggggcgcgattgytccttgttgccgctccgcttagtggccgcgtccattccgcgcggtgtcccgattttaggggtagggagaagtgtcagcttcaggcatcgcgaggcgtggcggccccatggccccgctgggaggcgccccgcggctggtactgctgttcagcggcaagaggaaatccgggaaggacttcgtgaccgaggcgctgcagagcagacttggagctgatgtctgtgctgtcctccggctctctggtccactcaaggarcagtatgctcaggagcatggcttgaacttccagagactcctggacaccagcacctacaaggaggcctttcggaaggacatgatccgctggggagaggagaaacgccaggctgacccaggcttcttttgcaggaagattgtggagggcatctcccagcccatctggctggtgagtgacacacggagagtgtctgacatccagtggtttcgggaggcctatggggccgtgacgcagacggtccgcgttgtagcgttggagcagagccgacagcagcggggctgggtgttcacgccaggggtggacgatgctgagtcagaatgtggcctggacaacttcggggactttgactgggtcatcgagaaccatggagttgaacagcgcctggaggagcagttggagaacctgatagaatttatccgctccagactttagtcactaggttctaggagtgagctggggcctgagggggttggtggatattgggcaaggcaggaaacctctggagacctcattttctccatggggaagacagccatgctyttcaggaggaga

SEQ ID NO: 1047 - DNA, 1340 bp, Homo sapiens
agcgccgtgcgccccgccccccatcgggggcaaccattgttccgccggtcgcgccggagctgggttgctcctgctcccgtctccaagtcctggtacctccttcargctgggagagggctctagtccctggttctgaacactctggggttctcgggtgcaggccgccatgagcaaacggaaggcgccgcaggagactctcaacgggggaatcaccgacatgctcacagaactcgcaaactttgagaagaacgtgagccaagctatccacaagtacaatgcttacagaaaagcagcatctgttatagcaaaatacccacacaaaataaagagtggagctgaagctaagaaattgcctggagtaggaacaaaaattgctgaaaagattgatgagtttttagcaactggaaaattacgtaaactggaaaagattcggcaggatgatacgagttcatccatcaatttcctgactcgagttagtggcattggtccatctgctgcaaggaagtttgtagatgaaggaattaaaacactagaagatctcagaaaaaatgaagataaattgaaccatcatcagcraattgggctgaaatattttggggactttgaaaaaagaattcctcgtgaagagatgttacaaatgcaagatattgtactaaatgaagttaaaaaagtggattctgaatacattgctacagtctgtggcagtttcagaagaggtgcagagtccagtggtgacatggatgttctcctgacccatcccagcttcacttcagaatcaaccaaacagccaaaactgttacatcaggttgtggagcagttacaaaaggttcattttatcacagataccctgtcaaagggtgagacaaagttcatgggtgtttgccagcttcccagtaaaaatgatgaaaaagaatatccacacagaagaattgatatcaggttgatacccaaagatcagtattactgtggtgttctctatttcactgggagtgatattttcaataagaatatgagggctcatgccctagaaaagggtttcacaatcaatgagtacaccatccgtcccttgggagtcactggagttgcaggagaacccctgccagtggatagtgaaaaagacatctttgattacatccagtggaaataccgggaacccaaggaccggagcgaatgaggcctgtatcctccctggcagacacaacccaataggagtcttaatttatttcttaacctttgctatgtaagggtctttggtgtttttaaatgattgtttcttcttcatgcttttgcttgcaatgtagtcaataaaacctcatgtactattattggatgatgatgat

SEQ ID NO: 1048 - DNA, 3887 bp, Homo sapiens
cctgccgtggagcggaacggtagcgccaggggccttccggaaagaggagcgagagcccggcgatggcggctgcgccggccttgaagcactggcgcaccacgctggagcgggtggagaagttcgtgtcgccgctctactttaccgactgtaacctccgcggcaggctttttggggccagctgccctgtggctgtgctctccagcttcctgacgccggagagacttccctaccaggaggcagtccagcgggacttccgccccgcgcaggtcggcgacagcttcggacccacatggtggacctgctggttccgggtggagctgaccatcccagaggcatgggtgggccaggaagttcacctttgctgggaaagtgatggagaaggtctggtgtggcgtgatggagaacctgtccagggtttaaccaaagagggtgagaagaccagctatgtcctgactgacaggctgggggaaagagacccccgaagcctcactctctatgtggaagtagcctgcaatgggctcctgggggccgggaagggaagcatgattgcagcccctgaccctgagaagatgttccagctgagccgggctgagctagctgtgttccaccgggatgtccacatgctcctggtggatctggagctgctgctgggcatagccaagggcctcgggaaggacaaccagcgcagcttccaggccctgtacacagccaatcagatggtgaacgtgtgtgaccctgcccagcccgagaccttcccagtggcccaggccctggcctccaggttctttggccaacatgggggtgaaagccaacacaccattcatgccacagggcactgccacattgatacagcctggctttggcccttcaaagagactgtgaggaaatgtgcccggagctgggtgaccgccctgcagctcatggagcggaaccctgagttcatctttgcctgctcccaggcgcagcagctggaatgggtgaagagccgctaccctggcctgtactcccgcatccaggagtttgcgtgccgtgggcagtttgtgcctgtggggggcacctgggtggagatggatgggaacctgcccagtggagaggccatggtgaggcagtttttgcagggccagaacttctttctgcaggagtttgggaagatgtgctctgagttctggctgccggacacctttggctactcagcacagctcccccagatcatgcacggctgtggcatcaggcgctttctcacccagaaattgagctggaatttggtgaactccttcccacaccatacatttttctgggagggcctggatggctcccgtgtactggtccacttcccacctggcgactcctatgggatgcagggcagcgtggaggaggtgctgaagaccgtggccaacaaccgggacaaggggcgggccaaccacagtgccttcctctttggctttggggatgggggtggtggccccacccagaccatgctggaccgcctgaagcgcctgagcaatacggatgggctgcccagggtgcagctatcttctccaagacagctcttctcagcactggagagtgactcagagcagctgtgcacgtgggttggggagctcttcttggagctgcacaatggcacatacaccacccatgcccagatcaagaaggggaaccgggaatgtgagcggatcctgcacgacgtggagctgctcagtagcctggccctggcccgcagtgcccagttcctatacccagcagcccagctgcagcacctctggaggctccttcttctgaaccagttccatgatgtggtgactggaagctgcatccagatggtggcagaggaagccatgtgccattatgaagacatccgttcccatggcaatacactgctcagcgctgcagccgcagccctgtgtgctggggagccaggtcctgagggcctcctcatcgtcaacacactgccctggaagcggatcgaagtgatggccctgcccaaaccgggcggggcccacagcctagccctggtgacagtgcccagcatgggctatgctcctgttcctccccccacctcactgcagcccctgctgccccagcagcctgtgttcgtagtgcaagagactgatggctccgtgactctggacaatggcatcatccgagtgaagctggacccaactggtcgcctgacgtccttggtcctggtggcctctggcagggaggccattgctgagggcgccgtggggaaccagtttgtgctatttgatgatgtccccttgtactgggatgcatgggacgtcatggactaccacctggagacacggaagcctgtgctgggccaggcagggaccctggcagtgggcaccgagggcggcctgcggggcagcgcctggttcttgctacagatcagccccaacagtcggcttagccaggaggttgtgctggaygttggctgcccctatgtccgcttccacaccgaggtacactggcatgaggcccacaagttcctgaaggtggagttccctgctcrcgtgcggagttcccaggccacctatgagatccagtttgggcacctgcagcgacctacccactacaatacctcttgggactgggctcgatttgaggtgtgggcccatcgctggatggatctgtcagaacacggctttgggctggccctgctcaacgactgcaagtatggcgcgtcagtgcgaggcagcatcctcagcctctcgctcttgcgggcgcctaaagccccggacgctactgctgacacggggcgccacgagttcacctatgcactgatgccgcacaagggctctttccaggatgctggcgttatccaagctgcctacagcctaaacttccccctgttggctctgccagcccccagcccagcgcccgccacctcctggagtgcgttttccrtgtcttcacccgcggtcgtattggagaccrtcaagcaggcggagagcagcccccagcgccgctcgctggtcctgaggctgtatgaggcccacggcagccacgtggactgctggctgcacttgtcgctgccggttcaggaggccatcctctgcgatctcttggagcgaccagaccctgctggccacttgacccttcgggacaaccgcctgaagctcaccttttytcccttccaagtgctgtccctgttgctcgtgcttcagcctccgccacactgagtccctggggctggggttttgtttgtaraaggctytggggactcctaatttytgcttccccagcctaaagcagggatcagtcttttcttgtggaataaatccttggatcgggaaccctgctgctcagtccccttagggcccatcctcacgcttggggtgggggtgggaagtctggggtgggatggcttcccaggtatttggtgggtaggggcaagatcctaaggtacctgtgcgtgcagggtctgggttgcagcccccacaggagagactggggacctcgagscaccaaaagccagtgaagagaccatgagttgagaagcccctcccctgtgccagcaggtaaagggcctgggcctggggctggggaggggccgaagggtgggttttgcctggctcctgccaggatgagggggcagccctggaccctggagaatctggactggaggagctctggctcctgggctgcctggggccagggtctttgtaccacctctgaggggctgtccttgcagaggcaaactgtcctctgatagagtcagagccttgaggactgggatgggggctcagtttgccttgtgaggagctgggccttctgtcaccaggaccggacagcaggcccttcctacctggccatctcagaccaagaggtgccaagaagttcaaatgtatcagtttattaaaaatgcagcatttttcacatga

SEQ ID NO: 1049 - DNA, 3890 bp, Homo sapiens
cctgccgtggagcggaacggtagcgccaggggccttccggaaagaggagcgagagcccggcgatggcggctgcgccggccttgaagcactggcgcaccacgctggagcgggtggagaagttcgtgtcgccgctctactttaccgactgtaacctccgcggcaggctttttggggccagctgccctgtggctgtgctctccagcttcctgacgccggagagacttccctaccaggaggcagtccagcgggacttccgccccgcgcaggtcggcgacagcttcggacccacatggtggacctgctggttccgggtggagctgaccatcccagaggcatgggtgggccaggaagttcacctttgctgggaaagtgatggagaaggtctggtgtggcgtgatggagaacctgtccagggtttaaccaaagagggtgagaagaccagctatgtcctgactgacaggctgggggaaagagacccccgaagcctcactctctatgtggaagtagcctgcaatgggctcctgggggccgggaagggaagcatgattgcagcccctgaccctgagaagatgttccagctgagccgggctgagctagctgtgttccaccgggatgtccacatgctcctggtggatctggagctgctgctgggcatagccaagggcctcgggaaggacaaccagcgcagcttccaggccctgtacacagccaatcagatggtgaacgtgtgtgaccctgcccagcccgagaccttcccagtggcccaggccctggcctccaggttctttggccaacatgggggtgaaagccaacacaccattcatgccacagggcactgccacattgatacagcctggctttggcccttcaaagagactgtgaggaaatgtgcccggagctgggtgaccgccctgcagctcatggagcggaaccctgagttcatctttgcctgctcccaggcgcagcagctggaatgggtgaagagccgctaccctggcctgtactcccgcatccaggagtttgcgtgccgtgggcagtttgtgcctgtggggggcacctgggtggagatggatgggaacctgcccagtggagaggccatggtgaggcagtttttgcagggccagaacttctttctgcaggagtttgggaagatgtgctctgagttctggctgccggacacctttggctactcagcacagctcccccagatcatgcacggctgtggcatcaggcgctttctcacccagaaattgagctggaatttggtgaactccttcccacaccatacatttttctgggagggcctggatggctcccgtgtactggtccacttcccacctggcgactcctatgggatgcagggcagcgtggaggaggtgctgaagaccgtggccaacaaccgggacaaggggcgggccaaccacagtgccttcctctttggctttggggatgggggtggtggccccacccagaccatgctggaccgcctgaagcgcctgagcaatacggatgggctgcccagggtgcagctatcttctccaagacagctcttctcagcactggagagtgactcagagcagctgtgcacgtgggttggggagctcttcttggagctgcacaatggcacatacaccacccatgcccagatcaagaaggggaaccgggaatgtgagcggatcctgcacgacgtggagctgctcagtagcctggccctggcccgcagtgcccagttcctatacccagcagcccagctgcagcacctctggaggctccttcttctgaaccagttccatgatgtggtgactggaagctgcatccagatggtggcagaggaagccatgtgccattatgaagacatccgttcccatggcaatacactgctcagcgctgcagccgcagccctgtgtgctggggagccaggtcctgagggcctcctcatcgtcaacacactgccctggaagcggatcgaagtgatggccctgcccaaaccgggcggggcccacagcctagccctggtgacagtgcccagcatgggctatgctcctgttcctccccccacctcactgcagcccctgctgccccagcagcctgtgttcgtagtgcaagagactgatggctccgtgactctggacaatggcatcatccgagtgaagctggacccaactggtcgcctgacgtccttggtcctggtggcctctggcagggaggccattgctgagggcgccgtggggaaccagtttgtgctatttgatgatgtccccttgtactgggatgcatgggacgtcatggactaccacctggagacacggaagcctgtgctgggccaggcagggaccctggcagtgggcaccgagggcggcctgcggggcagcgcctggttcttgctacagatcagccccaacagtcggcttagccaggaggttgtgctggaygttggctgcccctatgtccgcttccacaccgaggtacactggcatgaggcccacaagttcctgaaggtggagttccctgctcrcgtgcggagttcccaggccacctatgagatccagtttgggcacctgcagcgacctacccactacaatacctcttgggactgggctcgatttgaggtgtgggcccatcgctggatggatctgtcagaacacggctttgggctggccctgctcaacgactgcaagtatggcgcgtcagtgcgaggcagcatcctcagcctctcgctcttgcgggcgcctaaagccccggacgctactgctgacacggggcgccacgagttcacctatgcactgatgccgcacaagggctctttccaggatgctggcgttatccaagctgcctacagcctaaacttccccctgttggctctgccagcccccagcccagcgcccgccacctcctggagtgcgttttccrtgtcttcacccgcggtcgtattggagaccrtcaagcaggcaaggggtgggaccccccagcgccgctcgctggtcctgaggctgtatgaggcccacggcagccacgtggactgctggctgcacttgtcgctgccggttcaggaggccatcctctgcgatctcttggagcgaccagaccctgctggccacttgacccttcgggacaaccgcctgaagctcaccttttytcccttccaagtgctgtccctgttgctcgtgcttcagcctccgccacactgagtccctggggctggggttttgtttgtaraaggctytggggactcctaatttytgcttccccagcctaaagcagggatcagtcttttcttgtggaataaatccttggatcgggaaccctgctgctcagtccccttagggcccatcctcacgcttggggtgggggtgggaagtctggggtgggatggcttcccaggtatttggtgggtaggggcaagatcctaaggtacctgtgcgtgcagggtctgggttgcagcccccacaggagagactggggacctcgagscaccaaaagccagtgaagagaccatgagttgagaagcccctcccctgtgccagcaggtaaagggcctgggcctggggctggggaggggccgaagggtgggttttgcctggctcctgccaggatgagggggcagccctggaccctggagaatctggactggaggagctctggctcctgggctgcctggggccagggtctttgtaccacctctgaggggctgtccttgcagaggcaaactgtcctctgatagagtcagagccttgaggactgggatgggggctcagtttgccttgtgaggagctgggccttctgtcaccaggaccggacagcaggcccttcctacctggccatctcagaccaagaggtgccaagaagttcaaatgtatcagtttattaaaaatgcagcatttttcacatga

SEQ ID NO: 1050 - DNA, 2779 bp, Homo sapiens
tgttaattctattcatttattatggcagaagtattttaaagtaaattagacaaatcatgacatttcatacccaatactttaacatgcatctctaaaaaccaatttcttacaaagccacataattttattacgcctaataaggagacgtagcagggtagtgtgaaggaggggaaatcgtggcgatgggttaggtatacacttagaatgaagtgcagactccacacggaggccctcccgaggcccaaccggacctgacctgggtttgcttctctgtcttcacctgccagcactaacccgcagctatactccagccacacaggacttctttgagttctttcagtgaccaatctctttctcgcctcagggcctttgtactggcggttccttccgccggacacgtcgggtttcctcgtttttgcggactggcgctttctgatttcagagactctccgcaacagaaccatctcaagtgggtctacctcctcgcctttttttgttgttgttgttgcttggctgcgcttctgacagggcaggccgtgatgatgtttgtttatgagttaggtctgactgttcgttggtgcttaagatccccaccgggtccctagggcctgtgcgtaccgcgcacctgtgcacgtcctgcgcgcagctgcaggcgactccgctctggctcgtcgctgctgtttcctgctgggggtgccgaccctgtcccacgctagctgggtgacttcccccaaccgcagagacagcggcgacccggggcctcagacctgcccccgcatctcgccggcgccaggcagtgggaagtcaggttcttccgccacctcccagccaggactctgccaccctccctcaggatgcctgagggccccgagctgcacctggccagccagtttgtgaatgaggcctgcagggcgctggtgttcggcggctgcgtggagaagtcctctgtcagccgcaaccctgaggtgccctttgagagcagtgcctaccgcatctcagcttcagcccgcggcaaggagctgcgcctgatactgagccctctgcctggggcccagccccaacaggagccactggccctggtcttccgcttcggcatgtccggctcttttcagctggtgccccgcgaggagctgccacgccatgcccacctgcgcttttacacggccccgcctggcccccggctcgccctatgtttcgtggacatccgccggttcggccgctgggaccttgggggaaagtggcagccgggccgcgggccctgtgtcttgcaggagtaccagcagttcagggagaatgtgctacgaaacctagcggataaggcctttgaccggcccatctgcgaggccctcctggaccagaggttcttcaatggcattggcaactatctgcgggcagagatcctgtaccggctgaagatccccccctttgagaaggcccgctcggtcctggaggccctgcagcagcacaggccgagcccggagctgaccctgagccagaagataaggaccaagctgcagaatccagacctgctggagctatgtcactcagtgcccaaggaagtggtccagttggggggcaaaggctacgggtcagagagcggggaggaggactttgctgcctttcgagcctggctgcgctgctatggcatgccaggcatgagctccctgcaggaccggcatggccgtaccatctggttccagggggatcctggaccgttggcacccaaagggcgcaagtcccgcaaaaagaaatccaaggccacacagctgagtcctgaggacagagtggaggacgctttgcctccaagcaaggccccttccaggacacgaagggcaaagagagaccttcctaagaggactgcaacccagcggcctgaggggaccagcctccagcaggacccagaagctcccacagtgcccaagaaggggaggaggaaggggcgacaggcagcctctggccactgcagaccccggaaggtcaaggctgacatcccatccttggaaccagaggggacctcagcctcttagcaggaggctctccttgcttgcactcaccctttcttaktgtcttgccctgcatctgggggtctgaatttttgggagcaggcaatatctgaaggtgcaaacaggccctacggctgttccctgcacaactctcatggttttaattgtaccccatcttccacatctttaaagctcatgtgaaaaatgctgcatttttaataaactgatacatttgaacttcttggcacctcttggtctgagatggccaggtaggaagggcctgctgtccggtcctggtgacagaaggcccagctcctcacaaggcaaactgagcccccatcccagtcctcaaggctctgactctatcagaggacagtttgcctctgcaaggacagcccctcagaggtggtacaaagaccctggccccaggcagcccaggagccagagctcctccagtccagattctccagggtccagggctgccccctcatcctggcaggagccaggcaaaacccacccttcggcccctccccagccccaggcccaggccctttacctgctggcacaggggaggggcttctcaactcatggtctcttcactggcttttggtgsctcgaggtccccagtctctcctgtgggggctgcaacccagaccctgcacgcacaggtaccttaggatcttgcccctacccaccaaatacctgggaagccatcccaccccagacttcccacccccaccccaagcgtgaggatgggccctaaggggactgagcag

SEQ ID NO: 1051 - DNA, 2309 bp, Homo sapiens
ctcccagcggctcccagcgcgctcccgggcaccgcccgttctggcgttaaccctttagtggctgcagtggcgacgagcggaacggagtgcgggttcccggggagggggcgtgcaggatcgggttgtggggggtgcgctgtagggctaaggagaagatgagctttggggggccctgaggaggaggggagtcaggattaaccgaggacagggtcgcagcgggggcatggggaggacgggcccgagagcgccgctcctccccaaaactaggatttggagcctcacgttctcccgcaaaacgagccctgtgggtgccaggccaggggcggctcccaggtgtggagggggcaaggtacgggcgtctgccgtcgctaagtgcccccttccacttaaggcacaccttcgcctccgattccgaaccgcccggggacagaggcaagtggcaaagcagggagggcggaggactctgccaccctccctcaggatgcctgagggccccgagctgcacctggccagccagtttgtgaatgaggcctgcagggcgctggtgttcggcggctgcgtggagaagtcctctgtcagccgcaaccctgaggtgccctttgagagcagtgcctaccgcatctcagcttcagcccgcggcaaggagctgcgcctgatactgagccctctgcctggggcccagccccaacaggagccactggccctggtcttccgcttcggcatgtccggctcttttcagctggtgccccgcgaggagctgccacgccatgcccacctgcgcttttacacggccccgcctggcccccggctcgccctatgtttcgtggacatccgccggttcggccgctgggaccttgggggaaagtggcagccgggccgcgggccctgtgtcttgcaggagtaccagcagttcaggctgaagatccccccctttgagaaggcccgctcggtcctggaggccctgcagcagcacaggccgagcccggagctgaccctgagccagaagataaggaccaagctgcagaatccagacctgctggagctatgtcactcagtgcccaaggaagtggtccagttggggggcaaaggctacgggtcagagagcggggaggaggactttgctgcctttcgagcctggctgcgctgctatggcatgccaggcatgagctccctgcaggaccggcatggccgtaccatctggttccagggggatcctggaccgttggcacccaaagggcgcaagtcccgcaaaaagaaatccaaggccacacagctgagtcctgaggacagagtggagggacccgtgtctcctccatccaggacgctttgcctccaagcaaggccccttccaggacacgaagggcaaagagagaccttcctaagaggactgcaacccagcggcctgaggggaccagcctccagcaggacccagaagctcccacagtgcccaagaaggggaggaggaaggggcgacaggcagcctctggccactgcagaccccggaaggtcaaggctgacatcccatccttggaaccagaggggacctcagcctcttagcaggaggctctccttgcttgcactcaccctttcttaktgtcttgccctgcatctgggggtctgaatttttgggagcaggcaatatctgaaggtgcaaacaggccctacggctgttccctgcacaactctcatggttttaattgtaccccatcttccacatctttaaagctcatgtgaaaaatgctgcatttttaataaactgatacatttgaacttcttggcacctcttggtctgagatggccaggtaggaagggcctgctgtccggtcctggtgacagaaggcccagctcctcacaaggcaaactgagcccccatcccagtcctcaaggctctgactctatcagaggacagtttgcctctgcaaggacagcccctcagaggtggtacaaagaccctggccccaggcagcccaggagccagagctcctccagtccagattctccagggtccagggctgccccctcatcctggcaggagccaggcaaaacccacccttcggcccctccccagccccaggcccaggccctttacctgctggcacaggggaggggcttctcaactcatggtctcttcactggcttttggtgsctcgaggtccccagtctctcctgtgggggctgcaacccagaccctgcacgcacaggtaccttaggatcttgcccctacccaccaaatacctgggaagccatcccaccccagacttcccacccccaccccaagcgtgaggatgggccctaaggggactgagcag

SEQ ID NO: 1052 - DNA, 2881 bp, Homo sapiens
tgttaattctattcatttattatggcagaagtattttaaagtaaattagacaaatcatgacatttcatacccaatactttaacatgcatctctaaaaaccaatttcttacaaagccacataattttattacgcctaataaggagacgtagcagggtagtgtgaaggaggggaaatcgtggcgatgggttaggtatacacttagaatgaagtgcagactccacacggaggccctcccgaggcccaaccggacctgacctgggtttgcttctctgtcttcacctgccagcactaacccgcagctatactccagccacacaggacttctttgagttctttcagtgaccaatctctttctcgcctcagggcctttgtactggcggttccttccgccggacacgtcgggtttcctcgtttttgcggactggcgctttctgatttcagagactctccgcaacagaaccatctcaagtgggtctacctcctcgcctttttttgttgttgttgttgcttggctgcgcttctgacagggcaggccgtgatgatgtttgtttatgagttaggtctgactgttcgttggtgcttaagatccccaccgggtccctagggcctgtgcgtaccgcgcacctgtgcacgtcctgcgcgcagctgcaggcgactccgctctggctcgtcgctgctgtttcctgctgggggtgccgaccctgtcccacgctagctgggtgacttcccccaaccgcagagacagcggcgacccggggcctcagacctgcccccgcatctcgccggcgccaggcagtgggaagtcaggttcttccgccacctcccagccaggactctgccaccctccctcaggatgcctgagggccccgagctgcacctggccagccagtttgtgaatgaggcctgcagggcgctggtgttcggcggctgcgtggagaagtcctctgtcagccgcaaccctgaggtgccctttgagagcagtgcctaccgcatctcagcttcagcccgcggcaaggagctgcgcctgatactgagccctctgcctggggcccagccccaacaggagccactggccctggtcttccgcttcggcatgtccggctcttttcagctggtgccccgcgaggagctgccacgccatgcccacctgcgcttttacacggccccgcctggcccccggctcgccctatgtttcgtggacatccgccggttcggccgctgggaccttgggggaaagtggcagccgggccgcgggccctgtgtcttgcaggagtaccagcagttcagggagaatgtgctacgaaacctagcggataaggcctttgaccggcccatctgcgaggccctcctggaccagaggttcttcaatggcattggcaactatctgcgggcagagatcctgtaccggctgaagatccccccctttgagaaggcccgctcggtcctggaggccctgcagcagcacaggccgagcccggagctgaccctgagccagaagataaggaccaagctgcagaatccagacctgctggagctatgtcactcagtgcccaaggaagtggtccagttggggggcaaaggctacgggtcagagagcggggaggaggactttgctgcctttcgagcctggctgcgctgctatggcatgccaggcatgagctccctgcaggaccggcatggccgtaccatctggttccaggctaagagagcagaaaggacttcacgcctgcaagggctacagcacccttctccaccctatccccctgcaaccctgggagtcacccctgggcaggataggaccctccaactccaacaccagtgtcctgcagggcgcaagtcccgcaaaaagaaatccaaggccacacagctgagtcctgaggacagagtggaggacgctttgcctccaagcaaggccccttccaggacacgaagggcaaagagagaccttcctaagaggactgcaacccagcggcctgaggggaccagcctccagcaggacccagaagctcccacagtgcccaagaaggggaggaggaaggggcgacaggcagcctctggccactgcagaccccggaaggtcaaggctgacatcccatccttggaaccagaggggacctcagcctcttagcaggaggctctccttgcttgcactcaccctttcttaktgtcttgccctgcatctgggggtctgaatttttgggagcaggcaatatctgaaggtgcaaacaggccctacggctgttccctgcacaactctcatggttttaattgtaccccatcttccacatctttaaagctcatgtgaaaaatgctgcatttttaataaactgatacatttgaacttcttggcacctcttggtctgagatggccaggtaggaagggcctgctgtccggtcctggtgacagaaggcccagctcctcacaaggcaaactgagcccccatcccagtcctcaaggctctgactctatcagaggacagtttgcctctgcaaggacagcccctcagaggtggtacaaagaccctggccccaggcagcccaggagccagagctcctccagtccagattctccagggtccagggctgccccctcatcctggcaggagccaggcaaaacccacccttcggcccctccccagccccaggcccaggccctttacctgctggcacaggggaggggcttctcaactcatggtctcttcactggcttttggtgsctcgaggtccccagtctctcctgtgggggctgcaacccagaccctgcacgcacaggtaccttaggatcttgcccctacccaccaaatacctgggaagccatcccaccccagacttcccacccccaccccaagcgtgaggatgggccctaaggggactgagcag

SEQ ID NO: 1053 - DNA, 2279 bp, Homo sapiens
ctcgtttttgcggactggcgctttctgatttcagagactctccgcaacagaaccatctcaagtctgactgttcgttggtgcttaagatccccaccgggtccctagggcctgtgcgtaccgcgcacctgtgcacgtcctgcgcgcagctgcaggcgactccgctctggctcgtcgctgctgtttcctgctgggggtgccgaccctgtcccacgctagctgggtgacttcccccaaccgcagagacagcggcgacccggggcctcagacctgcccccgcatctcgccggcgccaggcagtgggaagtcaggttcttccgccacctcccagccaggactctgccaccctccctcaggatgcctgagggccccgagctgcacctggccagccagtttgtgaatgaggcctgcagggcgctggtgttcggcggctgcgtggagaagtcctctgtcagccgcaaccctgaggtgccctttgagagcagtgcctaccgcatctcagcttcagcccgcggcaaggagctgcgcctgatactgagccctctgcctggggcccagccccaacaggagccactggccctggtcttccgcttcggcatgtccggctcttttcagctggtgccccgcgaggagctgccacgccatgcccacctgcgcttttacacggccccgcctggcccccggctcgccctatgtttcgtggacatccgccggttcggccgctgggaccttgggggaaagtggcagccgggccgcgggccctgtgtcttgcaggagtaccagcagttcagggagaatgtgctacgaaacctagcggataaggcctttgaccggcccatctgcgaggccctcctggaccagaggttcttcaatggcattggcaactatctgcgggcagagatcctgtaccggctgaagatccccccctttgagaaggcccgctcggtcctggaggccctgcagcagcacaggccgagcccggagctgaccctgagccagaagataaggaccaagctgcagaatccagacctgctggagctatgtcactcagtgcccaaggaagtggtccagttggggggcaaaggctacgggtcagagagcggggaggaggactttgctgcctttcgagcctggctgcgctgctatggcatgccaggcatgagctccctgcaggaccggcatggccgtaccatctggttccagggggatcctggaccgttggcacccaaagggcgcaagtcccgcaaaaagaaatccaaggccacacagctgagtcctgaggacagagtggaggacgctttgcctccaagcaaggccccttccaggacacgaagggcaaagagagaccttcctaagaggactgcaacccagcggcctgaggggaccagcctccagcaggacccagaagctcccacagtgcccaagaaggggaggaggaaggggcgacaggcagcctctggccactgcagaccccggaaggtcaaggctgacatcccatccttggaaccagaggggacctcagcctcttagcaggaggctctccttgcttgcactcaccctttcttaktgtcttgccctgcatctgggggtctgaatttttgggagcaggcaatatctgaaggtgcaaacaggccctacggctgttccctgcacaactctcatggttttaattgtaccccatcttccacatctttaaagctcatgtgaaaaatgctgcatttttaataaactgatacatttgaacttcttggcacctcttggtctgagatggccaggtaggaagggcctgctgtccggtcctggtgacagaaggcccagctcctcacaaggcaaactgagcccccatcccagtcctcaaggctctgactctatcagaggacagtttgcctctgcaaggacagcccctcagaggtggtacaaagaccctggccccaggcagcccaggagccagagctcctccagtccagattctccagggtccagggctgccccctcatcctggcaggagccaggcaaaacccacccttcggcccctccccagccccaggcccaggccctttacctgctggcacaggggaggggcttctcaactcatggtctcttcactggcttttggtgsctcgaggtccccagtctctcctgtgggggctgcaacccagaccctgcacgcacaggtaccttaggatcttgcccctacccaccaaatacctgggaagccatcccaccccagacttcccacccccaccccaagcgtgaggatgggccctaaggggactgagcag

SEQ ID NO: 1054 - DNA, 1137 bp, Homo sapiens
aaaatttaaaatgctaaaggaaaaattttcttagcaatttcasaggaaaacctaagttttaagagaggttatcattctractgggaactgaactattatgactaggtctataatttaataacaagtcacaatatctctctttcttgacatcaatttaaggtgacttttcacatagtagagagaatggcttcagttatacctgcctccaatagktccatgagatctgacaggaatacatatgttggaaaaaggtttgttcacgttaaaaatccttacttggatttgatggatgaagacattctctatcacttggatttgggaacaaaaacacacaacctaccagcaatgtttggagatgtaaagtttgtctgtgtcggtgggagccccaacagaatgaaagcatttgcactgtttatgcacaaggagctcgggtttgaggaagctgaagaagacataaaagacatctgtgctgggacagacagatactgtatgtacaaaaccgggcctgtgctcgccatcagtcacggcatgggcatcccctccatttctattatgcttcatgaactcatcaaattactccaccatgcacggtgctgcgatgtcaccattattagaatcggtacatcagggggaatagggattgcmccagggactgttgtaataacggatatagctgtagactccttctttaagccccggtttgaacaggtcattttggacaacattgtcacccgaagtactgaactggacaaagaactgtctgaagaactgttcaactgtagcaaagaaatccccaacttcccaaccctcgttggacatacaatgtgtacctatgatttttatgaaggccaaggcckactagatggagcactgtgctccttttccagagaaaaaaagttagactacttgaagagagcatttaaagctggtgtcaggaatattgaaatggaatctacagtgtttgcagctatgtgtggactctgtggtctaaaagctgctgtggtctgtgtgacacttctcgacagactcgactgtgatcagatcaacttgcctcatgatgtcctggtggagtaccagcaacggcctcagctcctaatctccaacttcatcagacggcggcttggactttgtgactag

SEQ ID NO: 1055 - DNA, 3674 bp, Homo sapiens
tgggccgtaccacaacctgtagggtcatctgggtctgaaacgggcaccagcgacgcgggagcagggactgacgcccctctagcaaagcatctgtggtacatcccagacccggggctctccaaggccccgcgcttccgagctccgcgcaaactctggcttctcttgtacgacagaggtggtttgctcttccgttgccccgtggcttcagctcatctttggcaggaaggcgaggcttccgcccggcacaggggatgtccagctcgccgctgtccaagaaacgtcgcgtgtccgggcctgatccaaagccgggttctaactgctcccctgcccagtccgtgttgtccgaagtgccctcggtgccaaccaacggaatggccaagaacggcagtgaagcagacatagacgagggcctttactcccggcagctgtatgtgttgggccatgaggcaatgaagcggctccagacatccagtgtcctggtatcaggcctgcggggcctgggcgtggagatcgctaagaacatcatccttggtggggtcaaggctgttaccctacatgaccagggcactgcccagtgggctgatctttcctcccagttctacctgcgggaggaggacatcggtaaaaaccgggccgaggtatcacagccccgcctcgctgagctcaacagctatgtgcctgtcactgcctacactggacccctcgttgaggacttccttagtggtttccaggtggtggtgctcaccaacacccccctggaggaccagctgcgagtgggtgagttctgtcacaaccgtggcatcaagctggtggtggcagacacgcggggcctgtttgggcagctcttctgtgactttggagaggaaatgatcctcacagattccaatggggagcagccactcagtgctatggtttctatggttaccaaggacaaccccggtgtggttacctgcctggatgaggcccgacacgggtttgagagcggggactttgtctccttttcagaagtacagggcatggttgaactcaacggaaatcagcccatggagatcaaagtcctgggtccttatacctttagcatctgtgacacctccaacttctccgactacatccgtggaggcatcgtcagtcaggtcaaagtacctaagaagattagctttaaatccttggtggcctcactggcagaacctgactttgtggtgacggacttcgccaagttttctcgccctgcccagctgcacattggcttccaggccctgcaccagttctgtgctcagcatggccggccacctcggccccgcaatgaggaggatgcagcagaactggtagccttagcacargctgtgaatgctcgagccctgccagcagtgcagcaaaataacctggacgaggacctcatccggaagctggcatatgtggctgctggggatctggcacccataaacgccttcattgggggcctggctgcccaggaagtcatgaaggcctgctccgggaagttcatgcccatcatgcagtggctatactttgatgcccttgagtgtctccctgaggacaaagaggtcctcacagaggacaagtgcctccagcgccagaaccgttatgacgggcaagtggctgtgtttggctcagacctgcaagagaagctgggcaagcagaagtatttcctggtgggtgcgggggccattggctgtgagctgctcaagaactttgccatgattgggctgggctgcggggagggtggagaaatcatcgttacagacatggacaccattgagaagtcaaatctgaatcgacagtttcttttccggccctgggatgtcacgaagttaaagtctgacacggctgctgcagctgtgcgccaaatgaatccacatatccgggtgacaagccaccagaaccgtgtgggtcctgacacggagcgcatctatgatgacgattttttccaaaacctagatggcgtggccaatgccctggacaacgtggatgcccgcatgtacatggaccgccgctgtgtctactaccggaagccactgctggagtcaggcacactgggcaccaaaggcaatgtgcaggtggtgatccccttcctgacagagtcgtacagttccagccaggacccacctgagaagtccatccccatctgtaccctgaagaacttccctaatgccatcgagcacaccctgcagtgggctcgggatgagtttgaaggcctcttcaagcagccagcagaaaatgtcaaccagtacctcacagaccccaagtttgtggagcgaacactgcggctggcaggcactcagcccttggaggtgctggaggctgtgcagcgcagcctggtgctgcagcgaccacagacctgggctgactgcgtgacctgggcctgccaccactggcacacccagtactcgaacaacatccggcagctgctgcacaacttccctcctgaccagctcacaagctcaggagcgccgttctggtctgggcccaaacgctgtccacacccgctcacctttgatgtcaacaatcccctgcatctggactatgtgatggctgctgccaacctgtttgcccagacctacgggctgacaggctctcaggaccgagctgctgtggccacattcctgcagtctgtgcaggtccccgaattcacccccaagtctggcgtcaagatccatgtttctgaccaggagctgcagagcgccaatgcctctgttgatgacagtcgtctagaggagctcaaagccactctgcccagcccagacaagctccctggattcaagatgtaccccattgactttgagaaggatgatgacagcaactttcatatggatttcatcgtggctgcatccaacctccgggcagaaaactatgacattccttctgcagaccggcacaagagcaagctgattgcagggaagatcatcccagccattgccacgaccacagcagccgtggttggccttgtgtgtctggagctgtacaaggttgtgcaggggcaccgacagcttgactcctacaagaatggtttcctcaacttggccctgcctttctttggtttctctgaaccccttgccgcaccacgtcaccagtactataaccaagagtggacattgtgggatcgctttgaggtacaagggctgcagcctaatggtgaggagatgaccctcaaacagttcctcgactattttaagacagagcacaaattagagatcamcatgctgmcccagggcgtgtccatgctctattccttcttcatgccakctgccaagctcaaggaacggttggatcagccgatgacagagattgtgagccgtgtgtcgaagcgaaagctgggccgccacgtgcgggcgctggtgcttgagctgtgctgtaacgacgagagcggcgaggatgtcgaggttccctatgtccgatacaccatccgctgaccccgtctgctcctctaggctggccccttgtccacccctctccacaccccttccagcccagggttcccatttggcttctggcagtggcccaactagccaagtctggtgttccctcatcatccccctacctgaacccctcttgccactgccttctaccttgtttgaaacctgaatcctaataaagaattaataactcccacatcgcctgccctgctggttccagggaaggaagggacttcctggagc

SEQ ID NO: 1056 - DNA, 3561 bp, Homo sapiens
ctcttccgttgccccgtggcttcagctcatctttggcaggaaggcgaggcttccgcccggcacagggggtgagctggagcaccgtgcccccaagcctctggacagcatttggaggaggatgtccagctcgccgctgtccaagaaacgtcgcgtgtccgggcctgatccaaagccgggttctaactgctcccctgcccagtccgtgttgtccgaagtgccctcggtgccaaccaacggaatggccaagaacggcagtgaagcagacatagacgagggcctttactcccggcagctgtatgtgttgggccatgaggcaatgaagcggctccagacatccagtgtcctggtatcaggcctgcggggcctgggcgtggagatcgctaagaacatcatccttggtggggtcaaggctgttaccctacatgaccagggcactgcccagtgggctgatctttcctcccagttctacctgcgggaggaggacatcggtaaaaaccgggccgaggtatcacagccccgcctcgctgagctcaacagctatgtgcctgtcactgcctacactggacccctcgttgaggacttccttagtggtttccaggtggtggtgctcaccaacacccccctggaggaccagctgcgagtgggtgagttctgtcacaaccgtggcatcaagctggtggtggcagacacgcggggcctgtttgggcagctcttctgtgactttggagaggaaatgatcctcacagattccaatggggagcagccactcagtgctatggtttctatggttaccaaggacaaccccggtgtggttacctgcctggatgaggcccgacacgggtttgagagcggggactttgtctccttttcagaagtacagggcatggttgaactcaacggaaatcagcccatggagatcaaagtcctgggtccttatacctttagcatctgtgacacctccaacttctccgactacatccgtggaggcatcgtcagtcaggtcaaagtacctaagaagattagctttaaatccttggtggcctcactggcagaacctgactttgtggtgacggacttcgccaagttttctcgccctgcccagctgcacattggcttccaggccctgcaccagttctgtgctcagcatggccggccacctcggccccgcaatgaggaggatgcagcagaactggtagccttagcacaggctgtgaatgctcgagccctgccagcagtgcaggatctggcacccataaacgccttcattgggggcctggctgcccagraagtcatgaaggcctgctccgggaagttcatgcccatcatgcagtggctatactttgatgcccttgagtgtctccctgaggacaaagaggtcctcacagaggacaagtgcctccagcgccagaaccgttatgacgggcaagtggctgtgtttggctcagacctgcaagagaagctgggcaagcagaagtatttcctggtgggtgcgggggccattggctgtgagctgctcaagaactttgccatgattgggctgggctgcggggagggtggagaaatcatcgttacagacatggacaccattgagaagtcaaatctgaatcgacagtttcttttccggccctgggatgtcacgaagttaaagtctgacacggctgctgcagctgtgcgccaaatgaatccacatatccgggtgacaagccaccagaaccgtgtgggtcctgacacggagcgcatctatgatgacgattttttccaaaycctagatggcgtggccaatgccctggacaacgtggatgcrcgtgagsttggaggcgggtgaggtggtcacgggcaaagttgtgtgtgtttcggtgtgtatataccaagaggggtgtccgtctttctgtcctctcctgatgtttctttcctagctctcgctttgtgctccccacaggcatgtacatggaccgccgctgtgtctactaccggaagccactgctggagtcaggcacactgggcaccaaaggcaatgtgcaggtggtgatccccttcctgacagagtcgtacagttccagccaggacccacctgagaagtccatccccatctgtaccctgaagaacttccctaatgccatcgagcacaccctgcagtgggctcgggatgagtttgaaggcctcttcaagcagccagcagaaaatgtcaaccagtacctcacagaccccaagtttgtggagcgaacactgcggctggcaggcactcagcccttggaggtgctggaggctgtgcagcgcagcctggtgctgcagcgaccacagacctgggctgactgcgtgacctgggcctgccaccactggcacacccagtactcgaacaacatccggcagctgctgcacaacttccctcctgaccagctcacaagctcaggagcgccgttctggtctgggcccaaacgctgtccacacccgctcacctttgatgtcaacaatcccctgcatctggactatgtgatggctgctgccaacctgtttgcccagacctacgggctgacaggctctcaggaccgagctgctgtggccacattcctgcagtctgtgcaggtccccgaattcacccccaagtctggcgtcaagatccatgtttctgaccaggagctgcagagcgccaatgcctctgttgatgacagtcgtctagaggagctcaaagccactctgcccagcccagacaagctccctggattcaagatgtaccccattgactttgagaaggatgatgacagcaactttcatatggatttcatcgtggctgcatccaacctccgggcagaaaactatgacattccttctgcagaccggcacaagagcaagctgattgcagggaagatcatcccagccattgccacgaccacagcagccgtggttggccttgtgtgtctggagctgtacaaggttgtgcaggggcaccgacagcttgactcctacaagaatggtttcctcaacttggccctgcctttctttggtttctctgaaccccttgccgcaccacgtcaccaggtgggggcctgcatccgaagcagggtttgggtggggtgtatctgtgtagatctggttctgattcacgtcataccctgtcaccaggtgagggtttctgtctgtgtacctaccctttttgtgtatcctttttcacttattcattaatcacattatttgagtacgtgcgaaaagatgggatatttgaattgtgccctgggagattattagtaactacacaataatggcagccaaaatttattggacgcttcctacacttaagtgctttgcttgcttcattaatgaattcactcaaayatttattgagcaccttttgtgtgcagggactcttctaagttatgttcctcaagtagattatataaataacctattaaatgattttggaatcaaaaaaggataaaaagaggccgggcgcggtggcttacgcctgtaatcccagcactttgggaggccgaggcacgtggttcacctgaagtcaggagtttgagaccagcctggccaacatgatgaaaccctgtctctactaaa

SEQ ID NO: 1057 - DNA, 3541 bp, Homo sapiens
ctcttccgttgccccgtggcttcagctcatctttggcaggaaggcgaggcttccgcccggcacagggggtgagctggagcaccgtgcccccaagcctctggacagcatttggaggaggatgtccagctcgccgctgtccaagaaacgtcgcgtgtccgggcctgatccaaagccgggttctaactgctcccctgcccagtccgtgttgtccgaagtgccctcggtgccaaccaacggaatggccaagaacggcagtgaagcagacatagacgagggcctttactcccggcagctgtatgtgttgggccatgaggcaatgaagcggctccagacatccagtgtcctggtatcaggcctgcggggcctgggcgtggagatcgctaagaacatcatccttggtggggtcaaggctgttaccctacatgaccagggcactgcccagtgggctgatctttcctcccagttctacctgcgggaggaggacatcggtaaaaaccgggccgaggtatcacagccccgcctcgctgagctcaacagctatgtgcctgtcactgcctacactggacccctcgttgaggacttccttagtggtttccaggtggtggtgctcaccaacacccccctggaggaccagctgcgagtgggtgagttctgtcacaaccgtggcatcaagctggtggtggcagacacgcggggcctgtttgggcagctcttctgtgactttggagaggaaatgatcctcacagattccaatggggagcagccactcagtgctatggtttctatggttaccaaggacaaccccggtgtggttacctgcctggatgaggcccgacacgggtttgagagcggggactttgtctccttttcagaagtacagggcatggttgaactcaacggaaatcagcccatggagatcaaagtcctgggtccttatacctttagcatctgtgacacctccaacttctccgactacatccgtggaggcatcgtcagtcaggtcaaagtacctaagaagattagctttaaatccttggtggcctcactggcagaacctgactttgtggtgacggacttcgccaagttttctcgccctgcccagctgcacattggcttccaggccctgcaccagttctgtgctcagcatggccggccacctcggccccgcaatgaggaggatgcagcagaactggtagccttagcacaggctgtgaatgctcgagccctgccagcagtgcagcaaaataacctggacgaggacctcatccggaagctggcatatgtggctgctggggatctggcacccataaacgccttcattgggggcctggctgcccagraagtcatgaaggcctgctccgggaagttcatgcccatcatgcagtggctatactttgatgcccttgagtgtctccctgaggacaaagaggtcctcacagaggacaagtgcctccagcgccagaaccgttatgacgggcaagtggctgtgtttggctcagacctgcaagagaagctgggcaagcagaagtatttcctggtgggtgcgggggccattggctgtgagctgctcaagaactttgccatgattgggctgggctgcggggagggtggagaaatcatcgttacagacatggacaccattgagaagtcaaatctgaatcgacagtttcttttccggccctgggatgtcacgaagttaaagtctgacacggctgctgcagctgtgcgccaaatgaatccacatatccgggtgacaagccaccagaaccgtgtgggtcctgacacggagcgcatctatgatgacgattttttccaaaacctagatggcgtggccaatgccctggacaacgtggatgcccgcatgtacatggaccgccgctgtgtctactaccggaagccactgctggagtcaggcacactgggcaccaaaggcaatgtgcaggtggtgatccccttcctgacagagtcgtacagttccagccaggacccacctgagaagtccatccccatctgtaccctgaagaacttccctaatgccatcgagcacaccctgcagtgggctcgggatgagtttgaaggcctcttcaagcagccagcagaaaatgtcaaccagtacctcacagaccccaagtttgtggagcgaacactgcggctggcaggcactcagcccttggaggtgctggaggctgtgcagcgcagcctggtgctgcagcgaccacagacctgggctgactgcgtgacctgggcctgccaccactggcacacccagtactcgaacaacatccggcagctgctgcacaacttccctcctgaccagctcacaagctcaggagcgccgttctggtctgggcccaaacgctgtccacacccgctcacctttgatgtcaacaatcccctgcatctggactatgtgatggctgctgccaacctgtttgcccagacctacgggctgacaggctctcaggaccgagctgctgtggccacattcctgcagtctgtgcaggtccccgaattcacccccaagtctggcgtcaagatccatgtttctgaccaggagctgcagagcgccaatgcctctgttgatgacagtcgtctagaggagctcaaagccactctgcccagcccagacaagctccctggattcaagatgtaccccattgactttgagaaggatgatgacagcaactttcatatggatttcatcgtggctgcatccaacctccgggcagaaaactatgacattccttctgcagaccggcacaagagcaagctgattgcagggaagatcatcccagccattgccacgaccacagcagccgtggttggccttgtgtgtctggagctgtacaaggttgtgcaggggcaccgacagcttgactcctacaagaatggtttcctcaacttggccctgcctttctttggtttctctgaaccccttgccgcaccacgtcaccagtactataaccaagagtggacattgtgggatcgctttgaggtacaagggctgcagcctaatggtgaggagatgaccctcaaacagttcctcgactattttaagacagagcacaaattagagatcaccatgctgtcccagggcgtgtccatgctctattccttcttcatgccagctgccaagctcaaggaacggttggatcagccgatgacagagattgtgagccgtgtgtcgaagcgaaagctgggccgccacgtgcgmgcgctggmgcttgagctgtgctgtaacgacgagagcggcgaggatgkcgaggttccctatgtccgatacaccatccgctgaccccgtctgctcctctaggctggccccttgtccacccctctccacaccccttccagcccagggttcccatttggcttctggcagtggcccaactagccaagtctggtgttccctcatcatccccctacctgaacccctcttgccactgccttctaccttgtttgaaacctgaatcctaataaagaattaataactcccacatcgcctgccctgctggttccagggaaggaagggacttcctggagc

SEQ ID NO: 1058 - DNA, 3951 bp, Homo sapiens
gttgctggttgttagtctaccaaccactcaacttcatgcataacttataatcaggaagcatggccttaacggtttttcttcgcttccttgacagcctggctgcaacaattcattcattagtcgcattccatgaggcgtggcctctgttttacctgttttcgttgttactgccacaatgtccaccaggtggtgctgttccacttctaaccgaatgaatcgcaaccgagtagggaactttatgcatgattcataagtaggcgcggcccgcttgcatccgggtttctgggggtggggcccaaggttttgttccggccccaggctcagcgtccgccatcttgtgtcggcggctcggctgtaaggaggtggcagggacaaccacaaccacaacggccgggggaggagaaggcggcagcggcgattctaggcggcccaggcggcggggaggaggagaaggaggagggtggcggccgggcttggcttcggctccttgaggagttggcggcggcgcgacccggggaaccggcattgatgtccagctcgccgctgtccaagaaacgtcgcgtgtccgggcctgatccaaagccgggttctaactgctcccctgcccagtccgtgttgtccgaagtgccctcggtgccaaccaacggaatggccaagaacggcagtgaagcagacatagacgagggcctttactcccggcagctgtatgtgttgggccatgaggcaatgaagcggctccagacatccagtgtcctggtatcaggcctgcggggcctgggcgtggagatcgctaagaacatcatccttggtggggtcaaggctgttaccctacatgaccagggcactgcccagtgggctgatctttcctcccagttctacctgcgggaggaggacatcggtaaaaaccgggccgaggtatcacagccccgcctcgctgagctcaacagctatgtgcctgtcactgcctacactggacccctcgttgaggacttccttagtggtttccaggtggtggtgctcaccaacacccccctggaggaccagctgcgagtgggtgagttctgtcacaaccgtggcatcaagctggtggtggcagacacgcggggcctgtttgggcagctcttctgtgactttggagaggaaatgatcctcacagattccaatggggagcagccactcagtgctatggtttctatggttaccaaggacaaccccggtgtggttacctgcctggatgaggcccgacacgggtttgagagcggggactttgtctccttttcagaagtacagggcatggttgaactcaacggaaatcagcccatggagatcaaagtcctggrtccttatacctttagcatctgtgacacctccaacttctccgactacatccgtggaggcatcgtcagtcaggtcaaagtacctaagaagattagctttaaatccttggtggcctcactggcagaacctgactttgtggtgacggacttcgccaagttttctcgccctgcccagctgcacattggcttccaggccctgcaccagttctgtgctcagcatggccggccacctcggccccgcaatgaggaggatgcagcagaactggtagccttagcacaggctgtgaatgctcgagccctgccagcagtgcagcaaaataacctggacgaggacctcatccggaagctggcatatgtggctgctggggatctggcacccataaacgccttcattgggggcctggctgcccaggaagtcatgaaggcctgctccgggaagttcatgcccatcatgcagtggctatactttgatgcccttgagtgtctccctgaggacaaagaggtcctcacagaggacaagtgcctccagcgccagaaccgttatgacgggcaagtggctgtgtttggctcagacctgcaagagaagctgggcaagcagaagtatttcctggtgggtgcgggggccattggctgtgagctgctcaagaactttgccatgattgggctgggctgcggggagggtggagaaatcatcgttacagacatggacaccattgagaagtcaaatctgaatcgacagtttcttttccggccctgggatgtcacgaagttaaagtctgacacggctgctgcagctgtgcgccaaatgaatccacatatccgggtgacaagccaccagaaccgtgtgggtcctgacacggagcgcatctatgatgacgattttttccaaaacctagatggcgtggccaatgccctggacaacgtggatgcccgcatgtacatggaccgccgctgtgtctactaccggaagccactgctggagtcaggcacactgggcaccaaaggcaatgtgcaggtggtgatccccttcctgacagagtcgtacagttccagccaggacccacctgagaagtccatccccatctgtaccctgaagaacttccctaatgccatcgagcacaccctgcagtgggctcgggatgagtttgaaggcctcttcaagcagccagcagaaaatgtcaaccagtacctcacagaccccaagtttgtggagcgaacactgcggctggcaggcactcagcccttggaggtgctggaggctgtgcagcgcagcctggtgctgcagcgaccacagacctgggctgactgcgtgacctgggcctgccaccactggcacacccagtactcgaacaacatccggcagctgctgcacaacttccctcctgaccagctcacaagctcaggagcgccgttctggtctgggcccaaacgctgtccacacccgctcacctttgatgtcaacaatcccctgcatctggactatgtgatggctgctgccaacctgtttgcccagacctacgggctgacaggctctcaggaccgagctgctgtggccacattcctgcagtctgtgcaggtccccgaattcacccccaagtctggcgtcaagatccatgtttctgaccaggagctgcagagcgccaatgcctctgttgatgacagtcgtctagaggagctcaaagccactctgcccagcccagacaagctccctggattcaagatgtaccccattgactttgagaaggatgatgacagcaactttcatatggatttcatcgtggctgcatccaacctccgggcagaaaactatgacattccttctgcagaccggcacaagagcaagctgattgcagggaagatcatcccagccattgccmcgaccacmgcagccgtggttggccttgtgtgtctggagctgtacaakgttgtgcaggggcaccgacagcttgactcctacaagaatggtttcctcaacttggccctgcctttctttggtttctctgaaccccttgccgcaccacgtcaccagtactataaccaagagtggacattgtgggatcgctttgaggtacaagggctgcagcctaatggtgaggagatgaccctcaaacagttcctcgactattttaagacagagcacaaattagagatcaccatgctgtcccagggcgtgtccatgctctattccttcttcatgccagctgccaagctcaaggaacggttggatcagccgatgacagagattgtgagccgtgtgtcgaagcgaaagctgggccgccacgtgcgggcgctggtgcttgagctgtgctgtaacgacgagagcggcgaggatgtcgaggttccctatgtccgatacaccatccgctgaccccgtctgctcctctaggctggccccttgtccacccctctccacaccccttccagcccagggttcccatttggcttctggcagtggcccaactagccaagtctggtgttccctcatcatccccctacctgaacccctcttgccactgccttctaccttgtttgaaacctgaatcctaataaagaattaataactcccacatcgcctgccctgctggttccagggaaggaagggacttcctggagc

SEQ ID NO: 1059 - DNA, 1709 bp, Homo sapiens
aatgggagtgctgcagccactgccgctgattccagatctcattgccacacgccccgacgactgcctgatgtgcattcctgattccttttggttccaagtccaatgtggcaactctcaaggatcagctgcttcataatcttctaaaggaagaacagaccgcccagaataagattacagttgttggggttggtgctgttggcatggcctgtgccatcaatatcttaatgaaggacttggcagatgaacttgatcttgttgatgtcatcgaagacaaattgaagggagagatgatggatctccaacatggcagccttttccttagaacaccaaagattgtctctggcaaagactataatggaactgcaaactccaaactggtaattatcatggctgggacatgtcagcaagaggaagaaagccgtctcaatttggtccagcgtaacgtgaacatctttaagttcatcattcttaatgttgtaaaatacagcccgaactgcaagttgcttattrtttcaaatccagtggatatcttgacctacgtggcttggaagataagtggttttcccaaaaaccatgttattggaagyggttgcaatctggattcagcccaattccgttacctratgggggaaaggctgggagttcacccattaagctgtcatgggtgggtccttggggaacatggagattccagtgcacctgtatggagtggaawgaatgttgctggtgtctccctgaagactccgcacccagatttagagactgataaacataaggaacagtggaaagaggttcacaaactggtggttgagagtgcttatgaggtgatcaaactcaaaggctacacatcctgggccattggactctctgtagcagatttggcagaggtacagtgaagaatcttaggcaggtgcacccagttttcaccatgattaagggtctctatggaataaaggatgatgtcgtccttagggttccttgcattttgggacagaatggaatctcagaccttgtgaaagtgactctgactcctgaggaagaggcctgtttgaagaagagtgcagatacactttgggggatccaaaaagagctgcaattttaaagtcttctgatgtcatatcattttactgtctaggctacaacaggattctagttggaggttgtacatgctgtcctttttatctgatctgtgattaaagcagtaatattttaagatggactgggaaaaacatcaactcctcaagttagaaataggaatgatttgtaaaatccacagctatatcctgatgctggatggtattaatcttgtgtagtcctaaactggttagtgtgaagtagttctgccacctctgatgcaccactgccaatgctgtacatgctgcatttgccccttgagccaggtggatgtttaccgtgtgttatataacttcctggctccttcactgaacatgcctagtccaacgttttttcccagtcagtcacatcctgggatccagtgtgtaaatccaatatcgtatgtcttgtgcataattgttccaaaggatcttattttgtgaactatatgtatcagcagtgtacattaccatataatgtaaaaagatctacatgtaaacaatgcagctaactatccaagtgttataccaactaaaacccccaataaaccttgaacagtgaaaaaataaataaataaatgagttaatgcatgtaaa

SEQ ID NO: 1060 - DNA, 708 bp, Homo sapiens
atggggttctctttcattttgaatgatgatgagatgacttacgataacaagtctgacttcaaagtgggaaaatcactaaagcctgacagtgtctggtcccagctagagacgtcaytgaagaggctgcagtgtccccgattggacctcttctacctacatgcacctgaccacggcaccccagtggaagagacgctgtgtgcttgccaccagcgacaccaggagggcaagttcgtggagcttggcctctccaactatgccggctgggaagtggaaatggagctcttcccctgccttgggcactttggactgaggttctatgcctacaaccctctggctgggggtctgytgaccggcaagtacaagtatgaggacaagggcaggaaacagtctgggggccacttctttgggaatagctgggctgagayccacaggaatcgcttctggaaggagcaccactttgaggccatttccctgatgcagaaggccacacaggccgtgtatggtgtsagtgcccccagcatgaccttggccacccaccctctgctgcagggtgccmacagagacgtggtcatcctgggcatgtccagcctggagaagctggagcagaacttggcagtgatggakgaagggcccatggacccggctgtcatggacacttttaatcaaacctggcattttgttgcccacgaatgtcccaactacttccgc

SEQ ID NO: 1061 - DNA, 1310 bp, Homo sapiens
atgccccaagccgccatccactgcacaagtcgctccctgccacccgaggcccgcatgctcgccatgtcccttccacaaccaacgcaggccgccttgggcatcctggcccggcgcaccatggtgctgggcatcatggagatggggcgccacatggacacatctgccagcgccacggccgtgcacgctttcctggagcgtggccacaccgagctggacatggccttcatgtacagcgatggccagtccaaaatcatcctgggcggcctgaggctggggctgggcggcggcggcgactgctgagtgaaattggccaccaaggccaacccttgagagggaaaatcactaaagcctgacagtgtctggtcccagctagagacgtcaytgaagaggctgcagtgtccccgattggacctcttctacctacatgcacctgaccacggcaccccagtggaagagacgctgtgtgcttgccaccagcgacaccaggagggcaagttcgtggagcttggcctctccaactatgccggctgggaagtggccgagatctgtaccctctgcaagagcaaaggctggatcctgcccactgtgtaccatggcatgtacaatgccaccacccggcaggtggaaatggagctcttcccctgccttgggcactttggactgaggttctatgcctacaaccctctggctgggggtctgytgaccggcaagtacaagtatgaggacaagggcaggaaacagtctgggggccacttctttgggaatagctgggctgagayccacaggaatcgcttctggaaggagcaccactttgaggccatttccctgatgcagaaggccacacaggccgtgtatggtgtsagtgcccccagcatgaccttggccacccaccctctggtggatgtaccaccactcacagctgcagggtgccmacagagacgtggtcatcctgggcatgtccagcctggagaagctggagcagaacttggcagtgatggakgaagggcccatggacccggctgtcatggacacttttaatcaaacctggcattttgttgcccacgaatgtcccaactacttccgctaggcccatcatggcccaggctgcccaaggcttttccgtcacctcttttattctctcacgctgaccagtcttggccttgagctgacttaacagggtctttctggatcgtctagatccatgtgttatttttctagcttcctgccttgctccctgctcatttacactgtgaaaggtgggggtgagtcccacttgggcatttcctgttgaataaagcaggcacttgacc

SEQ ID NO: 1062 - DNA, 1050 bp, Homo sapiens
aggtggatcaagacaccaaacagaggtaatggcactttactgacaatcaagcaatctagtggggcaccgaacacattaaagggagtgaagactagaacaatcaaaagaattggtaccaagaagccagattcacaggatgaaacatcgtttctcaggaagttcaccagaagctatcaaaaggttgtctccacacctggatttaaagcattgtatgattccacccatggcaaattccatggtacagtcaaggctgagaatggaaagctcgtcttcaatggaaatcccatcatcatcttccaggaccaagatcctaccaaaatccaatggggtgatgttggcactaaatgtgttgtggagtccgccagtgtcttcaccgccatggagaaggctggggctcatttgcagggggagccaaaaagtgatgaccccgtgtttgtgatgggcgtgaactatgagaagtatgacaacagcctcaagattgtcagcaatacctcctgcaccaccaactgcttagcacccctggccaaggtcatccatgacaactgtcattgtggagggactcatgaccacatttcatgtagtcactgccacccaaaagactgtggatggcctttccaggaaactgtggcatgaaggccgtggagctctaaagaacatcatccctgcatctactggcactgtcaagaacaggggcaaggtcaccctgagctgaatgggaagctcactggcatggccttctgtgtctctaccgccaaactgtcagtcgtggacctgacctgctgtttgggaaaaactgccaaatatgatggcatcgagaaggtggtggggcaggcatcggagggcccgctcaagggcatcctgggctacactgagcaccaggttgtctcctccgaattcaacagcaacacccactcttctgctttcaatgtcaatgagggyaatgacattgccctcaacaaccactttgtcaagcttatttcctggtatgacaatgaatttggcaacagcaacagggtgatagacctcatggtccacttgacctccaaagag

SEQ ID NO: 1063 - DNA, 1037 bp, Homo sapiens
atggtgaaggtgaakgccagagycaacggattggactatattgggcacccggtcactagggctgcttttaattctggtaaagtggatattgtcaccatcaatgaccccttcattgacctcaacaacatagtctacatgatctagtatgattccacccatggcaaattccatggtacagtcaaggctgagaatggaaagctcgtcttcaatggaaatcccatcatcatcttccaggaccaagatcctaccaaaatccaatggggtgatgttggcactaaatgtgttgtggagtccgccagtgtcttcaccgccatggagaaggctggggctcatttgcagggggagccaaaaaggtcatcatctctgccgcctctagtgatgaccccgtgtttgtgatgggcgtgaactatgagaagtatgacaacagcctcaagattgtcagcaatacctcctgcaccaccaactgcttagcacccctggccaaggtcatccatgacaactgtcattgtggagggactcatgaccacatttcatgtagtcactgccacccaaaagactgtggatggcctttccaggaaactgtggcatgaaggccgtggagctctaaagaacatcatccctgcatctactggcactgtcaagaacaggggcaaggtcaccctgagctgaatgggaagctcactggcatggccttctgtgtctctaccgccaaactgtcagtcgtggacctgacctgctgtttgggaaaaactgccaaatatgatggcatcgagaaggtggtggggcaggcatcggagggcccgctcaagggcatcctgggctacactgagcaccaggttgtctcctccgaattcaacagcaacacccactcttctgctttcaatgtcaatgagggyaatgacattgccctcaacaaccactttgtcaagcttatttcctggtatgacaatgaatttggcaacagcaacagggtgatagacctcatggtccacttgacctccaaagagtaagacccccagaccaccagccccagggag

SEQ ID NO: 1064 - DNA, 1855 bp, Homo sapiens
acatcaggtcccggcccgccggaacctgggcgatccacgatgccgagtttgccacgctgcgacagcccataggcttattcatctggttactgatactggccggcatcagtggactgtcggcaggtccttgagcaactggtgtgtgaaatgggacggacgtcaaaggacaagcgggatgtctactaccgcctggccaaggagaatggctggcgtgctcgcagcgccttcaaactgctacaactggataaggaattccaactcttccaaggcgtgacacgggcagttgacctgtgtgcagccccaggcagctggagccaggtgctgagccagaagatcgggggccaagggtccggccacgtggtggctgtggacctgcaggctatggctccactaccaggtgtggtacagatccagggggacatcacccagctgtccactgccaaggagatcatccagcactttaagggctgccctgcggacctagtggtgtgtgacggggctcctgatgtaaccggtctccatgatgttgatgagtatatgcaggcccagctcctcytagctgctctgaacattgctacacatgtcctgaagccagggggctgctttgtggccaagatattccgaggccgggatgtgacgctyctctacagccagctgcaggtcttcttctccagcgtgctgtgtgccaagcccaggagcagccggaactctagcatcgaggccttcgctgtctgtcagggctatgaccctcccgagggcttcatcccggacctgagcaaacccctgctggaccattcttacgacccagatttcaaccagctggatggtcccacccgcatcattgtgccttttgtgacctgtggggacctgagctcctatgattcggaccgcagttacccactggacctagagggcggctcagagtacaagtacactccacccacacagccccccatctcgccaccataccaggaggcctgcacgttgaagaggaaggggcagctggccaaggagatccgcccccaggactgccccatcagcagagtggacacgtttccccagcccctggccgcccctcagtgccacaccctgctggcccctgagatggaagacaatgaaatgagttgttcaccttaacccattacggtgttgttctaggtttggagatagagcagggagcaaaacagaaatatcttggctctcacagtacttccagtttggaaaagaggcaacaatcaaaacagtctctggcaaactgatacaactcagaaactgctcaatgtcaggaaaaccggaacttgttgatgaacttgttttcaaaatatcatctcatcaacgaggcctggacaaacaagccctgaggagggatctgcaacaaccctgaagacaacaaggaaagaaaccatgaaagtctgtctgtactgcagtgggaattcttgagtgaggtcttacctcttctttaaacctcttcaggagtgtcctgattatgtccagaattttccctaaaggcagggattcttaacctggatagaagccaggggtaaccatgaacttgatggaagaaaatgttacatctttattttcagcaatgaaactgaaatttagccttactcccaagttataaatgctggcaacaaatcmcagtagtaaaagcagtacctgggattttcccaccaatacaaaccagttacagcaactgtaatgtaacataaaaagggcatcttgaagtattgttcatatttgtcacctcttggaatgatagcagatcctgtaagttgatgtattaattaaaaagcccatatattactgcatctcaattttgtttcaatttaatatatagtaataattgtaattc

SEQ ID NO: 1065 - DNA, 2004 bp, Homo sapiens
cagccacgcagtgcgtggattcagccgctttggccgtgcccgttgcatgccgggaaacgcagttcgcgagccccggatacgtcgacaatagatgacggggctcacgttgtacgttcacatcaggtcccggcccgccggaacctgggcgatccacgatgccgagtttgccacgctgcgacagcccataggcttgcccccccgggcattcgggtggactacgaacacaaactgaagccctaggacttgtcgcccgtttgcgctctcgccgaggcacaggctgctcgcggaccaccctgctccgaaaactaagagrtaggtggtagcccattcatctggttactgatactggccggcatcagtggactgtcggcaggtccttgagcaactggtgtgtgaaatgggacggacgtcaaaggacaagcgggatgtctactaccgcctggccaaggagaatggctggcgtgctcgcagcgccttcaaactgctacaactggataaggaattccaactcttccaaggcgtgacacgggcagttgacctgtgtgcagccccaggcagctggagccaggtgctgagccagaagatcgggggccaagggtccggccacgtggtggctgtggacctgcaggctatggctccactaccaggtgtggtacagatccagggggacatcacccagctgtccactgccaaggagatcatccagcactttaagggctgccctgcggacctagtggtgtgtgacggggctcctgatgtaaccggtctccatgatgttgatgagtatatgcaggcccagctcctcytagctgctctgaacattgctacacatgtcctgaagccagggggctgctttgtggccaagatattccgaggccgggatgtgacgctyctctacagccagctgcaggtcttcttctccagcgtgctgtgtgccaagcccaggagcagccggaactctagcatcgaggccttcgctgtctgtcagggctatgaccctcccgagggcttcatcccggacctgagcaaacccctgctggaccattcttacgacccagatttcaaccagctggatggtcccacccgcatcattgtgccttttgtgacctgtggggacctgagctcctatgattcggaccgcagttacccactggacctagagggcggctcagagtacaagtacactccacccacacagccccccatctcgccaccataccaggaggcctgcacgttgaagaggaaggggcagctggccaaggagatccgcccccaggactgccccatcagcagagtggacacgtttccccagcccctggccgcccctcagtgccacaccctgctggcccctgagatggaagacaatgaaatgagttgttcaccttaacccattacgctggcaaactgatacaactcagaaactgctcaatgtcaggaaaaccggaacttgttgatgaacttgttttcaaaatatcatctcatcaacgaggcctggacaaacaagccctgaggagggatctgcaacaaccctgaagacaacaaggaaagaaaccatgaaagtctgtctgtactgcagtgggaattcttgagtgaggtcttacctcttctttaaacctcttcaggagtgtcctgattatgtccagaattttccctaaaggcagggattcttaacctggatagaagccaggggtaaccatgaacttgatggaagaaaatgttacatctttattttcagcaatgaaactgaaatttagccttactcccaagttataaatgctggcaacaaatcmcagtagtaaaagcagtacctgggattttcccaccaatacaaaccagttacagcaactgtaatgtaacataaaaagggcatcttgaagtattgttcatatttgtcacctcttggaatgatagcagatcctgtaagttgatgtattaattaaaaagcccatatattactgcatctcaattttgtttcaatttaatatatagtaataattgtaattc

SEQ ID NO: 1066 - DNA, 5790 bp, Homo sapiens
ctggaggaaaggcaggtacccggagtggagttatattacctgtttctttgttctgatgggaccccagagaggacatcacgctttgtaactggttcttcaaggggagaagcaaatgtgtccctgaaaacttcagctgccgcgtttggcaccagtgatttgccttcaaggaaactggggagycagaaaattgggaactcatatcaacatggcaaacctattgaaaacagtggtgactggctgctcgtgtcctytacttagcaatttggggtcctgtaagggtctacrtgtgaagaaggattttttacgaacattttatactcaccaagaactgtggtgtaaagcgcctgtaaaaccaggaattccatataagcaactgactgttggagtccccaragagatattccaaaatgagaagcgagtggcattgtctcctgctggtgttcagaacttggtcaagcagggttttaatgttgtcgtggaatcgggtgcgggcgaagcttccaagttctcagatgatcactatagagtggcaggtgcccaaatccaaggggcaaaggaagtgctggcttctgatttggtggtcaaagtgcgagcccctatggttaatccaacattaggtgttcatgaagctgaccttttaaagacatcaggaacgctgattagttttatttacccagcccaaaatccagagttgctaaataaactttcccaaagaaaaactacagttctggcaatggaccaggttccaagagtcacaattgctcagggatatgatgcgctaagctccatggccaacattgcgggttataaggctgttgtcctagcagcaaatcattttggacgtttttttactggtcagatcacagctgctggaaaagttcctccagctaagattctgatagttggtggtggtgttgctgggcttgcttctgcaggcgcagcaaagtcgatgggtgcaattgttcgaggatttgacacaagagctgcagctttggaacagttcaagtctcttggtgctgagcccttggaggtggacttgaaggaatctggtgagggacaaggaggatatgcaaaagagatgtccaaagagttcattgaagctgaaatgaaactctttgctcaacaatgcaaggaggtagacatccttatcagcacagcacttattccaggtaaaaaagctccagttttatttaataaagaaatgattgagtcaatgaaggaaggttcagttgttgtggatttagctgctgaggctggtggaaactttgaaaccactaagccaggagaactctacattcataagggaattactcacataggctacacagacctgcccagccgaatggccactcaggccagcaccctatattccaacaacatcaccaaactcctgaaggccatcagcccggacaaagataatttttattttgatgtgaaagatgactttgactttggtacgatgggtcatgtcattagaggaactgtagtgatgaaagatggtaaagtgattttcccagctcccacaccgaaaaatattcctcaaggtgccccagtaaaacagaagacagtggctgagctggaagctgaaaaagcagctaccattacacccttcaggaagacaatgtcaacggcttctgcatatacagcaggtctcacagggatactgggtttgggcattgcggctcccaatctagccttttctcagatggtgaccacttttggcttggctggcattgtggggtatcataccgtctggggagtgacccctgctctccactcaccactgatgtctgtgacaaatgcaatctcagggctgactgcagttggtgggttggcactgatgggaggacatttgtatccttccacaacttctcagggccttgctgctcttgctgcattcatatcctctgtcaacattgcaggtggctttctggtgactcagagaatgctggacatgttcaagcgtcccactgaccccccagaatacaactacctgtacctgctccctgccggcacctttgttggtggatatttagctgccctctacagtggttataacattgaacagatcatgtacctaggctcgggtttgtgctgtgtcggtgccttggctggcctctccacccagggaacagcacgtcttggcaatgcactgggcatgattggggttgctggaggactggcagccaccctcggagtcctaaaaccgggcccagaattactagctcagatgtctggagcgatggctttgggtggtaccattggattgacaattgccaaacgcatccagatttctgatttacctcaattagttgctgcttttcacagtttagtgggtttggcagcygtacttacttgcatagctgagtacattatagaatatccacattttgctacggatgcagcagcaaatctcaccaagattgtggcctacctcggcacttacattggtggcgtcacctttagtgggtctctcattgcctatggaaaattgcagggtctcctgaaatctgcccctctcctactgcctggaaggcacttactcaatgcaggcttactggctgctagtgtgggcgggataatcccattcatggtggacccaagctttactactggcatcacctgtctgggttcagtgtctgctctctctgctgtcatgggtgtgactttgacagctgctattgggggtgctgacatgcccgtcgttatcactgtgctgaacagctactcaggctgggccctgtgtgcagagggcttcctgctcaacaacaatctgctgaccatcgtgggtgcactcataggctcgtctggtgctatcctgtcatacatcatgtgtgtggcaatgaatcgctccctggctaatgtgattcttggaggctatggcaccacttcaacagctggtggaaaacccatggaaatttctggcacacatacggaaatcaaccttgacaatgcaattgacatgattcgagaagctaatagcattattattacaccaggctatggtctctgtgcagccaaagctcaataccccattgctgatttggtaaagatgctcactgagcaaggcaaaaaagtcaggtttggaattcacccagttgcrggccgaatgcctggtcagcttaatgtgctgctggctgaggctggtgtgccatatgacattgtgttggaaatggatgagatcaaccatgattttccagatactgatttggtccttgtaattggagctaatgacactgttaattcagcagctcaagaagatcccaactctattattgcaggcatgccagtccttgaggtctggaaatcaaagcaggtgattgttatgaagaggtctttgggtgttggctatgctgcagtggacaatccaatcwtctacaaacctaacacggccatgcttctaggtgatgccaagaaaacatgtgacgcgctccaggcgaaagttagagaatcctatcagaagtaaatattaaggatcaagctgttagctaataatgccacctctgcagttttggraacaggcaaataaagtatcagtatacatggtgatgtacatctgtagcaaagctcttggagaaaatgaagactgaagaaagcaaagcaaaaactgtatagagagatttttcaaaagcagtaatccctcaattttaaaaaaggattgaaaattctaaatgtctttctgtgcatattttttgtgttaggaatcaaaagtattttataaaaggagaaagaacagcctcattttagatgtagtcctgttggattttttatgcctcctcagtaaccagaaatgttttaaaaaactaagtgtttaggatttcaagacaacattatacatggctctgaaatatctgacacaatgtaaacattgcaggcacctgcattttatgttttttttttcaacaaatgtgactaatttgaaacttttatgaacttctgagctgtccccttgcaattcaaccgcagtttgaattaatcatatcaaatcagttttaattttttaaattgtacttcagagtctatatttcaagggcacattttctcactactattttaatacattaaaggactaaataatctttcagagatgctggaaacaaatcatttgctttatatgtttcattagaataccaatgaaacatacaacttgaaaattagtaatagtatttttgaagatcccatttctaattggagatctctttaatttcgatcaacttataatgtgtagtactatattaagtgcacttgagtggaattcaacatttgactaataaaatgagttcatcatgttggcaagtgatgtggcaattatctctggtgacaaaagagtaaaatcaaatatttctgcctgttacaaatatcaaggaagacctgctactatgaaatagatgacattaatctgtcttcactgtttataatacggatggattttttttcaaatcagtgtgtgttttgaggtcttatgtaattgatgacatttgagagaaatggtggytttttttagctacctctttgttcatttaagcaccagtaaagatcatgtctttttatagaagtgtagattttctttgtgactttgctatcgtgcctaaagctctaaatataggtgaatgtgtgatgaatactcagattatttgtctctctatataattagtttggtactaagtttctcaaaaaattattaacacatgaaagacaatctctaaaccagaaaaagaagtagtacaaattttgttactgtaatgctcgcrtttagtgagtttaaaacacacagtatcttttggttttataatcagtttctattttgctgtgcctgagattaagatctgtgtatgtgtgtgtgtgtgtgtgtgcgtttgtgtgttaaagcagaaaagacttttttaaaagttttaagtgataaatgcaatttgttaattgatcttagatcactagtaaactcagggctgaattataccatgtatattctattagaagaaagtaaacaccatctttattcctgcccttttycttctctcaaagtagttgtagttatatctagaaagaagcaattttgatttcttgaaaaggtagttcctgcactcagtttaaactaaaaataatcatacttggattttatttatttttgtcatagtaaaaattttaatttatatatatttttatttagtattatcttattctttgctatttgccaatcctttgtcatcaattgtgttaaatgaattgaaaattcatgccctgttcattttattttactttattggttaggatatttaaaggatttttgtatatataatttcttaaattaatattccaaaaggttagtggacttagattataaattatggcaaaaatctaaaaacaacaaaaatgatttttatacattctatttcattattcctctttttccaataagtcatacaattggtagatatgacttattttatttttgtattattcactrtatctttatgatatttaagtataaataattaaaaaaatttattgtaccttatagtctgtcaccaaaaaaaaaaaattatctgtaggtagtgaaatgctaatgttgatttgtctttaagggcttgttaactatcctttattttctcatttgtcttaaattaggagtttgtgtttaaattactcatctaagcaaaaaatgtatataaatcccattactgggtatatacccaaaggattataaatcatgctgctataaagacacatgcacacgtatgtttattgcagcactattcacaatagcaaagacttggaaccaacccaaatgtc

SEQ ID NO: 1067 - DNA, 5638 bp, Homo sapiens
tgatttgccttcaaggaaactggggagycagaaaattgggaactcatatcaacatggcaaacctattgaaaacagtggtgactggctgctcgtgtcctytacttagcaatttggggtcctgtaagggtctacrtgtgaagaaggattttttacgaacattttatactcaccaagaactgtggtgtaaagcgcctgtaaaaccaggaattccatataagcaactgactgttggagtccccaragagatattccaaaatgagaagcgagtggcattgtctcctgctggtgttcagaacttggtcaagcagggttttaatgttgtcgtggaatcgggtgcgggcgaagcttccaagttctcagatgatcactatagagtggcaggtgcccaaatccaaggggcaaaggaagtgctggcttctgatttggtggtcaaagtgcgagcccctatggttaatccaacattaggtgttcatgaagctgaccttttaaagacatcaggaacgctgattagttttatttacccagcccaaaatccagagttgctaaataaactttcccaaagaaaaactacagttctggcaatggaccaggttccaagagtcacaattgctcagggatatgatgcgctaagctccatggccaacattgcgggttataaggctgttgtcctagcagcaaatcattttggacgtttttttactggtcagatcacagctgctggaaaagttcctccagctaagattctgatagttggtggtggtgttgctgggcttgcttctgcaggcgcagcaaagtcgatgggtgcaattgttcgaggatttgacacaagagctgcagctttggaacagttcaagtctcttggtgctgagcccttggaggtggacttgaaggaatctggtgagggacaaggaggatatgcaaaagagatgtccaaagagttcattgaagctgaaatgaaactctttgctcaacaatgcaaggaggtagacatccttatcagcacagcacttattccaggtaaaaaagctccagttttatttaataaagaaatgattgagtcaatgaaggaaggttcagttgttgtggatttagctgctgaggctggtggaaactttgaaaccactaagccaggagaactctacattcataagggaattactcacataggctacacagacctgcccagccgaatggccactcaggccagcaccctatattccaacaacatcaccaaactcctgaaggccatcagcccggacaaagataatttttattttgatgtgaaagatgactttgactttggtacgatgggtcatgtcattagaggaactgtagtgatgaaagatggtaaagtgattttcccagctcccacaccgaaaaatattcctcaaggtgccccagtaaaacagaagacagtggctgagctggaagctgaaaaagcagctaccattacacccttcaggaagacaatgtcaacggcttctgcatatacagcaggtctcacagggatactgggtttgggcattgcggctcccaatctagccttttctcagatggtgaccacttttggcttggctggcattgtggggtatcataccgtctggggagtgacccctgctctccactcaccactgatgtctgtgacaaatgcaatctcagggctgactgcagttggtgggttggcactgatgggaggacatttgtatccttccacaacttctcagggccttgctgctcttgctgcattcatatcctctgtcaacattgcaggtggctttctggtgactcagagaatgctggacatgttcaagcgtcccactgaccccccagaatacaactacctgtacctgctccctgccggcacctttgttggtggatatttagctgccctctacagtggttataacattgaacagatcatgtacctaggctcgggtttgtgctgtgtcggtgccttggctggcctctccacccagggaacagcacgtcttggcaatgcactgggcatgattggggttgctggaggactggcagccaccctcggagtcctaaaaccgggcccagaattactagctcagatgtctggagcgatggctttgggtggtaccattggattgacaattgccaaacgcatccagatttctgatttacctcaattagttgctgcttttcacagtttagtgggtttggcagcygtacttacttgcatagctgagtacattatagaatatccacattttgctacggatgcagcagcaaatctcaccaagattgtggcctacctcggcacttacattggtggcgtcacctttagtgggtctctcattgcctatggaaaattgcagggtctcctgaaatctgcccctctcctactgcctggaaggcacttactcaatgcaggcttactggctgctagtgtgggcgggataatcccattcatggtggacccaagctttactactggcatcacctgtctgggttcagtgtctgctctctctgctgtcatgggtgtgactttgacagctgctattgggggtgctgacatgcccgtcgttatcactgtgctgaacagctactcaggctgggccctgtgtgcagagggcttcctgctcaacaacaatctgctgaccatcgtgggtgcactcataggctcgtctggtgctatcctgtcatacatcatgtgtgtggcaatgaatcgctccctggctaatgtgattcttggaggctatggcaccacttcaacagctggtggaaaacccatggaaatttctggcacacatacggaaatcaaccttgacaatgcaattgacatgattcgagaagctaatagcattattattacaccaggctatggtctctgtgcagccaaagctcaataccccattgctgatttggtaaagatgctcactgagcaaggcaaaaaagtcaggtttggaattcacccagttgcrggccgaatgcctggtcagcttaatgtgctgctggctgaggctggtgtgccatatgacattgtgttggaaatggatgagatcaaccatgattttccagatactgatttggtccttgtaattggagctaatgacactgttaattcagcagctcaagaagatcccaactctattattgcaggcatgccagtccttgaggtctggaaatcaaagcaggtgattgttatgaagaggtctttgggtgttggctatgctgcagtggacaatccaatcwtctacaaacctaacacggccatgcttctaggtgatgccaagaaaacatgtgacgcgctccaggcgaaagttagagaatcctatcagaagtaaatattaaggatcaagctgttagctaataatgccacctctgcagttttggraacaggcaaataaagtatcagtatacatggtgatgtacatctgtagcaaagctcttggagaaaatgaagactgaagaaagcaaagcaaaaactgtatagagagatttttcaaaagcagtaatccctcaattttaaaaaaggattgaaaattctaaatgtctttctgtgcatattttttgtgttaggaatcaaaagtattttataaaaggagaaagaacagcctcattttagatgtagtcctgttggattttttatgcctcctcagtaaccagaaatgttttaaaaaactaagtgtttaggatttcaagacaacattatacatggctctgaaatatctgacacaatgtaaacattgcaggcacctgcattttatgttttttttttcaacaaatgtgactaatttgaaacttttatgaacttctgagctgtccccttgcaattcaaccgcagtttgaattaatcatatcaaatcagttttaattttttaaattgtacttcagagtctatatttcaagggcacattttctcactactattttaatacattaaaggactaaataatctttcagagatgctggaaacaaatcatttgctttatatgtttcattagaataccaatgaaacatacaacttgaaaattagtaatagtatttttgaagatcccatttctaattggagatctctttaatttcgatcaacttataatgtgtagtactatattaagtgcacttgagtggaattcaacatttgactaataaaatgagttcatcatgttggcaagtgatgtggcaattatctctggtgacaaaagagtaaaatcaaatatttctgcctgttacaaatatcaaggaagacctgctactatgaaatagatgacattaatctgtcttcactgtttataatacggatggattttttttcaaatcagtgtgtgttttgaggtcttatgtaattgatgacatttgagagaaatggtggytttttttagctacctctttgttcatttaagcaccagtaaagatcatgtctttttatagaagtgtagattttctttgtgactttgctatcgtgcctaaagctctaaatataggtgaatgtgtgatgaatactcagattatttgtctctctatataattagtttggtactaagtttctcaaaaaattattaacacatgaaagacaatctctaaaccagaaaaagaagtagtacaaattttgttactgtaatgctcgcrtttagtgagtttaaaacacacagtatcttttggttttataatcagtttctattttgctgtgcctgagattaagatctgtgtatgtgtgtgtgtgtgtgtgtgcgtttgtgtgttaaagcagaaaagacttttttaaaagttttaagtgataaatgcaatttgttaattgatcttagatcactagtaaactcagggctgaattataccatgtatattctattagaagaaagtaaacaccatctttattcctgcccttttycttctctcaaagtagttgtagttatatctagaaagaagcaattttgatttcttgaaaaggtagttcctgcactcagtttaaactaaaaataatcatacttggattttatttatttttgtcatagtaaaaattttaatttatatatatttttatttagtattatcttattctttgctatttgccaatcctttgtcatcaattgtgttaaatgaattgaaaattcatgccctgttcattttattttactttattggttaggatatttaaaggatttttgtatatataatttcttaaattaatattccaaaaggttagtggacttagattataaattatggcaaaaatctaaaaacaacaaaaatgatttttatacattctatttcattattcctctttttccaataagtcatacaattggtagatatgacttattttatttttgtattattcactrtatctttatgatatttaagtataaataattaaaaaaatttattgtaccttatagtctgtcaccaaaaaaaaaaaattatctgtaggtagtgaaatgctaatgttgatttgtctttaagggcttgttaactatcctttattttctcatttgtcttaaattaggagtttgtgtttaaattactcatctaagcaaaaaatgtatataaatcccattactgggtatatacccaaaggattataaatcatgctgctataaagacacatgcacacgtatgtttattgcagcactattcacaatagcaaagacttggaaccaacccaaatgtc

SEQ ID NO: 1068 - DNA, 5733 bp, Homo sapiens
gcgcagcgccgcggggcccaagcccgggtctgccagcgcgacgtcctctcgcggccctcagggcacagcccaaggctgtcagcctcccggcccagtgatttgccttcaaggaaactggggagycagaaaattgggaactcatatcaacatggcaaacctattgaaaacagtggtgactggctgctcgtgtcctytacttagcaatttggggtcctgtaagggtctacrtgtgaagaaggattttttacgaacattttatactcaccaagaactgtggtgtaaagcgcctgtaaaaccaggaattccatataagcaactgactgttggagtccccaragagatattccaaaatgagaagcgagtggcattgtctcctgctggtgttcagaacttggtcaagcagggttttaatgttgtcgtggaatcgggtgcgggcgaagcttccaagttctcagatgatcactatagagtggcaggtgcccaaatccaaggggcaaaggaagtgctggcttctgatttggtggtcaaagtgcgagcccctatggttaatccaacattaggtgttcatgaagctgaccttttaaagacatcaggaacgctgattagttttatttacccagcccaaaatccagagttgctaaataaactttcccaaagaaaaactacagttctggcaatggaccaggttccaagagtcacaattgctcagggatatgatgcgctaagctccatggccaacattgcgggttataaggctgttgtcctagcagcaaatcattttggacgtttttttactggtcagatcacagctgctggaaaagttcctccagctaagattctgatagttggtggtggtgttgctgggcttgcttctgcaggcgcagcaaagtcgatgggtgcaattgttcgaggatttgacacaagagctgcagctttggaacagttcaagtctcttggtgctgagcccttggaggtggacttgaaggaatctggtgagggacaaggaggatatgcaaaagagatgtccaaagagttcattgaagctgaaatgaaactctttgctcaacaatgcaaggaggtagacatccttatcagcacagcacttattccaggtaaaaaagctccagttttatttaataaagaaatgattgagtcaatgaaggaaggttcagttgttgtggatttagctgctgaggctggtggaaactttgaaaccactaagccaggagaactctacattcataagggaattactcacataggctacacagacctgcccagccgaatggccactcaggccagcaccctatattccaacaacatcaccaaactcctgaaggccatcagcccggacaaagataatttttattttgatgtgaaagatgactttgactttggtacgatgggtcatgtcattagaggaactgtagtgatgaaagatggtaaagtgattttcccagctcccacaccgaaaaatattcctcaaggtgccccagtaaaacagaagacagtggctgagctggaagctgaaaaagcagctaccattacacccttcaggaagacaatgtcaacggcttctgcatatacagcaggtctcacagggatactgggtttgggcattgcggctcccaatctagccttttctcagatggtgaccacttttggcttggctggcattgtggggtatcataccgtctggggagtgacccctgctctccactcaccactgatgtctgtgacaaatgcaatctcagggctgactgcagttggtgggttggcactgatgggaggacatttgtatccttccacaacttctcagggccttgctgctcttgctgcattcatatcctctgtcaacattgcaggtggctttctggtgactcagagaatgctggacatgttcaagcgtcccactgaccccccagaatacaactacctgtacctgctccctgccggcacctttgttggtggatatttagctgccctctacagtggttataacattgaacagatcatgtacctaggctcgggtttgtgctgtgtcggtgccttggctggcctctccacccagggaacagcacgtcttggcaatgcactgggcatgattggggttgctggaggactggcagccaccctcggagtcctaaaaccgggcccagaattactagctcagatgtctggagcgatggctttgggtggtaccattggattgacaattgccaaacgcatccagatttctgatttacctcaattagttgctgcttttcacagtttagtgggtttggcagcygtacttacttgcatagctgagtacattatagaatatccacattttgctacggatgcagcagcaaatctcaccaagattgtggcctacctcggcacttacattggtggcgtcacctttagtgggtctctcattgcctatggaaaattgcagggtctcctgaaatctgcccctctcctactgcctggaaggcacttactcaatgcaggcttactggctgctagtgtgggcgggataatcccattcatggtggacccaagctttactactggcatcacctgtctgggttcagtgtctgctctctctgctgtcatgggtgtgactttgacagctgctattgggggtgctgacatgcccgtcgttatcactgtgctgaacagctactcaggctgggccctgtgtgcagagggcttcctgctcaacaacaatctgctgaccatcgtgggtgcactcataggctcgtctggtgctatcctgtcatacatcatgtgtgtggcaatgaatcgctccctggctaatgtgattcttggaggctatggcaccacttcaacagctggtggaaaacccatggaaatttctggcacacatacggaaatcaaccttgacaatgcaattgacatgattcgagaagctaatagcattattattacaccaggctatggtctctgtgcagccaaagctcaataccccattgctgatttggtaaagatgctcactgagcaaggcaaaaaagtcaggtttggaattcacccagttgcrggccgaatgcctggtcagcttaatgtgctgctggctgaggctggtgtgccatatgacattgtgttggaaatggatgagatcaaccatgattttccagatactgatttggtccttgtaattggagctaatgacactgttaattcagcagctcaagaagatcccaactctattattgcaggcatgccagtccttgaggtctggaaatcaaagcaggtgattgttatgaagaggtctttgggtgttggctatgctgcagtggacaatccaatcwtctacaaacctaacacggccatgcttctaggtgatgccaagaaaacatgtgacgcgctccaggcgaaagttagagaatcctatcagaagtaaatattaaggatcaagctgttagctaataatgccacctctgcagttttggraacaggcaaataaagtatcagtatacatggtgatgtacatctgtagcaaagctcttggagaaaatgaagactgaagaaagcaaagcaaaaactgtatagagagatttttcaaaagcagtaatccctcaattttaaaaaaggattgaaaattctaaatgtctttctgtgcatattttttgtgttaggaatcaaaagtattttataaaaggagaaagaacagcctcattttagatgtagtcctgttggattttttatgcctcctcagtaaccagaaatgttttaaaaaactaagtgtttaggatttcaagacaacattatacatggctctgaaatatctgacacaatgtaaacattgcaggcacctgcattttatgttttttttttcaacaaatgtgactaatttgaaacttttatgaacttctgagctgtccccttgcaattcaaccgcagtttgaattaatcatatcaaatcagttttaattttttaaattgtacttcagagtctatatttcaagggcacattttctcactactattttaatacattaaaggactaaataatctttcagagatgctggaaacaaatcatttgctttatatgtttcattagaataccaatgaaacatacaacttgaaaattagtaatagtatttttgaagatcccatttctaattggagatctctttaatttcgatcaacttataatgtgtagtactatattaagtgcacttgagtggaattcaacatttgactaataaaatgagttcatcatgttggcaagtgatgtggcaattatctctggtgacaaaagagtaaaatcaaatatttctgcctgttacaaatatcaaggaagacctgctactatgaaatagatgacattaatctgtcttcactgtttataatacggatggattttttttcaaatcagtgtgtgttttgaggtcttatgtaattgatgacatttgagagaaatggtggytttttttagctacctctttgttcatttaagcaccagtaaagatcatgtctttttatagaagtgtagattttctttgtgactttgctatcgtgcctaaagctctaaatataggtgaatgtgtgatgaatactcagattatttgtctctctatataattagtttggtactaagtttctcaaaaaattattaacacatgaaagacaatctctaaaccagaaaaagaagtagtacaaattttgttactgtaatgctcgcrtttagtgagtttaaaacacacagtatcttttggttttataatcagtttctattttgctgtgcctgagattaagatctgtgtatgtgtgtgtgtgtgtgtgtgcgtttgtgtgttaaagcagaaaagacttttttaaaagttttaagtgataaatgcaatttgttaattgatcttagatcactagtaaactcagggctgaattataccatgtatattctattagaagaaagtaaacaccatctttattcctgcccttttycttctctcaaagtagttgtagttatatctagaaagaagcaattttgatttcttgaaaaggtagttcctgcactcagtttaaactaaaaataatcatacttggattttatttatttttgtcatagtaaaaattttaatttatatatatttttatttagtattatcttattctttgctatttgccaatcctttgtcatcaattgtgttaaatgaattgaaaattcatgccctgttcattttattttactttattggttaggatatttaaaggatttttgtatatataatttcttaaattaatattccaaaaggttagtggacttagattataaattatggcaaaaatctaaaaacaacaaaaatgatttttatacattctatttcattattcctctttttccaataagtcatacaattggtagatatgacttattttatttttgtattattcactrtatctttatgatatttaagtataaataattaaaaaaatttattgtaccttatagtctgtcaccaaaaaaaaaaaattatctgtaggtagtgaaatgctaatgttgatttgtctttaagggcttgttaactatcctttattttctcatttgtcttaaattaggagtttgtgtttaaattactcatctaagcaaaaaatgtatataaatcccattactgggtatatacccaaaggattataaatcatgctgctataaagacacatgcacacgtatgtttattgcagcactattcacaatagcaaagacttggaaccaacccaaatgtc

SEQ ID NO: 1069 - DNA, 1872 bp, Homo sapiens
cacgggggccctgctactggctgcagctccagccctgcctccttctccagcatataaacaatccaacagcctcactgaatcactgctgtgcagggcaggaaagctccacacacacagcccagcaaacagcagcacgctgctgaaaaaaagactcagaggagagagataaggaaggaaagtagtgatggatctcatcccaaacttggccgtggaaacctggcttctcctggctgtcagcctgatactcctctatctatatggaacccgtacacatggactttttaagaagcttggaattccagggcccacacctctgccttttttgggaaatgctttgtccttccgtaagggctattggacgtttgacatggaatgttataaaaagtatagaaaagtctggggtatttatgactgtcaacagcctatgctggctatcacagatcccgacatgatcaaaacagtgctagtgaaagaatgttattctgtcttcacaaaccggaggcctttcgggccagtgggatttatgaaaaatgccatctctatagctgaggatgaagaatggaagagaatacgatcattgctgtctccaacattcaccagcggaaaactcaaggagatggtccctatcattgcccagtatggagatgtgttggtgagaaatctgaggcgggaagcagagacaggcaagcctgtcaccttgaaacacgtctttggggcctacagcatggatgtgatcactagcacatcatttggagtgagcatcgactctctcaacaatccacaagacccctttgtggaaaacaccaagaagcttttaagatttaatccattagatccattcgttctctcaataaaagtctttccattccttaccccaattcttgaagcattaaatatcactgtgtttccaagaaaagttataagttttctaacaaaatctgtaaaacagataaaagaaggtcgcctcaaagagacacaaaagcaccgagtggatttccttcagctgatgattgactctcagaattcaaaagactctgagacccacaaagctctgtctgatctggagctcatggcccaatcaattatctttatttttgctggctatgaaaccamgagcagtgttctctccttcattatatatgaactggccactcaccctgatgtccagcagaaagtgcagaaggaaattgatacagttttacccaataaggcaccacccacctatgatactgtgctacagttggagtatcttgacatggtggtgaatgaaacactcagattattcccagttgctatgagacttgagagggtctgcaaaaaagatgttgaaatcaatgggatgtttattcccaaaggggtggtggtgatgattccaagctatgttcttcatcatgacccaaagtactggasagagcctgagaagttcctccctgaaaggttcagtaaaaagaacaaggacaacatagatccttacatatacacaccctttggaagtggacccagaaactgcattggcatgaggtttgctctcgtgaacatgaaacttgctctagtcagagtccttcagaacttctccttcaaaccttgtaaagaaacacagatccccctgaaattacgctttggaggacttcttctaacagaaaaacccattgttctaaaggctgagtcaagggatgagacctttgtagatatggagcccattcacatggactttttaagaagcttggcattccagggcccacacctctgctttttttgggaactactttgtcctaccatcagatcccgctgaaattacgcttaggaggacttcttcaaccagaaaaacccattgttctaaaggttgagtcaagggatgggaccgtaagtgga

SEQ ID NO: 1070 - DNA, 2159 bp, Homo sapiens
cacgggggccctgctactggctgcagctccagccctgcctccttctccagcatataaacaatccaacagcctcactgaatcactgctgtgcagggcaggaaagctccacacacacagcccagcaaacagcagcacgctgctgaaaaaaagactcagaggagagagataaggaaggaaagtagtgatggatctcatcccaaacttggccgtggaaacctggcttctcctggctgtcagcctgatactcctctatctatatggaacccgtacacatggactttttaagaagcttggaattccagggcccacacctctgccttttttgggaaatgctttgtccttccgtaagggctattggacgtttgacatggaatgttataaaaagtatagaaaagtctggggtatttatgactgtcaacagcctatgctggctatcacagatcccgacatgatcaaaacagtgctagtgaaagaatgttattctgtcttcacaaaccggaggcctttcgggccagtgggatttatgaaaaatgccatctctatagctgaggatgaagaatggaagagaatacgatcattgctgtctccaacattcaccagcggaaaactcaaggagatggtccctatcattgcccagtatggagatgtgttggtgagaaatctgaggcgggaagcagagacaggcaagcctgtcaccttgaaacacgtctttggggcctacagcatggatgtgatcactagcacatcatttggagtgagcatcgactctctcaacaatccacaagacccctttgtggaaaacaccaagaagcttttaagatttaatccattagatccattcgttctctcaataaaagtctttccattccttaccccaattcttgaagcattaaatatcactgtgtttccaagaaaagttataagttttctaacaaaatctgtaaaacagataaaagaaggtcgcctcaaagagacacaaaagcaccgagtggatttccttcagctgatgattgactctcagaattcaaaagactctgagacccacaaagctctgtctgatctggagctcatggcccaatcaattatctttatttttgctggctatgaaaccamgagcagtgttctctccttcattatatatgaactggccactcaccctgatgtccagcagaaagtgcagaaggaaattgatacagttttacccaataaggcaccacccacctatgatactgtgctacagttggagtatcttgacatggtggtgaatgaaacactcagattattcccagttgctatgagacttgagagggtctgcaaaaaagatgttgaaatcaatgggatgtttattcccaaaggggtggtggtgatgattccaagctatgttcttcatcatgacccaaagtactggasagagcctgagaagttcctccctgaaaggttcagtaaaaagaacaaggacaacatagatccttacatatacacaccctttggaagtggacccagaaactgcattggcatgaggtttgctctcgtgaacatgaaacttgctctagtcagagtccttcagaacttctccttcaaaccttgtaaagaaacacagatccccctgaaattacgctttggaggacttcttctaacagaaaaacccattgttctaaaggctgagtcaagggatgagaccgtaagtggagcctgatttccctaaggacttctggtttgctcttyaagaaagctgtgccccagaacaccagagacctcaaattactttacaaatagaaccctgaaatgaagacgggcttcatccaatgtgctgcataaataatcrgggattctgtacgtgcattgtgctctctcatggtctgtatagagtgttatacttggtaatatagaggagatgaccaaatcagtgctggggaagtagatttggcttctctgcttctcataggactatctccaccacccccagttagcaccattaactcctcctgagctctgataacataattaacatttctcaataatttcaaccacaatcattaataaaaataggaattattttgatggctctaacagtgacatttatatcatgtgttatatctgtagtattctatagtaagctttatattaagcaaatcaataaaaacctctttacaaaagta

SEQ ID NO: 1071 - DNA, 1059 bp, Homo sapiens
atgaccccgtacgactctcgctgtcccccaaagctgcaaatatctgcacctgcacagctgycgcctcattccctgccctcttcggggacccagttcccaaatccaccagcccactcccttcgacatcgccccagcaggagacgagaaagggacaccaagaggcacggtgcttcttccccacctaagcctgcggcctgcggacaccccaatgcaccctgcgcccgggacaccgccgaccccgccccgctttgctctttgacagctttcttcccgccaggccccctccacccgatcgccgcgcgctctccgaaccaaaaggcgacctcacgaaatgcccctttgagctcaaaggctagttacccccaggggcccttccactctcggggacaggcgaaacctctttgtctctgcctcggcctgcggcccccagcccagcctccgcgctttccctccgccagtccttgtcaatcaaacctggtgccaaacgcggcagctgaagttttcagggacacatttgcttctccccttgaagaaccagttacaaagcgtgatgtcctctctggggtcccatcagaacaaagaaacagtctcatggtgatggaagctgtacatttttccgaagggaccgagaagcggctggaggtttggttctcctggcagcagcccaatgcaaaccaaggatctggggatcttcgcactatcccaagatctgaaaaggtaatcagtcagccagatcaaaccctggaaaatttgatgagtgggcttgacccagcagttatggaccagttctacatgaaagatggcgttactgcaaaggatgtcatttgtgagagtggaattcacaacctgataccaggttctgtcattaatgccacaatgttcaatccttatgggtattcgatgaatggaatgaaatcagatggaacttattggactattcacatcactccagaaccagaatctttttataagattgaaggttttaagcgtcttgattgccagagtgctatgttcaatgattacaattttgtttttaccagttttgctaagaagcagcaa

SEQ ID NO: 1072 - DNA, 1384 bp, Homo sapiens
ctagtttctcaggatcatgtctgtragccaggattcctgatccagagacaatggccccgatgggatggagcccgaakgcgtcatcgagagtaactggaatgagattgttgacagctttgatgacatgaacctctcggagtcccttctccgtgacatctatgcctatggttttgagaagccctctgccatccagcagcaagccattctaccttgtatcaggggttataatgtaatcgctcaagcctgatctgggactgggaaaatggccacatttgccatatcgattctgcagcagattgcattagatctaaaagccacccaggccttggtcctagcacccactcgagaattggctcagcrgatacagaaggtggtcatggcactagtagactacatgggtgcctcctgtcatgcctgtatcaggggcaccaatgtgcgtgctgaggtgcagaaactgcagatggaagctccccacatcatcgtgggtacccctagctgtgtgtttgatatgcttaaccggagatacctatctcccaaatacatcaagatgtttgtactggatgaagctgacgaaatgttaagccgtggattcaaggaccagatctatgacatattccaaaagctcaacagcaacacccaggtagttttgctgtcagctacaatgccttctgatgtgcttgaggtgatcaagaagttcatgagggaccccattcggattcttgtcaagaaggaagagttgaccctggagggtatccgccaattctacatcaacgtggaacgagaggagtggaagctggacacactatgtgacttgtatgaaaccctgaccatcacccaggcagtcatcttcatcaatacccggaggaaggtggactggctcaccgagaagatgcatgctcgagatttcactgtctccgccatgcatggagatatggaccaaaaggagcgagacgtgatcacgagggagtttcgttctggctctagcagagttttgattaccactgacctgctgsccagaggcattgatgtgcagcaggtttctttagtcatcaactatgaccttcccaccaacagggaaaactatatccacagaatcagtcgaggtggacagtttggccgtaaagatgtggctattaacatggtgacagaagaagacaagaggactcttcgagacattgagaccttctacaacacctccattgaggaaatgcccccaatgttgctgacctcatctgaggggctgtcctgccacccagccccagccagggctcaatctcggggggctgaggagcagcaggagaggggaaggaagggagccaagggatagacatcttgtcattttttttctttgaataaatgtcactttttgaggcaaaaaaaaaaa

SEQ ID NO: 1073 - DNA, 5444 bp, Homo sapiens
cgggagattcgggaccatggcacctgtgcacggcgacgactctctgtcagattcagggagttttgtatcttctcgagcccggcgagaaaaaaaatcaaagaaggggcgccaagaagccctagaaagactgaaaaaggctaaagctggtgagaagtataaatatgaagtcgaggacttcacaggtgtttatgaagaagttgatgaagaacagtattcgaagctggttcaggcacgccaggatgatgactggattgtggatgatgatggtattggctatgtggaagatggccgagagatttttgatgatgaccttgaagatgatgcccttgatgctgatgagaaaggaaaagatggtaaagcacgcaataaagacaagaggaatgtaaagaagctcgcagtgacaaaaccgaacaacattaagtcaatgttcattgcttgtgctggaaagaaaactgcagataaagctgtagacttgtccaaggatggtctgctaggtgacattctacaggatcttaacactgagacacctcaaataactccaccacctgtaatgatactgaagaagaaaagatccattggagcttcaccgaatcctttctctgtgcacaccgccacggcagttccttcaggaaaaattgcttcccctgtctccagaaaggagcctccattaactcctgttcctcttaaacgtgctgaatttgctggcgatgatgtacaggtcgagagtacagaagaagagcaggagtcaggggcaatggagtttgaagatggtgactttgatgagcccatggaagttgaagaggtggacctggagcctatggctgccaaggcttgggacaaagagagtgagccagcagaggaagtgaaacaagaggcggattctgggaaagggaccgtgtcctacttaggaagttttctcccggatgtctcttgttgggacattgatcaagaaggtgatagcagtttctcagtgcaagaagttcaagtggattccagtcacctcccattggtaaaaggggcagatgaggaacaagtattccacttttattggttggatgcttatgaggatcagtacaaccaaccaggtgtggtatttctgtttgggaaagtttggattgaatcagccgagacccatgtgagctgttgtgtcatggtgaaaaatatygagcgaacgctttacttccttccccgtgaaatgaaaattgatctaaatacggggaaagaaacaggaactccaatttcaatgaaggatgtttatgaggaatttgatgagaaaatagcaacaaaatataaaattatgaagttcaagtctaagccagtggaaaagaactatgcttttgagatacctgatgttccagaaaaatctgagtacttggaagttaaatactcggctgaaatgccacagcttcctcaagatttgaaaggagaaactttttctcatgtatttgggaccaacacatctagcctggaactgttcttgatgaacagaaagatcaaaggaccttgttggcttgaagtaaaaagtccacagctcttgaatcagccagtcagttggtgtaaagttgaggcaatggctttgaaaccagacctggtgaatgtaattaaggatgtcagtccaccaccgcttgtcgtgatggctttcagcatgaagacaatgcagaatgcaaagaaccatcaaaatgagattattgctatggcagctttggtccatcacagttttgcattggataaagcagccccaaagcctccctttcagtcacacttctgtgttgtgtctaaaccaaaggactgtatttttccatatgctttcaaagaagtcattgagaaaaagaatgtgaaggttgaggttgctgcaacagaaagaacactgctaggttttttccttgcaaaagttcacaaaattgatcctgatatcattgtgggtcataatatttatgggtttgaactggaagtactactgcagagaattaatgtgtgcaaagctcctcactggtccaagataggtcgactgaagcgatccaacatgccaaagcttgggggccggagtggatttggtgaaagaaatgctacctgtggtcgaatgatctgtgatgtggaaatttcagcaaaggaattgattcgttgtaaaagctaccatctgtctgaacttgttcagcagattctaaaaactgaaagggttgtaatcccaatggaaaatatacaaaatatgtacagtgaatcttctcaactgttatacctgttggaacacacctggaaagatgccaagttcattttgcagatcatgtgtgagctaaatgttcttccattagcattgcagatcactaacatcgctgggaacattatgtccaggacgctgatgggtggacgatccgagcgtaacgagttcttgttgcttcatgcattttacgaaaacaactatattgtgcctgacaagcagattttcagaaagcctcagcaaaaactgggagatgaagatgaagaaattgatggagataccaataaatacaagaaaggacgtaagaaagcagcttatgctggaggcttggttttggaccccaaagttggtttttatgataagttcattttgcttctggacttcaacagtctatatccttccatcattcaggaatttaacatttgttttacaacagtacaaagagttgcttcagaggcacagaaagttacagaggatggagaacaagaacagatccctgagttgccagatccaagcttagaaatgggcattttgcccagagagatccggaaactggtagaacggagaaaacaagtcaaacagctaatgaaacagcaagacttaaatccagaccttattcttcagtatgacattcgacagaaggctttgaagctcacagcgaacagtatgtatggttgcctgggattttcctatagcagattttacgccaaaccactggctgccttggtgacatacaaaggaagggagattttgatgcatacgaaagagatggtacaaaagatgaatcttgaagttatttatggagatacagattcaattatgataaacaccaatagcaccaatctggaagaagtatttaagttgggaaacaaggtaaaaagtgaagtgaataagttgtacaaactgcttgaaatagacattgatggggttttcaagtctctgctactgctgaaaaaaaagaagtacgctgctctggttgttgagccaacgtcggatgggaattatgtcaccaaacaggagctcaaaggattagatatagttagaagagattggtgtgatcttgctaaagacactggaaactttgtgattggccagattctttctgatcaaagccgggacactatagtggaaaacattcagaagaggctgatagaaattggagaaaatgtgctaaatggcagtgtcccagtgagccagtttgaaattaacaaggcattgacaaaggatccccaggattaccctgataaaaaaagcctacctcatgtacatgttgccctctggataaattctcaaggaggcagaaaggtgaaagctggagatactgtgtcatatgtcatctgtcaggatggatcaaacctcactgcaagtcagagggcctatgcgcctgagcagctgcagaaacaggataatctaaccattgacacccagtactacctggcccagcagatccacccagtcgtggctcggatctgtgaaccaatagacggaattgatgctgtcctcattgcaacgtggttgggacttgaccccacccaatttagagttcatcattatcataaagatgaagagaatgatgctctacttggtggcccagcacagctcactgatgaagagaaatacagggactgtgaaagattcaaatgtccatgccctacatgtggaactgagaatatttatgataatgtctttgatggttcgggaacagatatggagcccagcttgtatcgttgcagtaacatcgattgtaaggcttcacctctgacctttacagtacaactgagcaacaaattgatcatggacattagacgtttcattaaaaagtactatgatggctggttgatatgtgaagagccaacctgtcgcaatcgaactcgtcaccttccccttcaattctcccgaactgggcctctttgcccagcctgcatgaaagctacacttcaaccagagtattctgacaagtccctgtacacccagctgtgcttttaccggtacatttttgatgcggagtgtgcactggagaaacttactaccgatcatgagaaagataaattgaagaagcaattttttacccccaaagttctgcaggactacagaaaactcaagaacacagcagagcaattcttgtcccgaagtggctactccgaagtgaatctgagcaaactcttcgctggttgtgccgtgaaatcctaagggaatcccaggagtaaccaaggagggggtagttgaaaaatcccagcttcctctgtgcctccactctggccctaaatgctcctccagcatctgtttctcccttgggactgtgtctcatgtttgtgtgaatgtagaccaggaaagggggctgcaaaaatgttgagtctaatgttcgtaagcatcatagaaattcctgtcttcatattaagatgtactgctttaaaacacaactccagagcccctccccaagctcccctccccaagctcctgaagacccggtttctgagggagggaaattgctacttggattgagagtagctggaatgtaagtgaccccaggctttgcctcagggcctttagcctatgtcccccccacataaagagagcttctcagagcctgactgaagagctgacgttttgctttttcatatgccaattaaacccggtctaaatccaaatgcttctccagccatccaggagtggctgtccttttcagtcttgtcttttatataggtagctgagggggaagatttagaagccttgcactcactaaatagattaaacagagcaggcttgtttgttgaattgctccaaagtccaacagacacacactgagcaggtgttttacactcacattccctttttgccccttaaatagaaagtgcaggtaaaggtttatacaacaagaaagcacattgaaaataatttgatactctaacaatccattaacatgtgtaggggttacggtgaggatcactgtgttgtattcagaaaaacggggagagggatgcttaattggccctggcgcttgctatttttttctcatttcttcacaataggaccgtctttggcagcagcaaaatgtatttcagtatggcagtctttcctctcttacattattggtaagattatactaacaaaatgtttccccttgtacaattatgctgtgtttttaaaaaacattgacctgtgtgtttttataaaagaaaaagtatgttgtgccttcttcttaagaataaagttttctaaagggaaagca

SEQ ID NO: 1074 - DNA, 1281 bp, Homo sapiens
atgccggcaactggtgcttccaatcctagacgctatgtccagcaaagactccatggttctggcctacagtggggcctggacacctcctgcatcctcatgtggccgaagraamaaggctatgacataattgcctacctagccaacattggccagaaggaagacttcgaggaagccaggaagaaggcactgaagcttggggccaaaaaggtgttcattgaggatgccagcagggagtttgtggaggagttcatctggccggccatccagtccagggcactgtatgaagaccactgcctcctgggcacctctcttgccaggccctgcattgcctgcaaacaaatggaaattgtccagcaggagggggccaagtatgtgtcccacggtgccacgggaaaggggaccgatcagttctgatttgaactcacctgctactcactggccccccccsagataaaggtcattgctccctggaggatgcccgagttctacaactggttcaaggccttcaatgacctgatggaagaatayacaaaagcaacacgggattcccatcctggtcacttccaagaagccatggagcatggaacagaacctcatgcacatcagctgtgaggctggaatcctggagaaccccaagaactaagtgcctccaggtctctacacgaagacccaggacctggccaaagcccccaacacccctgatattctcgagttccaaaacggggtccctgtgaaggtgaccaacgtcaaggatggcaccacccaccagacctccttggtaccttggtacctccttttcatgtacctaaacgaagtcacgggcaagcagggtgtagccatactgacatcgtggagaaccgcttcattggaatgaagtcccaaggtatctaggataccccagcaggcaccatcctttaccacgctcatttagacatcaaggccttcaccatggacctggaagtgcgcaaaaycaaacaaggcctgggcttggaatttgctgagctggtgtataccggtttctggcacagaccagagtgtgaatttgtccgccactgcattgccaagttccaggagcgagtagaagggaaagtgcaggtgtccgtcctcaagggccaggtgtacatcctcagctgggagtacgcactgtctctctacagccagttgctggtgagcatgaaagtgcaggatgattatgagccaattgatgccatcaggttcatcaacatcaattccctcacgctgagggaatatcatcgtytccagagcaaggtcactgccaaa

SEQ ID NO: 1075 - DNA, 2813 bp, Homo sapiens
gcggccctgcccccggcacggcccccaggtgcgctccttctccggctgcttgtagcactggtctcactgtccccgccgtcagccaccggttccttatccgtctcattccccattgtggcttggctgagccggtcgccaggcctcgctgtcctcctttrccttcctctctcctcagcggccgtactttgcgccgtacctcacctggcctgcaggatgaagaaccccatgctggaggtggtgtctttactactggagaagctgctcctcatctccaacttcacgctctttagttcgggcgccgcgggcgaagacaaagggaggaacagtttttatgaaaccagctctttccaccgaggcgacgtgctggaggtgccccggacccacctgacccactatggcatctacctaggagacaaccgtgttgcccacatgatgcccgacatcctgttggccctgacagacgacatggggcgcacgcagaaggtggtctccaacaagcgtctcatcctgggcgttattgtcaaagtggccagcatccgcgtggacacagtggaggacttcgcctacggagctaacatcctggtcaatcacctggacgagtccctccagaaaaaggcactgctcaacgaggaggtggcgcggagggctgaaaagctgctgggctttaccccctacagcctgctgtggaacaactgcgagcacttcgtgacctactgcagatatggcaccccgatcagtccccagtccgacaagttttgtgagactgtgaagataattattcgtgatcagagaagtgttcttgcttcagcagtcttgggattggcgtctatagtctgtacgggcttggtatcatacactacccttcctgcaatttttattccattcttcctatggatggctggctaacttcatacccccatgtcagtgtgtgtattctgtatgtaaatatgtttatatttatagagcatcaatcaatataagcattattgagaaaaatgtgacccgtaacactgtgttctggataaaaatgtgattaggaatcacgcaaagtgcttactgtgtaagcccaagaacaaaggctttctgaatcttctcaggcagttcagatttaaagcaccatccaaaccttggaaatacgacagggtgtggtagaattcagcaatatgagaaaaccagcccctaaaatgatagccacaagagattaattgtgtttttttttctcctgtaatccttgtactgttcggctgaatttgaagattggaagacttatattgagaccagtaactttactgtaaatttactttgtttcattgaaaaaacaaattgataaacatattaaactggaagaattttctttattcaaatgaaaacatgtttgatgactggtcaaaaaataagctcataatctatttttttcatgtagtatataagtcaagaatgttttattgtcattatgtgaaaccaatattggcaaatagtactttaatgatgaagtaaatgaccagaaattatagaaatctgtgttttcctgtaaaaatagcactatagtatcacttgaacaatttgatttggctttacttactaggaagcctggaattcattatttttttccttttatgtgccactgtggctactttaaatcactctgagaggtaaatggatataggattgaagttatgtgggtatttggcatgtgtgtgtgaaataaatatgtagatagtcacatatacacagactgagagataaattgttcttgattgctttattatcatcatactagtgtgttcattatagagtatctgtagaggtgaatgtaaaagtaagtccaatctattttcttatgtcattgaatttgtagtgttaacttgcatatatgttattggatgggttgtcttttaaagcatttactaatgtactctgaaatttttaaaagccttcagatttgttttctagtcacttttttccatatcatttctaattatagtttatatccttaaaagaaggatgccacagtagtatgtaaaacccaaacaagtagaacccaagcaaataaaattatttaaaataattttaaagtggcttagtactgccagtcatgtaaattgattctgctgagggtcttataagaattgagatataacaatggtaaaacaagcattcaagcacttttacaaaattaccaaattcttaaaatgaagccacagctagacttgcatttcaggtattaaaattgctttcttaactgtcaagaatcacaaaataacaaatcatattatgagtgaatatggggagggcggggccaatcagtcaatgataatctgaacaaattttaagagcagattttagattaataatgttttatcaccactaatttgcccacaacaaactcagtatttaatttttcaaattaaatattaaattatttaagtattttaaataattaaaacattaaatggcaacaccatagaatataggtgttctctggacctattctaaccacttaaaattatcttaagtatgcatacataaaagcaaccactatgagaactaccgtgttagtggtttttcacttactgtatattacccttgtaggaatagtttaaggaaattcatttcttaaaaatatagtgtcctcaaataattaatttttttgcaaactttagttattacaggcagcaaaaaccactgtctgaaactaaatctgtgttcaaagatgaagacccctcattaaaagccaaggacgttcttaagattggaactgacataattagtcttgacttacttcattaaagcaagattcaattccttgttca

SEQ ID NO: 1076 - DNA, 2281 bp, Homo sapiens
atggtggtctacysggcgattggcagcctcagccacttctctgccttcaggatcctccgctcccaaggttatatacgccgcaattttacagggtcctttgctttgctgaccagaacccatattaactatggagtcaaaggggatgtgatagttatttaaattaactctcyccattcaaagataaatacgctgaataaacaaacagctgcattcagagttcacggaagttatgaatgaaatctgggctagtgatcaaatcagaagtgccatccttatctcaccaaagccaggctgctttattgtaggtgctgatatcaacattttagccacttgcaagacccctcaagaagtaacacagataccacaagaagcacagagaacatttgagaaacttgaaaagtccataaagcctgttgtgactgccatcagtggatcctgccattttatgccaatataaaatagcaacaaaagacagaaaaacagtattcggygctcctgaagtcttgctggggatcttaccaggagcaggaggcacacaaaggctgcccaaaatggtgggtgtgcctgckgcttttgacatgatgctgactggyagaaacatccgtgcagacagggcaaagaaaatgggactggttgaccaattggtggaatctctgcgaccaggactaaaacttccagaggaatggacaatcaaatacytagaagaagttgcaattactttcccaaaggactagctgataagaagatctctccaaagagagacaagggattagtggaaaaattaacagcgtatgccatgactattccatttgtcaggcaacagatttacaaaaaagtggaagaaaaagtgtgaaagcggactaaagggctttccctttatcccacacctctgaaaataattgatgtggtaaagactggaattgagcaagggagcgatgctggttatctctctgaatctcagaaattcggagagcttgcaatgaccaaagaatcaaaggccttgatgggactctaccatggtcaggtcctgtgcaagaagaatacatctggagctccacagaaggatgttaagcatctggctattcctggtgcagggatgatgggagcaggcattgcccaagtctccgtggataaggggcgaaagactatacttaaagatgccacactcactgggttaggctgaggacagcaacaagtgttcaaaggattgaatgacaaagtaaagaagaaagctctaacgtcatttgaaagggattccatcttcagcaacttgactgggaagcttgattaccaaggttttgaaagacagacatggtgatggatgctgtccatccatcacaacttccttagttttaagcacagagtgctaaaggaagtagaagcagtgattccagatcactacgtctttgctagtaacacatctcctctcccagtcagtgaaatcgctgctgtcagcaaaagacctgagaaggtgattggcaggcactacttctctcccgcagacaagatgcagctgctggagatgatcacaaccaagaagacttccaaagacaccagtgcttcaactgtagcaatcggtctcaagcaggggaaggtcatcattgtggttaaggatggacctggcttctatacyaccaggtgtcttgcacccatgatgtctgaagtcatcygaatcctccaggaaggagttgacccaaagaagctggattccctgaccacaagccttggccttcctgtgggtgcygccacactggtggatgaagttggcgtggatgtagcgaaacatgtggccaaagatctgggcaaagcctttggggagcagtttggaggtggaaacccagaactactgacatagatggtgtccaagggcttcctaggtcgccagtctgggaagggcttttccatctatcaggagagtgtgaagaataagaatttgaattctgacatgaacggtattttagcaagtctgaagatgcctcctaagtctgaagtctcctcagatgaagacatccagttcygcctgctgacaagatttgtgaatgaggcagtcacgtgcccgcaagaggggatcytggccacacctgcagagggagacattggagccgtcttcgggctcagcttcccaccttgtcttggagggcctttctgctttgtggatctgtatgaagcccagaagatagtggacsggctcaagaagtatgaggctgcctatggaaaagagttcaccccaagccagctgctagctgaccacactaacagccctaacaagaagtttcatcag

SEQ ID NO: 1077 - DNA, 2248 bp, Homo sapiens
taggagaaggcacagcccctggagggcgggagtggggctgctgcagacggctgtctcctgcctcctggctcttgcactgccaggaacacgctctccccaacacctccatggctcattccccaaattcaagcttgtagttggttgaattgtggccccagagatgggattaaggattttgagattatgccagattatctgcgcgggcccaggatcatatgagtttgtctcttctcccgaattagttttgtccgcgctcggccgccgtgcagtcggtcgttccacttccgccttcgcccacgtggtccggctccggctcagtcagccgcgtcgcgaatggggcaggagcgagcctctctggtcccgacgcgggtggcccgggtctcctcgactcctgaggaaagcccaccgggcggggcgggaggtgaagaggctggggaagtcagaggttaacctgggcgtcaggggacgttggagttgatccgtcagggtcccggggcggtctgggggcagtagagacggggcttgggcgcggggcctgagaggtcaggggtcagcaggagtgaggctggggcgtccaggtccgagaggtcaggggtcagctggagaggggctggggcgccggtttcccggaggtcaggggtcagaaggaacagggctgcagcgtcagggtccgagaggttaggggtcggcagaggcggagctggggcactgggggtcaggggtcggggatcagggcggggtcgggtgcactggtagcctgcgcatgggcctccagcttcgcgcgctgttgggagccttcggacggtggaccctgcgcctgggaccgcgtccgtcctgctcgccgcgcatggccgggaacgcggagccgccgcccgccggagccgcatgcccccaggaccggaggtcctgcagcggccgggccgggggcgaccgcgttctgggaggacggagaacatccggcgaagaagctcaagagcggtggcgacgaggagcggcgcgagaagccgcccaagcggaagatcgtgctgctcatggcctattcgggcaagggctaccacggcatgcagaggaatgtcgggtcctcacaattcaaaacaattgaagatgacttggtgtccgccctcgtccggtcaggctgtattcctgaaaatcatggtgaggacatgaggaaaatgtccttccagcgctgcgcccggacagacaagggtgtgtccgcagccggccaggtggtatccctgaaggtgtggctgattgacgacattctaraaaagatcaacagccaccttccctctcacattcggattctgggactgaagcgggtcacgggcgggtttaactccaagaacagatgtgatgccaggacctattgctacctgctgcccacgtttgcctttgcgcacaaggaccgggacgttcaggatgagacctaccgcctgagcgccgagacgctgcagcaggtcaacaggctcctggcctgctacaagggcacgcacaacttccacaatttcacctcgcagaaggggccgcaggatcccagtgcctgccgctacatcctggagatgtactgcgaggaaccctttgtgcgggagggcctggagtttgcggtgatcagggtgaagggccagagcttcatgatgcatcagatccggaagatggtcggcctggtggtggccattgtgaagggttatgcccctgagagcgtgctggagcgcagctggggcacagagaaggtggacgtgcccaaggcgcccggactcggcctggtcctggagagggtgcacttcgagaagtacaaccagcgctttggcaacgatgggctgcatgagccgctggactgggcgcaggaggaaggaaaggtcgcagccttcaaggaggagcacatctaccccaccatcatcggcaccgagcgggacgaacgctccatggcccagtggctgagcaccttgcccatccacaacttyagtgccaccgctctcacggcaggtggcacgggcgccaaggtgcccagtcccctggaaggcagtgaaggggacggagacactgactgaggcgatgggagctgcycaccagagtgcctctgagcagctcacagtgtgtgcccagatgtgccacccctgtgggcagcaagaagctgggatcgctgcagcccttgtaggaacagcctttctcgaatctgttttcagctcttgcattgcatagatgaacctcagcatgtaaagaactatttttttaaagaagtgattttctt

SEQ ID NO: 1078 - DNA, 2319 bp, Homo sapiens
taggagaaggcacagcccctggagggcgggagtggggctgctgcagacggctgtctcctgcctcctggctcttgcactgccaggaacacgctctccccaacacctccatggctcattccccaaattcaagcttgtagttggttgaattgtggccccagagatgggattaaggattttgagattatgccagattatctgcgcgggcccaggatcatatgagtttgtctcttctcccgaattagttttgtccgcgctcggccgccgtgcagtcggtcgttccacttccgccttcgcccacgtggtccggctccggctcagtcagccgcgtcgcgaatggggcaggagcgagcctctctggtcccgacgcgggtggcccgggtctcctcgactcctgaggaaagcccaccgggcggggcgggaggtgaagaggctggggaagtcagaggttaacctgggcgtcaggggacgttggagttgatccgtcagggtcccggggcggtctgggggcagtagagacggggcttgggcgcggggcctgagaggtcaggggtcagcaggagtgaggctggggcgtccaggtccgagaggtcaggggtcagctggagaggggctggggcgccggtttcccggaggtcaggggtcagaaggaacagggctgcagcgtcagggtccgagaggttaggggtcggcagaggcggagctggggcactgggggtcaggggtcggggatcagggcggggtcgggtgcactggtagcctgcgcatgggcctccagcttcgcgcgctgttgggagccttcggacggtggaccctgcgcctgggaccgcgtccgtcctgctcgccgcgcatggccgggaacgcggagccgccgcccgccggagccgcatgcccccaggaccggaggtcctgcagcggccgggccgggggcgaccgcgttctgggaggacggagaacatccggcgaagaagctcaagagcggtggcgacgaggagcggcgcgagaagccgcccaagcggaagatcgtgctgctcatggcctattcgggcaagggctaccacggcatgcagaggaatgtcgggtcctcacaattcaaaacaattgaagatgacttggtgtccgccctcgtccggtcaggctgtattcctgaaaatcatggtgaggacatgaggaaaatgtccttccagcgctgcgcccggacagacaagggtgtgtccgcagccggccaggtggtatccctgaaggtgtggctgattgacgacattctaraaaagatcaacagccaccttccctctcacattcggattctgggactgaagcgggtcacgggcgggtttaactccaagaacagatgtgatgccaggacctattgctacctgctgcccacgtttgcctttgcgcacaaggaccgggacgttcaggatgagacctaccgcctgagcgccgagacgctgcagcaggtcaacaggctcctggcctgctacaagggcacgcacaacttccacaatttcacctcgcagaaggggccgcaggatcccagtgcctgccgctacatcctggagatgtactgcgaggaaccctttgtgcgggagggcctggagtttgcggtgatcagggtgaagggccagagcttcatgatgcatcagatccggaagatggtcggcctggtggtggccattgtgaagggttatgcccctgagagcgtgctggagcgcagctggggcacagagaaggtggacgtgcccaaggcgcccggactcggcctggtcctggagagggtgcacttcgagaagtacaaccagcgctttggcaacgatgggctgcatgagccgctggactgggcgcaggaggaaggaaaggtcgcagccttcaaggaggagcacatctaccccaccatcatcggcaccgagcgggacgaacgctccatggcccagtggctgagcaccttgcccatccacaacttyagtgccaccgctctcacggcaggtggcacgggcgccaaggtgcccagtcccctggaaggcagtgaaggggacggagacactgactgaggcgatgggagctgcycaccagagtgcctctgagcagctcacagtgtgtgcccagatgtgccacccctgtgggcagcaagaagctgggatcgctgcagccatgttttcccggccatgccggcgttgtaacctcaggaccttcccttgtaggaacagcctttctcgaatctgttttcagctcttgcattgcatagatgaacctcagcatgtaaagaactatttttttaaagaagtgattttcttattaaacaagtacaaattttgcttagtc

SEQ ID NO: 1079 - DNA, 2323 bp, Homo sapiens
taggagaaggcacagcccctggagggcgggagtggggctgctgcagacggctgtctcctgcctcctggctcttgcactgccaggaacacgctctccccaacacctccatggctcattccccaaattcaagcttgtagttggttgaattgtggccccagagatgggattaaggattttgagattatgccagattatctgcgcgggcccaggatcatatgagtttgtctcttctcccgaattagttttgtccgcgctcggccgccgtgcagtcggtcgttccacttccgccttcgcccacgtggtccggctccggctcagtcagccgcgtcgcgaatggggcaggagcgagcctctctggtcccgacgcgggtggcccgggtctcctcgactcctgaggaaagcccaccgggcggggcgggaggtgaagaggctggggaagtcagaggttaacctgggcgtcaggggacgttggagttgatccgtcagggtcccggggcggtctgggggcagtagagacggggcttgggcgcggggcctgagaggtcaggggtcagcaggagtgaggctggggcgtccaggtccgagaggtcaggggtcagctggagaggggctggggcgccggtttcccggaggtcaggggtcagaaggaacagggctgcagcgtcagggtccgagaggttaggggtcggcagaggcggagctggggcactgggggtcaggggtcggggatcagggcggggtcgggtgcactggtagcctgcgcatgggcctccagcttcgcgcgctgttgggagccttcggacggtggaccctgcgcctgggaccgcgtccgtcctgctcgccgcgcatggccgggaacgcggagccgccgcccgccggagccgcatgcccccaggaccggaggtcctgcagcggccgggccgggggcgaccgcgttctgggaggacggagaacatccggcgaagaagctcaagagcggtggcgacgaggagcggcgcgagaagccgcccaagcggaagatcgtgctgctcatggcctattcgggcaagggctaccacggcatgcagaggaatgtcgggtcctcacaattcaaaacaattgaagatgacttggtgtccgccctcgtccggtcaggctgtattcctgaaaatcatggtgaggacatgaggaaaatgtccttccagcgctgcgcccggacagacaagggtgtgtccgcagccggccaggtggtatccctgaaggtgtggctgattgacgacattctaraaaagatcaacagccaccttccctctcacattcggattctgggtaagccttgcacgggtcacgggcgggtttaactccaagaacagatgtgatgccaggacctattgctacctgctgcccacgtttgcctttgcgcacaaggaccgggacgttcaggatgagacctaccgcctgagcgccgagacgctgcagcaggtcaacaggctcctggcctgctacaagggcacgcacaacttccacaatttcacctcgcagaaggggccgcaggatcccagtgcctgccgctacatcctggagatgtactgcgaggaaccctttgtgcgggagggcctggagtttgcggtgatcagggtgaagggccagagcttcatgatgcatcagatccggaagatggtcggcctggtggtggccattgtgaagggttatgcccctgagagcgtgctggagcgcagctggggcacagagaaggtggacgtgcccaaggcgcccggactcggcctggtcctggagagggtgcacttcgagaagtacaaccagcgctttggcaacgatgggctgcatgagccgctggactgggcgcaggaggaaggaaaggtcgcagccttcaaggaggagcacatctaccccaccatcatcggcaccgagcgggacgaacgctccatggcccagtggctgagcaccttgcccatccacaacttyagtgccaccgctctcacggcaggtggcacgggcgccaaggtgcccagtcccctggaaggcagtgaaggggacggagacactgactgaggcgatgggagctgcycaccagagtgcctctgagcagctcacagtgtgtgcccagatgtgccacccctgtgggcagcaagaagctgggatcgctgcagccatgttttcccggccatgccggcgttgtaacctcaggaccttcccttgtaggaacagcctttctcgaatctgttttcagctcttgcattgcatagatgaacctcagcatgtaaagaactatttttttaaagaagtgattttcttattaaacaagtacaaattttgcttagtc

SEQ ID NO: 1080 - DNA, 1581 bp, Homo sapiens
ccgcgtcgcgaatggggcaggagcgagcctctctggtcccgacgcgggtggcccgggtctcctcgactcctgaggaaagcccaccgggcggggcgggagctcgccgcgcatggccgggaacgcggagccgccgcccgccggagccgcatgcccccaggaccggaggtcctgcagcggccgggccgggggcgaccgcgttctgggaggacggagaacatccggcgaagaagctcaagagcggtggcgacgaggagcggcgcgagaagccgcccaagcggaagatcgtgctgctcatggcctattcgggcaagggctaccacggcatgcagaggaatgtcgggtcctcacaattcaaaacaattgaagatgacttggtgtccgccctcgtccggtcaggctgtattcctgaaaatcatggtgaggacatgaggaaaatgtccttccagcgctgcgcccggacagacaagggtgtgtccgcagccggccaggtggtatccctgaaggtgtggctgattgacgacattctaraaaagatcaacagccaccttccctctcacattcggattctgggactgaagcgggtcacgggcgggtttaactccaagaacagatgtgatgccaggacctattgctacctgctgcccacgtttgcctttgcgcacaaggaccgggacgttcaggatgagacctaccgcctgagcgccgagacgctgcagcaggtcaacaggctcctggcctgctacaagggcacgcacaacttccacaatttcacctcgcagaaggggccgcaggatcccagtgcctgccgctacatcctggagatgtactgcgaggaaccctttgtgcgggagggcctggagtttgcggtgatcagggtgaagggccagagcttcatgatgcatcagatccggaagatggtcggcctggtggtggccattgtgaagggttatgcccctgagagcgtgctggagcgcagctggggcacagagaaggtggacgtgcccaaggcgcccggactcggcctggtcctggagagggtgcacttcgagaagtacaaccagcgctttggcaacgatgggctgcatgagccgctggactgggcgcaggaggaaggaaaggtcgcagccttcaaggaggagcacatctaccccaccatcatcggcaccgagcgggacgaacgctccatggcccagtggctgagcaccttgcccatccacaacttyagtgccaccgctctcacggcaggtggcacgggcgccaaggtgcccagtcccctggaaggcagtgaaggggacggagacactgactgaggcgatgggagctgcycaccagagtgcctctgagcagctcacagtgtgtgcccagatgtgccacccctgtgggcagcaagaagctgggatcgctgcagccatgttttcccggccatgccggcgttgtaacctcaggaccttcccttgtaggaacagcctttctcgaatctgttttcagctcttgcattgcatagatgaacctcagcatgtaaagaactatttttttaaagaagtgattttcttattaaacaagtacaaattttgcttagtc

SEQ ID NO: 1081 - DNA, 2094 bp, Homo sapiens
ctcttctcccgaattagttttgtccgcgctcggccgccgtgcagtcggtcgttccacttccgccttcgcccacgtggtccggctccggctcagtcagccgcgtcgcgaatggggcaggagcgagcctctctggtcccgacgcgggtggcccgggtctcctcgactcctgaggaaagcccaccgggcggggcgggaggtgaagaggctggggaagtcagaggttaacctgggcgtcaggggacgttggagttgatccgtcagggtcccggggcggtctgggggcagtagagacggggcttgggcgcggggcctgagaggtcaggggtcagcaggagtgaggctggggcgtccaggtccgagaggtcaggggtcagctggagaggggctggggcgccggtttcccggaggtcaggggtcagaaggaacagggctgcagcgtcagggtccgagaggttaggggtcggcagaggcggagctggggcactgggggtcaggggtcggggatcagggcggggtcgggtgcactggtagcctgcgcatgggcctccagcttcgcgcgctgttgggagccttcggacggtggaccctgcgcctgggaccgcgtccgtcctgctcgccgcgcatggccgggaacgcggagccgccgcccgccggagccgcatgcccccaggaccggaggtcctgcagcggccgggccgggggcgaccgcgttctgggaggacggagaacatccggcgaagaagctcaagagcggtggcgacgaggagcggcgcgagaagccgcccaagcggaagatcgtgctgctcatggcctattcgggcaagggctaccacggcatgcagaggaatgtcgggtcctcacaattcaaaacaattgaagatgacttggtgtccgccctcgtccggtcaggctgtattcctgaaaatcatggtgaggacatgaggaaaatgtccttccagcgctgcgcccggacagacaagggtgtgtccgcagccggccaggtggtatccctgaaggtgtggctgattgacgacattctaraaaagatcaacagccaccttccctctcacattcggattctgggactgaagcgggtcacgggcgggtttaactccaagaacagatgtgatgccaggacctattgctacctgctgcccacgtttgcctttgcgcacaaggaccgggacgttcaggatgagacctaccgcctgagcgccgagacgctgcagcaggtcaacaggctcctggcctgctacaagggcacgcacaacttccacaatttcacctcgcagaaggggccgcaggatcccagtgcctgccgctacatcctggagatgtactgcgaggaaccctttgtgcgggagggcctggagtttgcggtgatcagggtgaagggccagagcttcatgatgcatcagatccggaagatggtcggcctggtggtggccattgtgaagggttatgcccctgagagcgtgctggagcgcagctggggcacagagaaggtggacgtgcccaaggcgcccggactcggcctggtcctggagagggtgcacttcgagaagtacaaccagcgctttggcaacgatgggctgcatgagccgctggactgggcgcaggaggaaggaaaggtcgcagccttcaaggaggagcacatctaccccaccatcatcggcaccgagcgggacgaacgctccatggcccagtggctgagcaccttgcccatccacaacttyagtgccaccgctctcacggcaggtggcacgggcgccaaggtgcccagtcccctggaaggcagtgaaggggacggagacactgactgaggcgatgggagctgcycaccagagtgcctctgagcagctcacagtgtgtgcccagatgtgccacccctgtgggcagcaagaagctgggatcgctgcagccatgttttcccggccatgccggcgttgtaacctcaggaccttcccttgtaggaacagcctttctcgaatctgttttcagctcttgcattgcatagatgaacctcagcatgtaaagaactatttttttaaagaagtgattttcttattaaacaagtacaaattttgcttagtc

SEQ ID NO: 1082 - DNA, 5233 bp, Homo sapiens
caggggccgggtggtgtggtgtcggtgtcggcagcatccccggcgccctgctgcggtcgccgcgagcctcggcctctgtctcctccccttccagccctcacctccacgcgggaccgctcgcgccagtcaactccgcgcacgttgcccctgcttggcagccaataaaagggggctgaggaaataccggacacggtcacccgttgccagctctagcctttaaattcccggatcgggcacctccacgcaccgcggctagcgccgacacccagctagcgtgcaaggcgccgcggctcagcgcgcaccggcgggcttcgaaatcgcagtcctccggcgaccccgaactccgccccggagcctcagcccctggaaagtgatcctggcatcsgagagccaagatgccggcccacttgctgcaggacgatatctctagctcctataccaccaccaccaccaccattacagcgcctccttccagggtcccgcagaatggaggagataagttggagacgacgcccctctacttggaagaagacattcgccctgatataaaagatgatatatataacctcacctacaaggataaggaaggcccaagccccaaggttgaatatgtctggagaaacatcatccttatgtctctgctacacttgggcgccctgtatgggatcactttgattcctacctgcaacttatacacctggctttggggggtattctactattttatcagtgccctgggcataacagcaggagctcatcctctgtggagccactgatcttacaaagctcggctgtccctgtggctctttctgatcattgccaacacaatggcattccagaatgatgtctatgaatgggctcgcgaccaccgtgcccaccacaagttttcagaaacacatgctgatcctcataattcctgacgtggctttttcttctctcacgtgggttggctgcttgtgcgcaaacacccaactgtcaaagagaagggcagtacgctagacttgtctgacctagaagccgagaaactggtgatgttccagaggaggtactacaaacccggcttgctgttgatgtgcttcatcctgcccacgcttgtgccctggtgtttctggggtgaaacttttcaaaacagcgtgttcgttgccactttcttgcgatatgctgtggtgcttaatgccacgtggctggtgaacagtgctgcccacctcttcagatatcgtccttatgacaagaacattagcctccgggagaatatcctggtttcacytggagctgtgggtgagggctttcacaactaccaccactcctttccctatgactactctgccagtgagtaccgctggcacatcaacttcaccacattcttcattgattgcatggccgccttcggtctggcctacgaccagaagaaagtctccaaggccgccatcttggccaggattaaaagaaccggagagggaaactacaagagtggctgagtttggggtccctcaggttccttcttcaaaagccagccaggcagaggttttaatgtctgtttattaactactgaataatgctaccaggatgctaaagatgatgatgataacccattccagtacagtattcttttaaaattcgaaagtattgaaagccaacaactctgcctttatgatgctaaactgacattatttcttctcttatcctctctctcttctaggcccattgtcctccttttcactttgttgctatcatcctcctttctcttattgccacccaggcaagcagctggtcagtctttgttcagtgtccagcttccaaagcctagacaacctttctgtagcctaaaacgaatggtctctgctccagataactctctttccttgagctgttgtgagctttgaagtctgggtagtcccctgttaattatcttcagcccaggcttttgctagatggaatggaaaagcaacttcatttgacacaaagcttctaaagcaggtaaattgttgggggagagagttagcatgtatgaatgtaaggatgagggaagcgaagcaagaggaacctcttgccatgatcagacatgcagctgcctacctagtgaggacttcaagccccaccacatagcatgcttcctttctctcctggctyggggtaagaagtggctgtggtgtttggcaatgctaattcaatgccgcaacatatagttkaggccraggataaagaagagacactttaagtttgtagtaaaagtggtctctgctggggaagggttttcttttctttttttctttaataacaaggagatttcttagttcatgtatcaagaattcttgaagttgggtgtttccataattggtaaaaacagcagctcacagaattttgagtattccatgagctgctcatyacagttctttcctctttctgctctgccatcttcaggatattggttsttcccctcatagtaataagatggctgtggcatttccaamcatccaaaaaaagggaaggattttaggaggtggagtcgggtcaaacaakaaatatatatatacatatatacattgcttagaacgttaaactattagagtatttccctcccaaagagggatgtttgaaaaaactctgaaggagaggaggaattagttgggatgccaatttcctctccactgctgtacatgagatggrgaggttgagggacaggatctataggcagcttctaagagcraacttcacacaggaagggatctgagaacacattgccrggggcttgagaaggttactgagtgagttattgggagtcttaataaaataaactagatattaggtccattcattaattagttccagtttctccttgaaatgagtaaaaactagaaggcttctccccacagtgttgtgccccttcactcattttttwttgrsgrgrwggggggctctgttaacatctagcctaagtatasaactgcctggggggcagggttaggaatctcttcactaccctgattcttgattcctggytctaccctgtctgtcccttttctttkacyagatctttctcttccctgaacgttttcttctttccctggacaggcagcctcctttgkgtgtattcagaggcagtgatgacttgctgtccaggcagctccctcctgcasacagaatgctcagggtcactgaaccactgcttctcttccgaaagtagagctagctgccactttcgcatggcctccggagtgtctccacctacacctctgtgctcccccgccacactgatggctcaagacaaggctggcaaaccctcccagaaatgtctctggcccagaaagcctctctctccctccctctctcatgaggcacagccaagccaagtgctcatgagccagtgggcctgccacagagcaaacgagggtttattttcagtcccctctctctggatcagaaccagagagcatgctgaatgcccctctgcttgctcggtaagggtgccccacctgaatcagtgctctcagctggcagtgcaatgcttgtagaagtaggaggaaacagttctcactgggaagaagcaagggcaagaacccaagtgcctcacctcaaaaggaggccctgttccctggagtcagggtgaactgcaaacctttggctgagacctgggatttgagataccacaaaccctgctgaacagagtgtctgttcagcaaactaaccagcattccctatagcctagggaatagtatagaagtctggcaaaaacagaaacagaacatcagtgttttgagaaccttggactactcctgtccctgtagctcagtcatcaaagctacaggggttagcctggactaaaggcatccttgtgttttgagctattcacctcagtagaaaagaatctaagggaagatcactgtagtttagctctgttgacctgtgcacctaccccttggaaatgtctgctgttatttctaattccacaggtcataagatgccttcttgatgatatatgaacgataaaaacaactttcacttcttcctattgtaatcgtgtgccatggatctgatctgtaccatgaccctacataaggctggatggcaccctcaggctgagggccccaatgtatgtgtggctgtgggtgtgggtgtgggtgtatctgctgagtaaggaacactattctcaagattctaaagctcaattcaagtgacacattaatgataaactcagatctgatcaagagtctggatttctaacagtccttgcttcggggctgtgctggcaacttaactcgggtgccttacatcttttctaatcatagtgttgcatatgagcctgccctcactccctctgtggaatccctttgcacctgagagcctactgaagtggctggtagaaaaaggggcctgagtgaaggattatcagtatcgcgatttgcaggattcccttctgggcttcattctggaaacttttgttagggctgcttttaagtgcccacatttgatggagggtggaagtaatttgaatgtatttgatttatatatatatatatttttaaggttaaaagatggttgtagcatttaaaatggaaaattttctcctcggtttgctagtatcttgggtgtattctctctaagtgtagctcaaataggtcatcatgaaaggttaaaaaagtgaggtggccatgttacgctggtggttaaggccagggcctctcctaccactgtgccactgacttgctatgtcaccctgggcaagtcacttaactataaggtgcctcagttttccttctgttaaaatggggatrataatactgacctacctcaaagggcagttttgaggcgtgactaatgctttttagaaagcattttgggatccttcagcacagggattctcaagacctgagtattttttataatagcaatgtccaccatcaacttgatatgtccgtgtgtcccagatgctgtcattagtctatatggttctccaaaaaattgaatgaatccattggagaagcagtggattaactagccagacaaaatttgagaatgcataaaaaacacattgccacggaaacatacagaggatgccttttctgtgattgggtgggattttttccctttttatgtgggacatagtagttacttgtgacaagaataattttggaataatttctattaacatcaactctgaagctaattgtactaatctgagattgtgtttgtttataataaaagtgaagtaatccaaaaaacaaacaaacaaaac

SEQ ID NO: 1083 - DNA, 5386 bp, Homo sapiens
caggggccgggtggtgtggtgtcggtgtcggcagcatccccggcgccctgctgcggtcgccgcgagcctcggcctctgtctcctccccttccagccctcacctccacgcgggaccgctcgcgccagtcaactccgcgcacgttgcccctgcttggcagccaataaaagggggctgaggaaataccggacacggtcacccgttgccagctctagcctttaaattcccggatcgggcacctccacgcaccgcggctagcgccgacacccagctagcgtgcaaggcgccgcggctcagcgcgcaccggcgggcttcgaaatcgcagtcctccggcgaccccgaactccgccccggagcctcagcccctggaaagtgatcctggcatcsgagagccaagatgccggcccacttgctgcaggacgatatctctagctcctataccaccaccaccaccaccattacagcgcctccttccagggtcccgcagaatggaggagataagttggagacgacgcccctctacttggaagaagacattcgccctgatataaaagatgatatatataacctcacctacaaggataaggaaggcccaagccccaaggttgaatatgtctggagaaacatcatccttatgtctctgctacacttgggcgccctgtatgggatcactttgattcctacctgcaacttatacacctggctttggggggtattctactattttatcagtgccctgggcataacagcaggagctcatcctctgtggagccactgatcttacaaagctcggctgtccctgtggctctttctgatcattgccaacacaatggcattccagaatgatgtctatgaatgggctcgcgaccaccgtgcccaccacaagttttcagaaacacatgctgatcctcataattcctgacgtggctttttcttctctcacgtgggttggctgcttgtgcgcaaacacccaactgtcaaagagaagggcagtacgctagacttgtctgacctagaagccgagaaactggtgatgttccagaggaggtactacaaacccggcttgctgttgatgtgcttcatcctgcccacgcttgtgccctggtgtttctggggtgaaacttttcaaaacagcgtgttcgttgccactttcttgcgatatgctgtggtgcttaatgccacgtggctggtgaacagtgctgcccacctcttcagatatcgtccttatgacaagaacattagcctccgggagaatatcctggtttcacytggagctgtgggtgagggctttcacaactaccaccactcctttccctatgactactctgccagtgagtaccgctggcacatcaacttcaccacattcttcattgattgcatggccgccttcggtctggcctacgaccagaagaaagtctccaaggccgccatcttggccaggattaaaagaaccggagagggaaactacaagagtggctgagtttggggtccctcaggttccttcttcaaaagccagccaggcagaggttttaatgtctgtttattaactactgaataatgctaccaggatgctaaagatgatgatgataacccattccagtacagtattcttttaaaattcgaaagtattgaaagccaacaactctgcctttatgatgctaaactgacattatttcttctcttatcctctctctcttctaggcccattgtcctccttttcactttgttgctatcatcctcctttctcttattgccacccaggcaagcagctggtcagtctttgttcagtgtccagcttccaaagcctagacaacctttctgtagcctaaaacgaatggtctctgctccagataactctctttccttgagctgttgtgagctttgaagtaggtggcttgagctagagataaaacagaatcttctgggtagtcccctgttaattatcttcagcccaggcttttgctagatggaatggaaaagcaacttcatttgacacaaagcttctaaagcaggtaaattgttgggggagagagttagcatgtatgaatgtaaggatgagggaagcgaagcaagaggaacctcttgccatgatcagacatgcagctgcctacctagtgaggacttcaagccccaccacatagcatgcttcctttctctcctggctyggggtaagaagtggctgtggtgtttggcaatgctaattcaatgccgcaacatatagttkaggccraggataaagaagagacactttaagtttgtagtaaaagtggtctctgctggggaagggttttcttttctttttttctttaataacaaggagatttcttagttcatgtatcaagaattcttgaagttgggtgtttccataattggtaaaaacagcagctcacagaattttgagtattccatgagctgctcatyacagttctttcctctttctgctctgccatcttcaggatattggttsttcccctcatagtaataagatggctgtggcatttccaamcatccaaaaaaagggaaggattttaggaggtggagtcgggtcaaacaakaaatatatatatacatatatacattgcttagaacgttaaactattagagtatttccctcccaaagagggatgtttgaaaaaactctgaaggagaggaggaattagttgggatgccaatttcctctccactgctgtacatgagatggrgaggttgagggacaggatctataggcagcttctaagagcraacttcacacaggaagggatctgagaacacattgccrggggcttgagaaggttactgagtgagttattgggagtcttaataaaataaactagatattaggtccattcattaattagttccagtttctccttgaaatgagtaaaaactagaaggcttctccccacagtgttgtgccccttcactcattttttwttgrsgrgrwggggggctctgttaacatctagcctaagtatasaactgcctggggggcagggttaggaatctcttcactaccctgattcttgattcctggytctaccctgtctgtcccttttctttkacyagatctttctcttccctgaacgttttcttctttccctggacaggcagcctcctttgkgtgtattcagaggcagtgatgacttgctgtccaggcagctccctcctgcasacagaatgctcagggtcactgaaccactgcttctcttccgaaagtagagctagctgccactttcgcatggcctccggagtgtctccacctacacctctgtgctcccccgccacactgatggctcaagacaaggctggcaaaccctcccagaaatgtctctggcccagaaagcctctctctccctccctctctcatgaggcacagccaagccaagtgctcatgagccagtgggcctgccacagagcaaacgagggtttattttcagtcccctctctctggatcagaaccagagagcatgctgaatgcccctctgcttgctcggtaagggtgccccacctgaatcagtgctctcagctggcagtgcaatgcttgtagaagtaggaggaaacagttctcactgggaagaagcaagggcaagaacccaagtgcctcacctcaaaaggaggccctgttccctggagtcagggtgaactgcaaacctttggctgagacctgggatttgagataccacaaaccctgctgaacagagtgtctgttcagcaaactaaccagcattccctatagcctagggaatagtatagaagtctggcaaaaacagaaacagaacatcagtgttttgagaaccttggactactcctgtccctgtagctcagtcatcaaagcagaagcctggctttgctctattaagattggaaatgtacactaccaaacactcagtccactgttgagccccagtgctggaaggaaggagggcctttcttcctgtgttaattgcatggaggctacaggggttagcctggactaaaggcatccttgtgttttgagctattcacctcagtagaaaagaatctaagggaagatcactgtagtttagctctgttgacctgtgcacctaccccttggaaatgtctgctgttatttctaattccacaggtcataagatgccttcttgatgatatatgaacgataaaaacaactttcacttcttcctattgtaatcgtgtgccatggatctgatctgtaccatgaccctacataaggctggatggcaccctcaggctgagggccccaatgtatgtgtggctgtgggtgtgggtgtgggtgtatctgctgagtaaggaacactattctcaagattctaaagctcaattcaagtgacacattaatgataaactcagatctgatcaagagtctggatttctaacagtccttgcttcggggctgtgctggcaacttaactcgggtgccttacatcttttctaatcatagtgttgcatatgagcctgccctcactccctctgtggaatccctttgcacctgagagcctactgaagtggctggtagaaaaaggggcctgagtgaaggattatcagtatcgcgatttgcaggattcccttctgggcttcattctggaaacttttgttagggctgcttttaagtgcccacatttgatggagggtggaagtaatttgaatgtatttgatttatatatatatatatttttaaggttaaaagatggttgtagcatttaaaatggaaaattttctcctcggtttgctagtatcttgggtgtattctctctaagtgtagctcaaataggtcatcatgaaaggttaaaaaagtgaggtggccatgttacgctggtggttaaggccagggcctctcctaccactgtgccactgacttgctatgtcaccctgggcaagtcacttaactataaggtgcctcagttttccttctgttaaaatggggatrataatactgacctacctcaaagggcagttttgaggcgtgactaatgctttttagaaagcattttgggatccttcagcacagggattctcaagacctgagtattttttataatagcaatgtccaccatcaacttgatatgtccgtgtgtcccagatgctgtcattagtctatatggttctccaaaaaattgaatgaatccattggagaagcagtggattaactagccagacaaaatttgagaatgcataaaaaacacattgccacggaaacatacagaggatgccttttctgtgattgggtgggattttttccctttttatgtgggacatagtagttacttgtgacaagaataattttggaataatttctattaacatcaactctgaagctaattgtactaatctgagattgtgtttgtttataataaaagtgaagtaatccaaaaaacaaacaaacaaaac

SEQ ID NO: 1084 - DNA, 2434 bp, Homo sapiens
cctttcagtgcagaagccctgggctgccagcctcaggcagctctccatccaagcagccgttgctgccacaggcgggccttacgctccaaggctacagcatgtgctaggcctcagcaggcaggagcatctctgcctcccaaagcatctacctcttagcccctcggagagatggcgatggatgtcacaaggagccaggcccagacagccttgactctggtagagcagatcctggcagagttccagctgcaggaggaggacctgaagaaggtgatgagayggatgcmgaagragatggaccrcrrcctgaggctggagaccyrtgaagagkccagtgtgaagatgctgcccacctacgtgcgctccaccccagaaggctcaraagtcggggrcttcctctccctggacctgggtggcactaacttcagggtgatgctggtgaaggtgggagaaggtgaggaggggyagtggagcgtgaagamcaaacaccagatgyactccatcccygaggacgccatgaccggcactgmtgagatgstcttcgactacatctctgagtgcatctccgacttcctggacaagcrtcmgatgaaacacaagaagctgcccctgggcttcaccttctcctttcctgtgaggcacraagmcatcgataagggcatccytctcaactggmccaagggcttcaaggcctcarrakcagaasggaacaatgtcgtggggcttctgcgagacrctatcaaayrgagargggactttgaaatggatgtggtggcaatggtgaatgacacggtggccaygahgatctccygctactasgaagaccatcagtgmraggtcrgcaygwtsrtgkgcaygggctgcaatgcctgctacatggaggagatgcagaatgtggagctggtggagggggackagggccgcrtryrcgtcaataccragyggggcrccttcrrggacyccrgckagctggackagttcctgctggagtatgaccgcctggtggacgagagctctgcaaaccccggtcagcagctgtatgagaagctcataggtggcaagtacatgggcgagctggtgyggcytgtgctgctcaggcycgtggacgaaaacctgctcttccacrgggaggcctccgagcagctgcgcacacgcggagccttcgagacgcgcttcgtgtygcaggtggagagcgacacgggcgaccgcaagcagatctacaacatcctgagcacgctggggctgygaccctmgaccaccgactgcgacatcrtgcgccscgcctgcgagagcgtgtctacgcgcgctgcgcacatgtrctygrcggkgctggcgggcgtcatcaacygcatgcgcgagagccgcagcgaggacgtaatgcgcatcactgtgggcgtggatggctycgtgtacragstgcaccccagcttcaaggagcggttccatgccagcgtgcgcaggctgacgcccagctrcgagatcaccttcatcgagtsggaggagggcagtggccggggcgcggccctggtctcggcgrtggcctgtaagaaggcctgtatgctgggccagtgagagcagtggccgcaagcgcagggaggatgccacagccccacagcacccaggctccatggggaagtgctccccacacgtgctcgcagcctggcggggcaggaggcctggccttgtcaggacccaggccgcctgccataccgctggggaacagagcgggcctcttccctcagtttttcggtgggacagccccagggccctaacgggggtgcggcaggagcaggaacagagactctggaagccccccacctttctcgctggaatcaatttcccagaagggagttgctcactcaggactttgatgcatttccacactgtcagagctgttggcctcgcctgggcccaggctctgggaaggggtgccctctggatcctgctgtggcctcacttccctgggaactcatcctgtgtggggaggcagctccaacagcttgaccagacctagacctgggccaaaagggcagccaggggctgctcatyacccagtcctggccattttcttgcctgaggctcaagaggcccagggagcaatgggagggggctccatggaggaggtgtcccaagctttgaatacccccagagaccttttctctcccataccatcactgagtggcttgtgattctgggatggaccctcgcagcaggtgcaagagacagagcccccaagcctctgccccaaggggcccacaaaggggagaagggccagccctacatcttcagctcccatagcgctggctcaggaagaaaccccaagcagcattcagcacaccccaagggacaaccccatcatatgacatgcyaccctctccatgcccaacctaagattgtgtgggttttttaattaaaaatgttaaaagttttaaacatg

SEQ ID NO: 1085 - DNA, 2749 bp, Homo sapiens
actccacacctggctggagcaggaaatgccgagcggcgcctgagccccagggaagcaggctaggatgtgagagacacagtcacctgcagcctaattactcaaaagctgtccccaggtcacagaagggagaggacatttcccactgaatctgtctgaaggacactaagccccacagctcaacacaaccaggagagaaagcgctgaggacgccacccaagcgcccagcaatggccctgcctggagaacatccaggctcagtgaggaagggtccagaagggaatgcttgccgactcgttggagaacaatgaaaaggaggaaactgtgactgaacctcaaaccccaaaccagcccgaggagaaccacattctcccagggacccagggcgggccgtgacccctgcggsggagaagccttggatatttccacttcagaagcctactggggaaggctgaggggtcccagctccccacgctggctgctgtgcagatgctggacgacagagccaggatggaggccgccaagaaggagaaggtagagcagatcctggcagagttccagctgcaggaggaggacctgaagaaggtgatgagayggatgcmgaagragatggaccrcrrcctgaggctggagaccyrtgaagagkccagtgtgaagatgctgcccacctacgtgcgctccaccccagaaggctcaraagtcggggrcttcctctccctggacctgggtggcactaacttcagggtgatgctggtgaaggtgggagaaggtgaggaggggyagtggagcgtgaagamcaaacaccagatgyactccatcccygaggacgccatgaccggcactgmtgagatgstcttcgactacatctctgagtgcatctccgacttcctggacaagcrtcmgatgaaacacaagaagctgcccctgggcttcaccttctcctttcctgtgaggcacraagmcatcgataagggcatccytctcaactggmccaagggcttcaaggcctcarrakcagaasggaacaatgtcgtggggcttctgcgagacrctatcaaayrgagargggactttgaaatggatgtggtggcaatggtgaatgacacggtggccaygahgatctccygctactasgaagaccatcagtgmraggtcrgcaygwtsrtgkgcaygggctgcaatgcctgctacatggaggagatgcagaatgtggagctggtggagggggackagggccgcrtryrcgtcaataccragyggggcrccttcrrggacyccrgckagctggackagttcctgctggagtatgaccgcctggtggacgagagctctgcaaaccccggtcagcagctgtatgagaagctcataggtggcaagtacatgggcgagctggtgyggcytgtgctgctcaggcycgtggacgaaaacctgctcttccacrgggaggcctccgagcagctgcgcacacgcggagccttcgagacgcgcttcgtgtygcaggtggagagcgacacgggcgaccgcaagcagatctacaacatcctgagcacgctggggctgygaccctmgaccaccgactgcgacatcrtgcgccscgcctgcgagagcgtgtctacgcgcgctgcgcacatgtrctygrcggkgctggcgggcgtcatcaacygcatgcgcgagagccgcagcgaggacgtaatgcgcatcactgtgggcgtggatggctycgtgtacragstgcaccccagcttcaaggagcggttccatgccagcgtgcgcaggctgacgcccagctrcgagatcaccttcatcgagtsggaggagggcagtggccggggcgcggccctggtctcggcgrtggcctgtaagaaggcctgtatgctgggccagtgagagcagtggccgcaagcgcagggaggatgccacagccccacagcacccaggctccatggggaagtgctccccacacgtgctcgcagcctggcggggcaggaggcctggccttgtcaggacccaggccgcctgccataccgctggggaacagagcgggcctcttccctcagtttttcggtgggacagccccagggccctaacgggggtgcggcaggagcaggaacagagactctggaagccccccacctttctcgctggaatcaatttcccagaagggagttgctcactcaggactttgatgcatttccacactgtcagagctgttggcctcgcctgggcccaggctctgggaaggggtgccctctggatcctgctgtggcctcacttccctgggaactcatcctgtgtggggaggcagctccaacagcttgaccagacctagacctgggccaaaagggcagccaggggctgctcatyacccagtcctggccattttcttgcctgaggctcaagaggcccagggagcaatgggagggggctccatggaggaggtgtcccaagctttgaatacccccagagaccttttctctcccataccatcactgagtggcttgtgattctgggatggaccctcgcagcaggtgcaagagacagagcccccaagcctctgccccaaggggcccacaaaggggagaagggccagccctacatcttcagctcccatagcgctggctcaggaagaaaccccaagcagcattcagcacaccccaagggacaaccccatcatatgacatgcyaccctctccatgcccaacctaagattgtgtgggttttttaattaaaaatgttaaaagttttaaacatg

SEQ ID NO: 1086 - DNA, 2558 bp, Homo sapiens
cctttcagtgcagaagccctgggctgccagcctcaggcagctctccatccaagcagccgttgctgccacaggcgggccttacgctccaaggctacagcatgtgctaggcctcagcaggcaggagcatctctgcctcccaaagcatctacctcttagcccctcggagagatggcgatggatgtcacaaggagccaggcccagacagccttgactctgccagactctcctctgaactcgggcctcacatggccaactgctacttggaacaaatcgccccttggctggcagatgtgttaacatgcccagaccaagatcccaactcccacaacccaactcccaggtagagcagatcctggcagagttccagctgcaggaggaggacctgaagaaggtgatgagayggatgcmgaagragatggaccrcrrcctgaggctggagaccyrtgaagagkccagtgtgaagatgctgcccacctacgtgcgctccaccccagaaggctcaraagtcggggrcttcctctccctggacctgggtggcactaacttcagggtgatgctggtgaaggtgggagaaggtgaggaggggyagtggagcgtgaagamcaaacaccagatgyactccatcccygaggacgccatgaccggcactgmtgagatgstcttcgactacatctctgagtgcatctccgacttcctggacaagcrtcmgatgaaacacaagaagctgcccctgggcttcaccttctcctttcctgtgaggcacraagmcatcgataagggcatccytctcaactggmccaagggcttcaaggcctcarrakcagaasggaacaatgtcgtggggcttctgcgagacrctatcaaayrgagargggactttgaaatggatgtggtggcaatggtgaatgacacggtggccaygahgatctccygctactasgaagaccatcagtgmraggtcrgcaygwtsrtgkgcaygggctgcaatgcctgctacatggaggagatgcagaatgtggagctggtggagggggackagggccgcrtryrcgtcaataccragyggggcrccttcrrggacyccrgckagctggackagttcctgctggagtatgaccgcctggtggacgagagctctgcaaaccccggtcagcagctgtatgagaagctcataggtggcaagtacatgggcgagctggtgyggcytgtgctgctcaggcycgtggacgaaaacctgctcttccacrgggaggcctccgagcagctgcgcacacgcggagccttcgagacgcgcttcgtgtygcaggtggagagcgacacgggcgaccgcaagcagatctacaacatcctgagcacgctggggctgygaccctmgaccaccgactgcgacatcrtgcgccscgcctgcgagagcgtgtctacgcgcgctgcgcacatgtrctygrcggkgctggcgggcgtcatcaacygcatgcgcgagagccgcagcgaggacgtaatgcgcatcactgtgggcgtggatggctycgtgtacragstgcaccccagcttcaaggagcggttccatgccagcgtgcgcaggctgacgcccagctrcgagatcaccttcatcgagtsggaggagggcagtggccggggcgcggccctggtctcggcgrtggcctgtaagaaggcctgtatgctgggccagtgagagcagtggccgcaagcgcagggaggatgccacagccccacagcacccaggctccatggggaagtgctccccacacgtgctcgcagcctggcggggcaggaggcctggccttgtcaggacccaggccgcctgccataccgctggggaacagagcgggcctcttccctcagtttttcggtgggacagccccagggccctaacgggggtgcggcaggagcaggaacagagactctggaagccccccacctttctcgctggaatcaatttcccagaagggagttgctcactcaggactttgatgcatttccacactgtcagagctgttggcctcgcctgggcccaggctctgggaaggggtgccctctggatcctgctgtggcctcacttccctgggaactcatcctgtgtggggaggcagctccaacagcttgaccagacctagacctgggccaaaagggcagccaggggctgctcatyacccagtcctggccattttcttgcctgaggctcaagaggcccagggagcaatgggagggggctccatggaggaggtgtcccaagctttgaatacccccagagaccttttctctcccataccatcactgagtggcttgtgattctgggatggaccctcgcagcaggtgcaagagacagagcccccaagcctctgccccaaggggcccacaaaggggagaagggccagccctacatcttcagctcccatagcgctggctcaggaagaaaccccaagcagcattcagcacaccccaagggacaaccccatcatatgacatgcyaccctctccatgcccaacctaagattgtgtgggttttttaattaaaaatgttaaaagttttaaacatg

SEQ ID NO: 1087 - DNA, 954 bp, Homo sapiens
cttccgtctcgctcggagtttccctctgcgttcgctccgcgctgctggaggctgtcgtcccaatgctccccaaacggcggcgagcgcgggtcgggtcccctagcggcgatgccgcttcctccacgccgccctcgacgcgcttcccgggagtcgccatctacctkgtcgagcctcgcatgggtcgcagccgccgggccttcctcacaggcctggcgcgctccaaaggcttccgcgtccttgacgcctgcagctccgaagcgacacatgttgtgatggaagagacctcagcagaggaggccgtcagctggcaggagcgcaggatggcagctgctcccccgggttgcacccccccagctctgctggacataagctggttaacagagagcctgggagctgggcagcctgtacctgtggagtgccggcaccgcctggaggtggctgggccaaggaaggggcctctgagcccagcatggatgcctgcctatgcctgccagcgccctacgcccctcacacaccacaacactggcctctccgaggctctggagatactggccgaggcagcaggctttgaaggcagtgagggccgcctcctcaccttctgcagagcagcctcggtgctcaaggcccttcccagccctgtcacaaccctgagccagctgcaggggcttccccactttggagaacactcctctagggttgtccaggagctgctggagcatgsagtgtgtgaggaggtggagagagttcggcgctcagagagctcttcacccagatcttcggggtcggtgtgaagactgctgaccggtggtaccgggaaggactgcgaaccttagatgacctccgagagcagccccagaaactaacccaacagcagaaagcgggtgagccctccagagaggctgggccctgggcttccctaaactgcaccctggatccctcagcatcaactcccta

SEQ ID NO: 1088 - DNA, 1827 bp, Homo sapiens
cttccgtctcgctcggagtttccctctgcgttcgctccgcgctgctggaggctgtcgtcccaatgctccccaaacggcggcgagcgcgggtcgggtcccctagcggcgatgccgcttcctccacgccgccctcgacgcgcttcccgggagtcgccatctacctkgtcgagcctcgcatgggtcgcagccgccgggccttcctcacaggcctggcgcgctccaaaggcttccgcgtccttgacgcctgcagctccgaagcgacacatgttgtgatggaagagacctcagcagaggaggccgtcagctggcaggagcgcaggatggcagctgctcccccgggttgcacccccccagctctgctggacataagctggttaacagagagcctgggagctgggcagcctgtacctgtggagtgccggcaccgcctggaggtggctgggccaaggaaggggcctctgagcccagcatggatgcctgcctatgcctgccagcgccctacgcccctcacacaccacaacactggcctctccgaggctctggagatactggccgaggcagcaggctttgaaggcagtgagggccgcctcctcaccttctgcagagcagcctcggtgctcaaggcccttcccagccctgtcacaaccctgagccagctgcaggggcttccccactttggagaacactcctctagggttgtccaggagctgctggagcatgsagtgtgtgaggaggtggagagagttcggcgctcagagaggtaccagaccatgaagctcttcacccagatcttcggggtcggtgtgaagactgctgaccggtggtaccgggaaggactgcgaaccttagatgacctccgagagcagccccagaaactaacccaacagcagaaagcggggctccagcaccaccaggacctgagcaccccagtcctgcggtccgatgtagatgccctgcagcaggtggtggaggaagctgtggggcaggccctgcctggggccaccgtcacgctgaccggcggcttccgcagggggaagttgcagggccatgacgtggacttcctcatcacccaccccaaggagggtcaggaggcggggctgctgcctagagtgatgtgccgcctgcaggaccagggcctcatcctgtaccaccagcaccagcacagctgctgtgagtcccctacccgcctggcccaacagagccacatggacgcttttgagagaagtttctgcattttccgcctaccacaacctccaggggctgctgtggggggatccacgaggccctgcccatcctggaaggccgtgagagtggacttggtagttgcacccgtcagccagttccctttcgccctgctcggttggactggctccaagcttttccagcgggagctgcgccgcttcagccggaaggagaagggcctgtggctgaacagccatgggctgtttgacccggagcagaagacatttttccaagcggcttcagaggaagacatcttcagacacctgggccttgagtaccttcctccagagcagagaaacgcctgagcctgcctgtgtccccmacttccactcaggaaattgggctgcccccaacctggccactgaatgtctccaggcagatatgctgcccctgaggtgggctggacatgggtgccctccacgtccctcatatccccaggcacactctggcctcaggttttgccctggccatgtcatctacctggagtgggccctccccttcttcaggccttgaatcaaaagccactttgttaggcgaggatttcccagaccactcatcacattaaaaaatattttgaaaacatgc

SEQ ID NO: 1089 - DNA, 2593 bp, Homo sapiens
cttccgtctcgctcggagtttccctctgcgttcgctccgcgctgctggaggctgtcgtcccaatgctccccaaacggcggcgagcgcgggtcgggtcccctagcggcgatgccgcttcctccacgccgccctcgacgcgcttcccgggagtcgccatctacctkgtcgagcctcgcatgggtcgcagccgccgggccttcctcacaggcctggcgcgctccaaaggcttccgcgtccttgacgcctgcagctccgaagcgacacatgttgtgatggaagagacctcagcagaggaggccgtcagctggcaggagcgcaggatggcagctgctcccccgggttgcacccccccagctctgctggacataagctggttaacagagagcctgggagctgggcagcctgtacctgtggagtgccggcaccgcctggaggtggctgggccaaggaaggggcctctgagcccagcatggatgcctgcctatgcctgccagcgccctacgcccctcacacaccacaacactggcctctccgaggctctggagatactggccgaggcagcaggctttgaaggcagtgagggccgcctcctcaccttctgcagagcagcctcggtgctcaaggcccttcccagccctgtcacaaccctgagccagctgcaggggcttccccactttggagaacactcctctagggttgtccaggagctgctggagcatgsagtgtgtgaggaggtggagagagttcggcgctcagagaggtaccagaccatgaagctcttcacccagatcttcggggtcggtgtgaagactgctgaccggtggtaccgggaaggactgcgaaccttagatgacctccgagagcagccccagaaactaacccaacagcagaaagcggggctccagcaccaccaggacctgagcaccccagtcctgcggtccgatgtagatgccctgcagcaggtggtggaggaagctgtggggcaggccctgcctggggccaccgtcacgctgaccggcggcttccgcagggggaagttgcagggccatgacgtggacttcctcatcacccaccccaaggagggtcaggaggcggggctgctgcctagagtgatgtgccgcctgcaggaccagggcctcatcctgtaccaccagcaccagcacagctgctgtgagtcccctacccgcctggcccaacagagccacatggacgcttttgagagaagtttctgcattttccgcctaccacaacctccaggggctgctgtggggggatccacgaggccctgcccatcctggaaggccgtgagagtggacttggtagttgcacccgtcagccagttccctttcgccctgctcggttggactggctccaagcttttccagcgggagctgcgccgcttcagccggaaggagaagggcctgtggctgaacagccatgggctgtttgacccggagcagaagacatttttccaagcggcttcagaggaagacatcttcagacacctgggccttgagtaccttcctccagagcagagaaacgcctgagcctgcctgtgtccccmacttccactcaggaaattgggctgcccccaacctggccactgaatgtctccaggcagatatgctgccccctgacccccaccttcacccctccccgccaaggcctggctcttccggaggtcaattgtgcctgcaggatcagttgagcccctgctggtgtgctgcagggtgtgatgaggtrggagccctcagtgccagcctcatcactgtgtgaccctgggtctgctcttagcctccccatggctcacgttcctgccctggatgggatgtgagyggggcccacatcgtggagctgtggtggggcctgcagtcatgaatggcaagtggtccctgatgtgcagtgtctcattagttgcactgcagttaactgtggctcctgcagggcaccctgcccagaatgcccagaagagaaccatgcatacctgcactgcatttgagagccatgagctggaggctgtggttcgtgccagcaaggagcctactgtctggtgtgctgtaggcatctggagagggagagggcctgggtaggagctgggaggaagataattttcaactatggggcttcagtactgcagcgccccgagccaggctctgtgcttctgcctttaaggcctgttctcagcacaatgtctcaaaaataggtcatatcctgccactcccgtcgcagagccctttaatggttccaaaccctaagtccacacatagcccctggctctggcatctctccagccccactggccccgagctgcttgactcaccggcttcctatttgatgcacccaggcccccttgtggccaactccctccccttctcactgaggcagaagcactgaggtgggctggacatgggtgccctccacgtccctcatatccccaggcacactctggcctcaggttttgccctggccatgtcatctacctggagtgggccctccccttcttcaggccttgaatcaaaagccactttgttaggcgaggatttcccagaccactcatcacattaaaaaatattttgaaaacatgcagtaaagt

SEQ ID NO: 1090 - DNA, 848 bp, Homo sapiens
gggaagcagccgtccccgtccagagtcctctgtggtccctgctgccaccatggccactcaccgcctcgtgatggtccggcacggcgagagcacatggaaccaggagaaccgtttctgtggctggttcgatgcagagctgagtgaaaaggggaccgaggaggccaagcggggagccaaggccatcaaggatgccaagatggagtttgacatctgctacacgtcagtgctgaagcgggccatccgcaccctctgggccatcctggacggcacggaccagatgtrgctgcctgtggtgcgcacttggcgcytcaatgmgyggcattacgggggcctcacagrcytcaacaaggcagaaacggccgccaagcacggggaggagcaggtgaagatctggaggcgctccttcgacatcccgccgcccccgatggacgagaagcacccctactacaactccattagcaaggagcgtcggtacgcaggcctgaagcccggggaactccccacctgcgagagcctcaaggacaccattgcccgggccctgcccttctggaacgaggagattgttccccagatcaaggccggcaagcgagtgctcattgcagcccacgggaacagcctgcggggcattgtcaagcacctggaagggatgtcagaccaggcgatcatggagctgaacctgcccacggggatccccattgtgtatgagctgaacaaggagctgaagcccmccaagcccatgcagttcctgggtgatgaggaaacggtgcggaaggccatggaggctgtggctgcccagggcaaggccaagtgaggggtgggcttgggcaataaaggcacctcccccaaca

SEQ ID NO: 1091 - DNA, 2937 bp, Homo sapiens
ccaggatcatagagacgctcggcctccgccgcacgcgctggcggactaagagtggctggcgaagcgagcggccggcgcgggcccctggcgggcgggcggtacagccccaagcctgagacccggacctgagcatcgcaggcccaggacgaggtggccaggcggcccccatggcgtccctggtctaggcggagaaccgcctgggcgatgagtgagaacctcgacaacgagggcccgaagcccatggagagctgtggccaggagarcagcagtgccctgagctgccctaccgtctcggtgccccctgcagccccggcagccctggaggaggtggagaaagagggcgctggggcggctacagggccggggcctcagcccgggctctacagctacatcagggatgacttgtttacytctgagatctttaaactggagctgcagaacgtgcctcgccacgccagcttcagcgacgtccggcgcttcctgggccgctttggtctgcagccccacaaaaccaaactctttgggcaaccaccctgcgcctttgtgacattccgcagygctgcagagagggacaaggccctgcgcgttttgcatggtgccctctggaaaggccgcccactcagtgtgcgcctggcccggcccaaggccgaccccatggccaggaggaggcgacaggagggtgagagtgagccaccagtaacacgagtggccgacgtggtgacccctctatggacagtgccctatgctgagcagcttgagcggaagcagctggagtgcgagcaggtgctgcagaaacttgccaaggaaatcgggagcaccaaccgtgccttgctgccctggctrctcgagcagaggcacaagcacaacaaggcctgctgcccgctggagggggtcaggccatcaccccagcagactgagtatcgtaataagtgtgagtttctggttggcgtcggggtggatggggaggataacaccgtgggctgtcggctcggcaagtacaagggcgggacgtgtgctgtggcagccccgtttgacaccgtgcacatccccgaagccaccaagcaggtggtgaaggccttccaggagttcatccggtccactccatactcggcatacgacccagagacgtacacaggccactggaagcagctgactgtgcgcaccagccgccgccaccaggccatggccattgcctacttccacccccagaagctgagccctgaggagctggcagagctgaagacytccctagcgcagcacttcacagcagggccaggcagggccagtggagtgacctgcctctacttcgtggaggagggacagcgaaagactcctagccaggagggcctgcccctggagcatgtggctggggaccggtgcatccacgaggacctgctagggctgaccttccggatctctccacacgccttcttccaggtgaacacacccgcagccgaggtgctctacacagtcatccaggactgggcccaattggatgcggggagcatggtgctggacgtgtgctgtggcaccggcaccattggcctggccctggcccggaaggtaaagagggtcattggggtcgagctatgcccagaggctgtggaggacgcccgggtgaacgcccaggacaatgagttgagtaatgtggagttccactgcgggagggccgaggacctggtgcccaccctggtgagcagactggcctcccagcacctcgtggccatcctggacccaccccgtgctggcttgcattccaaggtgatcctggccatccggagagctaagaacctcaggcggctgctgtacgtctcatgcaacccccgggcagccatgggcaactttgtggacctctgcagagccccatctaaccgggtgaagggcattcccttccggccggtcaaggctgtggcagtggacctgttcccgcagaccccgcactgtgagatgctcatcctgtttgagagggtggagcaccccaatggcacaggggtcttggggccccacagscctccagctcaacccacaccaggacccccagataacaccctacaagaaactgggaccttcccctcatcctaggcccaggacccattatggggacaggagctgaagggctcccagggccccaggggcggggaaggcatggcttgctggccaggatattcagaggtaggcagccaaagggcacagaaccctgtgccccaccaggattggcctgctgctaggggccaggggccctgaccaggaagacaggtgggttcctgtagcctgttscccatccccagggcctttgtggactagccaaggctgtgagggccagaataaacaactgctcaacaaagggtgtttctgtgatgagagccaggggtctgaacacagggcctgggtgccagggaaagggccaaactaggcctaggcagctctgcaagcctctctgcatggctgggggagtcagggcagagcttactttaaaaaagaatgttcgatttgatacttaaacttgaggagaggcagagagaggtctgggaactgcaccagctgggggcatggggtggagaacactgggcagagttggcccctctgtggccagcctggccctcagcccagcagagagggcatcaaccaaggaaggggccatgctggggtgctgctcagctgttacaaaggcagggtccagcctgcagggaggccccaggaggggatctggccagtcaagggtccacagggtgccagcctctcaccctcagaataaagacatcagccattcccttctggacagtttgctttatgtgttcagacaatcaaggctcgccttccaggcacagcccagtgcyctggatggcatcagcacaggctcccctgccccggccttgaagcatggctgtgtgcacgattcatacccatgcttggcagacgggtkgggggggggggggg

SEQ ID NO: 1092 - DNA, 3098 bp, Homo sapiens
tgacgttgccagaagccaggatcatagagacgctcggcctccgccgcacgcgctggcggactaagagtggctggcgaagcgagcggccggcgcgggcccctggcgggcgggcggtacagccccaagcctgagacccggacctgagcatcgcaggttcgagtcccgccccgcctggggcgaagccgggggtggcggcgacctcgcggcgttgcaccggctctgtgagcacctcccctctgagcacttcccttgtgacaggccacttcccttgtgacaggcccaggacgaggtggccaggcggcccccatggcgtccctggtctaggcggagaaccgcctgggcgatgagtgagaacctcgacaacgagggcccgaagcccatggagagctgtggccaggagarcagcagtgccctgagctgccctaccgtctcggtgccccctgcagccccggcagccctggaggaggtggagaaagagggcgctggggcggctacagggccggggcctcagcccgggctctacagctacatcagggatgacttgtttacytctgagatctttaaactggagctgcagaacgtgcctcgccacgccagcttcagcgacgtccggcgcttcctgggccgctttggtctgcagccccacaaaaccaaactctttgggcaaccaccctgcgcctttgtgacattccgcagygctgcagagagggacaaggccctgcgcgttttgcatggtgccctctggaaaggccgcccactcagtgtgcgcctggcccggcccaaggccgaccccatggccaggaggaggcgacaggagggtgagagtgagccaccagtaacacgagtggccgacgtggtgacccctctatggacagtgccctatgctgagcagcttgagcggaagcagctggagtgcgagcaggtgctgcagaaacttgccaaggaaatcgggagcaccaaccgtgccttgctgccctggctrctcgagcagaggcacaagcacaacaaggcctgctgcccgctggagggggtcaggccatcaccccagcagactgagtatcgtaataagtgtgagtttctggttggcgtcggggtggatggggaggataacaccgtgggctgtcggctcggcaagtacaagggcgggacgtgtgctgtggcagccccgtttgacaccgtgcacatccccgaagccaccaagcaggtggtgaaggccttccaggagttcatccggtccactccatactcggcatacgacccagagacgtacacaggccactggaagcagctgactgtgcgcaccagccgccgccaccaggccatggccattgcctacttccacccccagaagctgagccctgaggagctggcagagctgaagacytccctagcgcagcacttcacagcagggccaggcagggccagtggagtgacctgcctctacttcgtggaggagggacagcgaaagactcctagccaggagggcctgcccctggagcatgtggctggggaccggtgcatccacgaggacctgctagggctgaccttccggatctctccacacgccttcttccaggtgaacacacccgcagccgaggtgctctacacagtcatccaggactgggcccaattggatgcggggagcatggtgctggacgtgtgctgtggcaccggcaccattggcctggccctggcccggaaggtaaagagggtcattggggtcgagctatgcccagaggctgtggaggacgcccgggtgaacgcccaggacaatgagttgagtaatgtggagttccactgcgggagggccgaggacctggtgcccaccctggtgagcagactggcctcccagcacctcgtggccatcctggacccaccccgtgctggcttgcattccaaggtgatcctggccatccggagagctaagaacctcaggcggctgctgtacgtctcatgcaacccccgggcagccatgggcaactttgtggacgccccccttttccccccacagcctctgcagagccccatctaaccgggtgaagggcattcccttccggccggtcaaggctgtggcagtggacctgttcccgcagaccccgcactgtgagatgctcatcctgtttgagagggtggagcaccccaatggcacaggggtcttggggccccacagscctccagctcaacccacaccaggacccccagataacaccctacaagaaactgggaccttcccctcatcctaggcccaggacccattatggggacaggagctgaagggctcccagggccccaggggcggggaaggcatggcttgctggccaggatattcagaggtaggcagccaaagggcacagaaccctgtgccccaccaggattggcctgctgctaggggccaggggccctgaccaggaagacaggtgggttcctgtagcctgttscccatccccagggcctttgtggactagccaaggctgtgagggccagaataaacaactgctcaacaaagggtgtttctgtgatgagagccaggggtctgaacacagggcctgggtgccagggaaagggccaaactaggcctaggcagctctgcaagcctctctgcatggctgggggagtcagggcagagcttactttaaaaaagaatgttcgatttgatacttaaacttgaggagaggcagagagaggtctgggaactgcaccagctgggggcatggggtggagaacactgggcagagttggcccctctgtggccagcctggccctcagcccagcagagagggcatcaaccaaggaaggggccatgctggggtgctgctcagctgttacaaaggcagggtccagcctgcagggaggccccaggaggggatctggccagtcaagggtccacagggtgccagcctctcaccctcagaataaagacatcagccattcccttctggacagtttgctttatgtgttcagacaatcaaggctcgccttccaggcacagcccagtgcyctggatggcatcagcacaggctcccctgccccggccttgaagcatggctgtgtgcacgattcatacccatgcttggcagacgggtkgggggggggggggg

SEQ ID NO: 1093 - DNA, 3539 bp, Homo sapiens
ccaggatcatagagacgctcggcctccgccgcacgcgctggcggactaagagtggctggcgaagcgagcggccggcgcgggcccctggcgggcgggcggtacagccccaagcctgagacccggacctgagcatcgcaggcccaggacgaggtggccaggcggcccccatggcgtccctggtctaggcggagaaccgcctgggcgatgagtgagaacctcgacaacgagggcccgaagcccatggagagctgtggccaggagarcagcagtgccctgagctgccctaccgtctcggtgccccctgcagccccggcagccctggaggaggtggagaaagagggcgctggggcggctacagggccggggcctcagcccgggctctacagctacatcagggatgacttgtttacytctgagatctttaaactggagctgcagaacgtgcctcgccacgccagcttcagcgacgtccggcgcttcctgggccgctttggtctgcagccccacaaaaccaaactctttgggcaaccaccctgcgcctttgtgacattccgcagygctgcagagagggacaaggccctgcgcgttttgcatggtgccctctggaaaggccgcccactcagtgtgcgcctggcccggcccaaggccgaccccatggccaggaggaggcgacaggagggtgagagtgagccaccagtaacacgagtggccgacgtggtgacccctctatggacagtgccctatgctgagcagcttgagcggaagcagctggagtgcgagcaggtgctgcagaaacttgccaaggaaatcgggagcaccaaccgtgccttgctgccctggctrctcgagcagaggcacaagcacaacaaggcctgctgcccgctggagggggtcaggccatcaccccagcagactgagtatcgtaataagtgtgagtttctggttggcgtcggggtggatggggaggataacaccgtgggctgtcggctcggcaagtacaagggcgggacgtgtgctgtggcagccccgtttgacaccgtgcacatccccgaagccaccaagcaggtggtgaaggccttccaggagttcatccggtccactccatactcggcatacgacccagagacgtacacaggccactggaagcagctgactgtgcgcaccagccgccgccaccaggccatggccattgcctacttccacccccagaagctgagccctgaggagctggcagagctgaagacytccctagcgcagcacttcacagcagggccaggcagggccagtggagtgacctgcctctacttcgtggaggagggacagcgaaagactcctagccaggagggcctgcccctggagcatgtggctggggaccggtgcatccacgaggacctgctagggctgaccttccggatctctccacacgccttcttccaggtgaacacacccgcagccgaggtgctctacacagtcatccaggactgggcccaattggatgcggggagcatggtgctggacgtgtgctgtggcaccggcaccattggcctggccctggcccggaaggtaaagagggtcattggggtcgagctatgcccagaggctgtggaggacgcccgggtgaacgcccaggacaatgagttgagtaatgtggagttccactgcgggagggccgaggacctggtgcccaccctggtgagcagactggcctcccagcacctcgtggccatcctggacccaccccgtgctggcttgcattccaaggtgatcctggccatccggagagctaagaacctcaggcggctgctgtacgtctcatgcaacccccgggcagccatgggcaactttgtggacgccccccttttccccccacagcctctgcagagccccatctaaccgggtgaagggcattcccttccggccggtcaaggctgtggcagtggacctgttcccgcagaccccgcactgtgagatgctcatcctgtttgagagggtggagcaccccaatggcacaggggtcttggggccccacagscctccagctcaacccacaccaggacccccagataacaccctacaagaaactgggaccttcccctcatcctaggcccaggacccattatggggacaggagctgaagggctcccagggccccaggggcggggaaggcatggcttgctggccaggatattcagaggtaggcagccaaagggcacagaaccctgtgccccaccaggattggcctgctgctaggggccaggggccctgaccaggaagacaggtgggttcctgtagcctgttscccatccccagggcctttgtggactagccaaggctgtgagggccagaataaacaactgctcaacaaagggtgtttctgtgatgagagccaggggtctgaacacagggcctgggtgccagggaaagggccaaactaggcctaggcagctctgcaagcctctctgcatggctgggggagtcagggcagagcttactttaaaaaagaatgttcgatttgatacttaaacttgaggagaggcagagagaggtctgggaactgcaccagctgggggcatggggtggagaacactgggcagagttggcccctctgtggccagcctggccctcagcccagcagagagggcatcaaccaaggaaggggccatgctggggtgctgctcagctgttacaaaggcagggtccagcctgcagggaggccccaggaggggatctggccagtcaagggtccacagggtgccagcctctcaccctcagaataaagacatcagccattcccttctggacagtttgctttatgtgttcagacaatcaaggctcgccttccaggcacagcccagtgcyctggatggcatcagcacaggctcccctgccccggccttgaagcatggctgtgtgcacgattcatacccatgcttggcagacgggtkggggggggggggggcgaggctccccaacctttaggggaacacatgtgcacgaagctttggttcacaggcgcatctggctggctaagggcaacagtcacagtcaaatgactattcacagctgcagacaggaggcaagacagaagcaagtgtctaattatagcaatttgagttgagggtttcwtttttaaaggtcaacagaagccaaccttggtcacacaggtagtgagggaaggatatgttgtgggcggcccacaggccaacattgttttcctgacagaaaaaaaaaaaaaagcgccrtcagtaccgcctgtagggggcatggtgggggacagacacggcagaacgctggactcttgcttcagatggcgcaccacaagcacacggcactctgcacaggtgccagtccaccaccagggccagcctttgagcacaccctggtgcctcagactccggcaggaacacatttccatcgcacacccacccataggggccaccagtcgagaagcaagctgggcaccaggcagctgcctttgacatccagagaaaccgctgtcacaggcaacagctctggatcaagaatgggctacactgaag

SEQ ID NO: 1094 - DNA, 3517 bp, Homo sapiens
ccaggatcatagagacgctcggcctccgccgcacgcgctggcggactaagagtggctggcgaagcgagcggccggcgcgggcccctggcgggcgggcggtacagccccaagcctgagacccggacctgagcatcgcaggcccaggacgaggtggccaggcggcccccatggcgtccctggtctaggcggagaaccgcctgggcgatgagtgagaacctcgacaacgagggcccgaagcccatggagagctgtggccaggagarcagcagtgccctgagctgccctaccgtctcggtgccccctgcagccccggcagccctggaggaggtggagaaagagggcgctggggcggctacagggccggggcctcagcccgggctctacagctacatcagggatgacttgtttacytctgagatctttaaactggagctgcagaacgtgcctcgccacgccagcttcagcgacgtccggcgcttcctgggccgctttggtctgcagccccacaaaaccaaactctttgggcaaccaccctgcgcctttgtgacattccgcagygctgcagagagggacaaggccctgcgcgttttgcatggtgccctctggaaaggccgcccactcagtgtgcgcctggcccggcccaaggccgaccccatggccaggaggaggcgacaggagggtgagagtgagccaccagtaacacgagtggccgacgtggtgacccctctatggacagtgccctatgctgagcagcttgagcggaagcagctggagtgcgagcaggtgctgcagaaacttgccaaggaaatcgggagcaccaaccgtgccttgctgccctggctrctcgagcagaggcacaagcacaacaaggcctgctgcccgctggagggggtcaggccatcaccccagcagactgagtatcgtaataagtgtgagtttctggttggcgtcggggtggatggggaggataacaccgtgggctgtcggctcggcaagtacaagggcgggacgtgtgctgtggcagccccgtttgacaccgtgcacatccccgaagccaccaagcaggtggtgaaggccttccaggagttcatccggtccactccatactcggcatacgacccagagacgtacacaggccactggaagcagctgactgtgcgcaccagccgccgccaccaggccatggccattgcctacttccacccccagaagctgagccctgaggagctggcagagctgaagacytccctagcgcagcacttcacagcagggccaggcagggccagtggagtgacctgcctctacttcgtggaggagggacagcgaaagactcctagccaggagggcctgcccctggagcatgtggctggggaccggtgcatccacgaggacctgctagggctgaccttccggatctctccacacgccttcttccaggtgaacacacccgcagccgaggtgctctacacagtcatccaggactgggcccaattggatgcggggagcatggtgctggacgtgtgctgtggcaccggcaccattggcctggccctggcccggaaggtaaagagggtcattggggtcgagctatgcccagaggctgtggaggacgcccgggtgaacgcccaggacaatgagttgagtaatgtggagttccactgcgggagggccgaggacctggtgcccaccctggtgagcagactggcctcccagcacctcgtggccatcctggacccaccccgtgctggcttgcattccaaggtgatcctggccatccggagagctaagaacctcaggcggctgctgtacgtctcatgcaacccccgggcagccatgggcaactttgtggacctctgcagagccccatctaaccgggtgaagggcattcccttccggccggtcaaggctgtggcagtggacctgttcccgcagaccccgcactgtgagatgctcatcctgtttgagagggtggagcaccccaatggcacaggggtcttggggccccacagscctccagctcaacccacaccaggacccccagataacaccctacaagaaactgggaccttcccctcatcctaggcccaggacccattatggggacaggagctgaagggctcccagggccccaggggcggggaaggcatggcttgctggccaggatattcagaggtaggcagccaaagggcacagaaccctgtgccccaccaggattggcctgctgctaggggccaggggccctgaccaggaagacaggtgggttcctgtagcctgttscccatccccagggcctttgtggactagccaaggctgtgagggccagaataaacaactgctcaacaaagggtgtttctgtgatgagagccaggggtctgaacacagggcctgggtgccagggaaagggccaaactaggcctaggcagctctgcaagcctctctgcatggctgggggagtcagggcagagcttactttaaaaaagaatgttcgatttgatacttaaacttgaggagaggcagagagaggtctgggaactgcaccagctgggggcatggggtggagaacactgggcagagttggcccctctgtggccagcctggccctcagcccagcagagagggcatcaaccaaggaaggggccatgctggggtgctgctcagctgttacaaaggcagggtccagcctgcagggaggccccaggaggggatctggccagtcaagggtccacagggtgccagcctctcaccctcagaataaagacatcagccattcccttctggacagtttgctttatgtgttcagacaatcaaggctcgccttccaggcacagcccagtgcyctggatggcatcagcacaggctcccctgccccggccttgaagcatggctgtgtgcacgattcatacccatgcttggcagacgggtkggggggggggggggcgaggctccccaacctttaggggaacacatgtgcacgaagctttggttcacaggcgcatctggctggctaagggcaacagtcacagtcaaatgactattcacagctgcagacaggaggcaagacagaagcaagtgtctaattatagcaatttgagttgagggtttcwtttttaaaggtcaacagaagccaaccttggtcacacaggtagtgagggaaggatatgttgtgggcggcccacaggccaacattgttttcctgacagaaaaaaaaaaaaaagcgccrtcagtaccgcctgtagggggcatggtgggggacagacacggcagaacgctggactcttgcttcagatggcgcaccacaagcacacggcactctgcacaggtgccagtccaccaccagggccagcctttgagcacaccctggtgcctcagactccggcaggaacacatttccatcgcacacccacccataggggccaccagtcgagaagcaagctgggcaccaggcagctgcctttgacatccagagaaaccgctgtcacaggcaacagctctggatcaagaatgggctacactgaag

SEQ ID NO: 1095 - DNA, 1910 bp, Homo sapiens
gwgcacgatgagagatcgtccaggaggcggtgttgatgcggcaaagggcaacaggaagggcattaggacttgaaatcggagacgcacgcaggggagggagtcagtgtcggaacctggtaggccctgggagaactccggcttttcgtctgcgtgagctggagaagagccgaaggtttctgcgcacagcacggacctgcgtgcctcagctttaaggaaatcaccgtggccgccgctgtgaacgcagagaagggcgcgagcgtgggagcaggaacccaaggcggtgggaaacggtggggctttctgagtgtattggaaagtagagcccacagatctgctgcagaccagaaaggggcgcgagaaagagcggacagaggcagacgccggggctggcggcgatggagcagcagtcggaggamgcggaaggcctgcgagagtcgcccgcggcccagygccggccttcgggtcccaccttgcgggtgatgttgtgcacgtaggggcacgtgttgcaggmgaagcggtggcagcgttgtccctcctccacgatcagcccgttcccgcagccggggcagaacagcagcatggtctcgaactccgcaggctccaactcccggcagctcccactgccgctcagcgccgatgcgccgcccgcctcgagctcacattggtcctggcagccttcccgccacaccaaccaaccaatagacagggcgattctgcgctcccggccctgctgcaggctgtctcgcacttgtcattggtcactgcagccgccccaccccccccggcgcgccagtggctgggcggcctcgctggggcgggccgcagttcctgcgcgtgcgcgcttggcctccctagtgcgggctggcagtgcgggcagagcccggctgagaggggcggccctggaggagacggaggcsgcgggtgggmccgaggcgcaagaggaagatgaggacgaagaagaggcgctgccgcactccgaggccatggacgtgttccaggagggtctggctatggtggtgcaggacccgctgctctgcgatctgccgatccaggttactctggaagaagtcaactcccaaatagccctagaatacggccaggcaatgacggtccgagtgtgcaagatggatggagaagtaatgcccgtggttgtagtgcagagtgccacagtcctggacctgaagaaggccatccagagatacgtgcagctcaagcaggagcgtgaagggggcattcagcacatcagctggtcctacgtgtggaggacgtaccatctgacctctgcaggagagaaactcacggaagacagaaagaagctccgagactacggcatccggaatcgagacgaggtttccttcatcaaaaagctgaggcaaaagtgagcctccagacaggacaacsctcttcatcactggtggctgagctttttcccagcaggaatgggtcctcgaatcatcgtgcctctttcacagaaaggacgttgtggtggcctcaccccaggcatgcccaacagkaactgtcagcataaacctgggggccctcaggactaggacagggtgagccagtgctccctcctttcatgtacttggcctgagactgacctctccctaggtccaaatgccctagtcacatggcagacccacggcctggcccactgtataaaataaacctgtttgcttcttagtttgaaaagtagaaagccacagtaacctgggtagcaaagactgagattgccccatcacagaggtgagttaaggggagagaattggtacaggcgagtcctatagtccaagatggcgccacaccaccaaagccttgaggccacaccactccccaaaccacacaactgtgttaccatgatctccacagcaaggaggaaataaaagcagagcggctttagggtttgcatc

SEQ ID NO: 1096 - DNA, 519 bp, Homo sapiens
atgatgggctggagctgccttgtgacaggagcaggagggtttccgggtcagaggattgtcaacctcttggtgaaggagaaggagctaaaggagatcagggccttggacaaggccttcagatcaggattgagggagaaatkttctaagctccagaacaagaccaagatgacagtgctagaaggagacattctggatcagtcatgcctgaagagagcctgccaggacatctcggtagtcatccacaccgcctctatcattgacatcttcggtgtcactcacagagagtctatcatgaacttcaaygtgaaaggtacccaacagctgttggaggcctgtgtccaagctagtgtgctagtcttcatccataccagcagcatacaggtagcctggcccaactcctacaaagagattttccagaatcgacacaaacaagagcatctggaaaacacatggtctgctccatatccatacagcaaaaacttgctgagaaggctgtgctggtggctaatgtgtggactc

SEQ ID NO: 1097 - DNA, 730 bp, Homo sapiens
gaaacttccaagccagtttcagaaaccattccgataacctgtcccgtgttcacacagagctccagaacaagaccaagctgacagtgctggaaggagacattctggatgagccattcctgaagagagcctgccaggacatgtcggtcatcatccacactgcctctatcatatatgtcatcggtgtcactcacagagtacccagcttctgttggaggcctgtgtccaagctacagtgccaatcttcatctacaccagtaccctagaggtagccaggcccaattcctacaaggaaatcattcagaacggtcatgaagaagagcctctggaaaacacatggtacgctccatacccacacagcaaaaagcttgctgagaaggctgtgctggcggctaatgggctgactctgaaaaacggtggcaccttgtacacttgtgccgtaagaccaatgtttatctatggggaaggaagcccaatcctttctgccggtataaatgaggccctaaacaaccatggaatcctgtcaagtttcagcaagttctccagagtcaacccagtctatgttggcaacatagcctgggcccacattctggccttgagggccctgcgggaryccaagaaggccccaagtgtccgaggacagttctactatatctcagatgacacgcctcaccaaagctatgataaccttagttacaccttgagcaaagagttcggcctctgccttgattcc

SEQ ID NO: 1098 - DNA, 6967 bp, Homo sapiens
gacgccttggacgcggttcaggaatccgccgccgctagccggctcgggcctgagcggggagggcgccaggcaggacctctcgcaggctcgctgcgcaggacggcgcccgcctggcgccgcttcccttccagcgtgccgaccggccccgcagcgcctccatccctccggcccgccccggagaagacgcacagctcgggccgcgcgggcgccggggccgcggaaccgcttctgccgggatcttccaggaggaaagcgaagttgcgagcggatgctgcccgcgccggaccccagccgcggagggtcggggccgccggtggagtctcggcggccggggacaagggtgtcccccacctgaagacggcaagctgggtcctgagtgatgcccctcagctgagtgtccaaggctggcccgaggagcccccacggccccacctttccccatggagaaaggactcactttgccccaggactgccgggactttgtgcacagcctgaagatgagaagcaaatacgcccttttcttggtttttgtggtgatagtttttgtcttcatcgaaaaggaaaataaaatcatatcaagggtctcagacaagctgaagcagattccccaagctctagcagatgccaacagcaccgacccagccctgatcttagctgagaacgcatctctcttgtccctgagcgagctcgattcagccttctcccagcttcagagccgtctccgcaacctcagcttgcagctgggcgtggagccagccatggaggccgcaggggaggaagaggaagagcagagaaaggaggaggagccgcccagaccggccgtggcggggccccggcgccacgtgctgctcatggccaccacgcgcaccggctcctcgttcgtgggcgagttcttcaaccagcagggcaacatcttctacctcttcgagccgctgtggcacatcgagcgcacagtgtccttcgagccggggggcgccaacgccgcgggctcggccctggtgtaccgcgacgtgctcaagcagctcttcctgtgcgacctgtacgtgctggagcacttcatcacgccgctgcccgaggaccacctgactcagttcatgttccgccggggctccagccgctccctgtgcgaggaccccgtctgtacgcccttcgtcaagaaggtcttcgagaagtaccactgcaagaaccgccgctgcggccccctcaacgtgacgctggccgcagaggcctgccgccgcaaggagcacatggccctcaaggcggtgcgcatccggcagctggagttcctgcagccgctggccgaggacccccgcctggacctgcgcgtcatccagctggtgcgcgacccccgggccgtgctggcctcgcgcatggtggccttcgccggcaagtataagacctggaagaagtggctggacgacgagggccaggacggcctgagggaagaggaggtgcagcggctgcggggcaactgcgagagcatscgcctgtccgcggagctggggctgcrgcagcccgcctggctgcggggccgctacatgctggtgcgctacgaggacgtggcacgcgggccgctgcagaaggcccgcgagatgtaccgcttcgccggcatccccctgaccccgcaggtggaagactggatccaaaagaacacgcaggcggcccacgacggcagcggcatctactccacgcagaagaactcctcggagcagttcgagaagtggcgcttcagcatgcccttcaagctggcccaggtggtgcaggccgcctgcggccctgccatgcgcctcttcggctacaaactggcgcgggacgccgccgccctcaccaaccgctcagtcagcctgctggaggagaggggcaccttctgggtcacgtaggggggccggggccccgtatgcccctcctcgtgaaaggcctgccccgtctttctgccgcagccctcgcagagggcgggtgcacagcgccatgagcgggcagcgcctcctgtagcagtagggcccccagccagcgctccagccaaagcggcggccccagggttaattgcggagaacaggacagtgcccggtccccttgagggccatcacacccagacccaacgggttgcagcctcctgagcaggcctaggcaggcccgggcctgttggcaagcttcgatctcacacacacagaaacatacattcgtgcctggagaccctgcaggccagagtccaaatatttaacaatcagaaggggcaaggctctgaccagtgacagtcagacctcctgctttatttggtgttaaccgtttcttgtctggatggtgaagtctggaatctgggtgggtccttggaggaggggctaggacagccgtgggtgtcaaaggtggcatttgaggctcgtttgaggtgacagtggctgtttaccaactagtacagagcgattcagcgttttcatgaatgggttggctgtgctggttactgatgaatatgggccccttatagagctgcaaaacacacacatgcgtatagacatacatacatgtacaccatacatagacaagcatcataaaggcacaagtgcacacacatctatgcagacaagcttcctcgctgcttatgcccacagggtttttctgtatgacacacctcagaggagcctgtgattaacatttgtaggattatttcgagggcagggcaggggaaagaaacgcgttaaagggccatgacatgacacagttccctggccgggtttggactgaacagtggattcagaactgcagcgttcaaagcccctgcccgccttagattctcatggctacctcctctgacccatccacatccttgcggctggcaggcaggatgttttgaaatggtgcagccaaaggccccgtctagcttggctggctcccgaacatgtccatatttgaaggctgcctcaggcctggcaggcagaagcagctgtggtccctggaggcaaaaggcagctcacggggccttccatttccagccaggcctcatctggggtagggccaagaggaaagtacagagtgcccgtgggggagaagtcccaccaggatgccccccctcccctgagaagcccgccttctccctcgtggacaggagtcagccagttggttgctgtggttacagccagtgcctggaattcctccttagggctctgggaagagtattgcttaacgcaggatgtgctgggtgttttgtttcgggcttttatttatggcttggtgtctttcttgttttatggctgtgtttttgcttttgtttctgtaggagcgcctcttccaagcagtggaggcctgagggcttgagggaggctggggaaaaccagcagggagcacttggctcctggcagagggagaggacaggaggaggagccttccccaggaggaacgaggagaggtggccacgtggcaggccacagtgccctatgggcttttctgtttgaaccccatgtgggatgaatctcaaagccaccagcgttcttgcctagtgtccagagcagcagagatttgcagccctcgcccctccctgagaagaagctggatttgaaaatccctcacaggccctaacatgtttcctgggtgggcaggggcctcatgacaagcgacaagtgtacccagagtagaaggccttccccactcccacctcaaacccaggagcagaactcagtatccagagcttacaaggagctgcaagggtttgccgagggctgcccagctctgyttctggtttcctggacaatttctctgtcagatacggcccattgyaaacccagagggctgcattttgggttgagtaatatggacaccatggaagtacaggatctgagtccaacattgccatgggggagggaagagtgtgtcctggcaggaagccaccattggagaaggtgaggccagtaaccatctcatgggattcgctataatcagcctatttgagctgctgggtctctgtcactgtggactccagtcattcaaggaggtctccactcttgggttttttttattttcttttcttttgctattttgcctgaacaccccaacactcttggttttagagtccaagagtaagttgtgcagagacatggttctaatttggagttcaaaggaacaccagctctgaaaacatgaccgtggggccaggatgtttctggcaggcccagaagtgctggccgttcttccccagcctccccactgctccctcctctgttccccatgtggaggtcgggggggctgggactggggagggggcagccacctccatccaaggctcttcctaggggccctgctaatgtggacagyagactttatccctccttcttactctgggccaagacctcccactccgccctctgaggatggtaccaagaatgggcctttgggacttctcaggacattgacaatgtgcacactgcaggttgacttaatttatttattttttgaaaagaagagacagaaaataccttattatctgcagggactcaaagctgtacccaaatcaagaaagacaaaataacaatagaaaccattcacacactccgttcatgcatggacaccagaagacgattcagaacacaagaggagaatgagctggagcgccagcaccacgatggccccaggacgttgtttaagatctgagatcccttggtttctctcttgttgatctgagatgctacatcagggcccttgctgctgtattacctctgcccgggtgtttgagacaggtcacaagcgcgtggatgtttcctggaagtgtattcccctggggctcagcgatgctctgggaacccttggggtttggggaaggacagtgtggtgtgactattggcttgaaacgttatggatatggttggagtcacccatgtggatatgattttcagcttggagctgggatggagaagatggaagcactggtggccgggcctctttttccagcgaggccagccctggcttctcctctgttccagcttgtctgccagaagccttcccctgcaaggtgcccacctgcccggagacagagggagcagctgaggcctctctccactggccgccagcctccctagcacaaggggaccattcagcaatgagtgtttactcatgttctttcttgttgatgagttctgcggcccagcatatagaaatggctcagaacgttccaggccttggtgagacacagcagcgtccaatgctcacaggctgtccccactctgcctgttcccatcttcccctcgggacctgtttataaattgaggaatggatgagggccctggagggtccttgggagtagttagtggagggcaggattctcaggtccccatagagagggaaagagaagaccagatgtgcatagaagccaatctctgtcacatacaccgcaggtggtcaccgagttattttccaaaagctgaggaacataaagcaaatttaggcttttgtccttctgcaatacatgcacttgaaaataaacagaaaagagatgtttaataacaagtttacttccggtctgctagcaccctcagcctgggagctactgccagaggctggcgtagtggggcagctgctgaccaaaccccacagaacagagggcaccaggcatcacacgacatctttccctcccatctctgccatctgtctgtctggcaatggaaggagcttcagcaggagrtccttcccagaaggttgattcttggcctgggtggtagaggagatatcctgaccctaaagtcttccagccccgggtcatcctctcctatactagggcctattgaccgtagaggccaggtgcggtggctcatacctgtaatcccagcatttggggaggccaaggtgggaggattgcttgagcccaagagttggagaccagcctgggcaacatggtgagaccaattgactgtagggcttgtcccttgctaagacaggagcagaagactggatggctgtgtcctcaaggcagtcccctcccatccccattcccaaagtcagaaagygaagccagatctcaagggctgatacctgaggcaaggagagctaaggggagagaaattggggctgagtggaagcagatgcctgcacaagccaagtgtgtcttattgatctgtacaagctgatagaaggaccatctgctgaaatccagggctcctgagttggtgggtttgcttgtgaagcttctaggacaaggcgcagccagatggaagggagagggtccagggcttcctaaatgcagccgcatcacctgtcaactcgctgcagtttcagagacagtggaagctgctctttacctcaaaagcacaaagcagaattsgcaacttcacwtgtctcaagagctccaagatcctttggtctcgtgtcctttggcaccccgtaactggactgggracaaatttgttacgtgtttccaaggctacagacatggygccatcctcacaggcctagctcatgtcatggatcaggtgctttgctggggggatacaatgacccatgtggtctgcgtcttctgccattggcttgaactgggcaccccctgaagtctccatctcagctgtatattctagtccaaattttcctggctcccctgctccctcccaggtcctgcacactgtctttttgccaacacctcagccctgtttgctatttcatgtctgcatggtacgagacaccccttcacrgcatacactgccatggtatgtacatatgcatccacgtgtgtgtatgtgtagcatgtagctcattctgctcagcctctggcgccgttccacattgctcccagccccattgctgtcactgtcgtcccagatgtccttgccatggccacagacaatctgccgtctcctggaaacgctggggctgcccttcagagagctggcagccccagcagtcagggcctgctttgcagaatagaatgtgaacccaactcctgatggcctacttgacttatttaattaaagatgaaatcatgcaatgagcaaaa

SEQ ID NO: 1099 - DNA, 2455 bp, Homo sapiens
ctctggtgcagctggggtggaatctggccaggccctgcttaggcccccatcctggggtcaggaaatttggaggataaggcccttcagccccaaggtcagcagggacgagcgggcagactggcgggtgtacaggagggctgggttgacctgtccttggtcactgaggccattggatcttcctccagtggctgccaggatttctggtggaagagacaggaaggcctcccccmcttggtcgggtcagcctgggggctgagggcctggctgtcagccactcttcccagaacatatgtcatggcctcagtggctcatggggaagcaggggtgggcgagcttaggctaraactttgcaacctgttctcagctctgcctcccctggccaggttgtcctcgaccagtcccgtgccatggcagcccacctgcttcccatctgcgccctcttcctgaccttactcgatatggcccaaggctttaggggccccttgctacccaaccggcccttcaccaccgtctggaatgcaaacacccagtggtgcctggagaggcacggtgtggacgtggatgtcagtgtcttcgatgtggtagccaacccagggcagaccttccgcggccctgacatgacaattttctatagctcccagctgggcacctacccctactacacgcccactggggagcctgtgtttggtggtctgccccagaatgccagcctgattgcccacctggcccgcacattccaggacatcctggctgccatacctgctcctgacttctcagggctggcagtcatcgactgggaggcatggcgcccacgctgggccttcaactgggacaccaaggacatttaccggcagcgctcacgggcactggtacaggcacagcaccctgattggccagctcctcaggtggaggcagtagcccaggaccagttccagggagctgcacgggcctggatggcaggcaccctccagctggggcgggcactgcgtcctcgcggcctctggggcttctatggcttccctgactgctacaactatgactttctaagccccaactacaccggccagtgcccatcaggcatccgtgcccaaaatgaccagctagggtggctgtggggccagagccgtgccctctatcccagcatctacatgcccgcagtgctggagggcacagggaagtcacagatgtatgtgcaacaccgtgtggccraggcattccgtgtggctgtggctgctggtgaccccaatctgccggygctgccctatgtccagatcttctatgacacgacaaaccactttctgcccctggatgagctggagcacagcctgggggagagtgcggcccagggggcagctggagtggtgctctgggtgagctgggaaaatacaagaaccaaggaatcatgtcaggccatcaaggagtatatggacactacactggggcccttcatcctgaacgtgaccagtggggcccttctctgcagtcaagccctgtgctccggccatggccgctgtgtccgccgcaccagccaccccaaagccctcctcctccttaaccctgccagtttctccatccagctcacgcctggtggtgggcccctgagcctgcggggtgccctctcacttgaagatcaggcacagatggctgtggagttcaaatgtcgatgctaccctggctggcaggcaccgtggtgtgagcggaagagcatgtggtgattggccacacactgagttgcacatattgagaacctaatgcactctgggtctggccagggcttcctcaaatacatgcacagtcatacaagtcatggtcacagtaaagagtacactcagccactgtcacaggcatattccctgcacacacatgcatacttacagactggaatagtggcataaggagttagaaccacagcagacaccattcattccatgtccatatgcatctacttggcaaggtcatagacaattcctccagagacactgagccagtctttgaactgcagcaatcacaaaggctgacattcactgagtgcctactctttgccaatccccgtgctaagcgttttatgtggacttattcattcctcacaatgaggctatgaggaaactgagtcactcacattgagagtaagcacgttgcccaaggttgcacagcaagaaaagggagaakttgagattcaaacccaggctgtctagctccgggggtayagcccttgcactcctactgagtttgtggtaaccagccctgcacgacccctgaatctgctgagaggcaccagtccagcaaataaagcagtcatgatttacttagctgtttactgagcgcctaaaatgtccaggccccggtatccaaagggcacaggaaaggcttgtcactctcaccagatctgacgtcagtctaagggcggctgcttcccagggtggggcccaaatttcaagaggaagccccacctgat

SEQ ID NO: 1100 - DNA, 2664 bp, Homo sapiens
ttcctccaggagtctctggtgcagctggggtggaatctggccaggccctgcttaggcccccatcctggggtcaggaaatttggaggataaggcccttcagccccaaggtcagcagggacgagcgggcagactggcgggtgtacaggagggctgggttgacctgtccttggtcactgaggccattggatcttcctccagtggctgccaggatttctggtggaagagacaggaaggcctcccccmcttggtcgggtcagcctgggggctgagggcctggctgtcagccactcttcccagaacatatgtcatggcctcagtggctcatggggaagcaggggtgggcgagcttaggctaragcaagtcctgtgggagatggcagaggcctggtctgagaggcaactcggatgtgccctccagtggccatgctcccctccatgcgtctcccctgccctcctggagccctgcaggtcaatgtttaacagaaaccagagcagcggtggattaatgcgcaagggctcagccccccagccctgagcagtgggggaatcggagactttgcaacctgttctcagctctgcctcccctggccaggttgtcctcgaccagtcccgtgccatggcagcccacctgcttcccatctgcgccctcttcctgaccttactcgatatggcccaaggctttaggggccccttgctacccaaccggcccttcaccaccgtctggaatgcaaacacccagtggtgcctggagaggcacggtgtggacgtggatgtcagtgtcttcgatgtggtagccaacccagggcagaccttccgcggccctgacatgacaattttctatagctcccagctgggcacctacccctactacacgcccactggggagcctgtgtttggtggtctgccccagaatgccagcctgattgcccacctggcccgcacattccaggacatcctggctgccatacctgctcctgacttctcagggctggcagtcatcgactgggaggcatggcgcccacgctgggccttcaactgggacaccaaggacatttaccggcagcgctcacgggcactggtacaggcacagcaccctgattggccagctcctcaggtggaggcagtagcccaggaccagttccagggagctgcacgggcctggatggcaggcaccctccagctggggcgggcactgcgtcctcgcggcctctggggcttctatggcttccctgactgctacaactatgactttctaagccccaactacaccggccagtgcccatcaggcatccgtgcccaaaatgaccagctagggtggctgtggggccagagccgtgccctctatcccagcatctacatgcccgcagtgctggagggcacagggaagtcacagatgtatgtgcaacaccgtgtggccraggcattccgtgtggctgtggctgctggtgaccccaatctgccggygctgccctatgtccagatcttctatgacacgacaaaccactttctgcccctggatgagctggagcacagcctgggggagagtgcggcccagggggcagctggagtggtgctctgggtgagctgggaaaatacaagaaccaaggaatcatgtcaggccatcaaggagtatatggacactacactggggcccttcatcctgaacgtgaccagtggggcccttctctgcagtcaagccctgtgctccggccatggccgctgtgtccgccgcaccagccaccccaaagccctcctcctccttaaccctgccagtttctccatccagctcacgcctggtggtgggcccctgagcctgcggggtgccctctcacttgaagatcaggcacagatggctgtggagttcaaatgtcgatgctaccctggctggcaggcaccgtggtgtgagcggaagagcatgtggtgattggccacacactgagttgcacatattgagaacctaatgcactctgggtctggccagggcttcctcaaatacatgcacagtcatacaagtcatggtcacagtaaagagtacactcagccactgtcacaggcatattccctgcacacacatgcatacttacagactggaatagtggcataaggagttagaaccacagcagacaccattcattccatgtccatatgcatctacttggcaaggtcatagacaattcctccagagacactgagccagtctttgaactgcagcaatcacaaaggctgacattcactgagtgcctactctttgccaatccccgtgctaagcgttttatgtggacttattcattcctcacaatgaggctatgaggaaactgagtcactcacattgagagtaagcacgttgcccaaggttgcacagcaagaaaagggagaakttgagattcaaacccaggctgtctagctccgggggtayagcccttgcactcctactgagtttgtggtaaccagccctgcacgacccctgaatctgctgagaggcaccagtccagcaaataaagcagtcatgatttacttagctgtttactgagcgcctaaaatgtccaggccccggtatccaaagggcacaggaaaggcttgtcactctcaccagatctgacgtcagtctaagggcggctgcttcccagggtggggcccaaatttcaagaggaagccccacctgat

SEQ ID NO: 1101 - DNA, 2179 bp, Homo sapiens
ttcctccaggagtctctggtgcagctggggtggaatctggccaggccctgcttaggcccccatcctggggtcaggaaatttggaggataaggcccttcagccccaaggttgtcctcgaccagtcccgtgccatggcagcccacctgcttcccatctgcgccctcttcctgaccttactcgatatggcccaaggctttaggggccccttgctacccaaccggcccttcaccaccgtctggaatgcaaacacccagtggtgcctggagaggcacggtgtggacgtggatgtcagtgtcttcgatgtggtagccaacccagggcagaccttccgcggccctgacatgacaattttctatagctcccagctgggcacctacccctactacacgcccactggggagcctgtgtttggtggtctgccccagaatgccagcctgattgcccacctggcccgcacattccaggacatcctggctgccatacctgctcctgacttctcagggctggcagtcatcgactgggaggcatggcgcccacgctgggccttcaactgggacaccaaggacatttaccggcagcgctcacgggcactggtacaggcacagcaccctgattggccagctcctcaggtggaggcagtagcccaggaccagttccagggagctgcacgggcctggatggcaggcaccctccagctggggcgggcactgcgtcctcgcggcctctggggcttctatggcttccctgactgctacaactatgactttctaagccccaactacaccggccagtgcccatcaggcatccgtgcccaaaatgaccagctagggtggctgtggggccagagccgtgccctctatcccagcatctacatgcccgcagtgctggagggcacagggaagtcacagatgtatgtgcaacaccgtgtggccraggcattccgtgtggctgtggctgctggtgaccccaatctgccggygctgccctatgtccagatcttctatgacacgacaaaccactttctgcccctggatgagctggagcacagcctgggggagagtgcggcccagggggcagctggagtggtgctctgggtgagctgggaaaatacaagaaccaaggaatcatgtcaggccatcaaggagtatatggacactacactggggcccttcatcctgaacgtgaccagtggggcccttctctgcagtcaagccctgtgctccggccatggccgctgtgtccgccgcaccagccaccccaaagccctcctcctccttaaccctgccagtttctccatccagctcacgcctggtggtgggcccctgagcctgcggggtgccctctcacttgaagatcaggcacagatggctgtggagttcaaatgtcgatgctaccctggctggcaggcaccgtggtgtgagcggaagagcatgtggtgattggccacacactgagttgcacatattgagaacctaatgcactctgggtctggccagggcttcctcaaatacatgcacagtcatacaagtcatggtcacagtaaagagtacactcagccactgtcacaggcatattccctgcacacacatgcatacttacagactggaatagtggcataaggagttagaaccacagcagacaccattcattccatgtccatatgcatctacttggcaaggtcatagacaattcctccagagacactgagccagtctttgaactgcagcaatcacaaaggctgacattcactgagtgcctactctttgccaatccccgtgctaagcgttttatgtggacttattcattcctcacaatgaggctatgaggaaactgagtcactcacattgagagtaagcacgttgcccaaggttgcacagcaagaaaagggagaakttgagattcaaacccaggctgtctagctccgggggtayagcccttgcactcctactgagtttgtggtaaccagccctgcacgacccctgaatctgctgagaggcaccagtccagcaaataaagcagtcatgatttacttagctgtttactgagcgcctaaaatgtccaggccccggtatccaaagggcacaggaaaggcttgtcactctcaccagatctgacgtcagtctaagggcggctgcttcccagggtggggcccaaatttcaagaggaagccccacctgat

SEQ ID NO: 1102 - DNA, 995 bp, Homo sapiens
ggccttccaaagtgctgggattacaggcgtgagtcaccgcgcccggccaaataaaataaaatgttaaagcaaattcaggactacccctcctccaagtcttctgttccctttgggcgcccaggtgagcgggggaggggctgggggagtaataacatcaaaagagcgccttttcctcccttattccgaggagacttccctgggcctgactcccggtcctgtccccagcgccccgcggcctctggagccccttcagtgaccaagatacagagatcaggacgcctttgcgccgccccaggtgcccgcccctagctggctctgcttgggccgcgagggaaggtgaggtcgggggcggagccggggcgtgacagccggggtgtgtgtccgccgggcttggtgcctccggtggccctgcagcaccgtcccacctctgccaccctccgatggggccgctacctgtgtgcctgccaatcatgctgctcctgctactgccgtcgctgctgctgctgctgcttctacctggccccgggtccggcgaggcctccaggatattacgtgtgcaccggcgtgggatcctggaactggcaggaactgtgggttgtgttggtccccgaacccccatcgcctataygaaatatggttscttttgtggcttgggaggccatggccagcccygcgatgccattgactggtgctgccatggccacgactgttgttacactcgagctgaggaggccggctgcagccccaagacagagcgctactcctggcagtgcgtcaatcagagcgtcctgtgcggaccggcagagaacaaatgccaagaactgttgtgcaagtgtgaccaggagattgctaactgcttagcccaaactgagtacaacttaaagtacctcttctacccccagttcctatgtgagccggactcgcccaagtgtgactgactaccttgacttgaaatgctcttttgcacaaggaaataaagcgtcctctcagtaatg

SEQ ID NO: 1103 - DNA, 1474 bp, Homo sapiens
gcagtagcttgctgatgctcccagctgaataagtcccttctttctacaactcggtgtcttgagttttgtctgcrgctcctcctgttacatttcttggctccctgacygggaagcaacgtgactgacagacagctgaggcagccccttaggcaacttaagcctgccttgtggagtgcccctgtgggggactccagccagcctgagtgacatgatccaaagagccctcctgggtaggaaattgccccggtggaatccctcaccagagaagcaggtagcaggccctcgcagaggattaacacagtggctgaacaccaggaaggaactggcacttggagtccagacatctaaaatttggaagacccactacrttatctgagacaatggggaaagctgacgtatggcttattcgaaactcctggaattttcagtttccwyatccactcttaccaaatgttgattttgttggaggactccactgcaaacctgcmaaacccctgcctaaggaaatggaagactttgtacagagctytggagaaaatggtgttgtggtgttttctctggggtcaatggtcagtaacatgacagaagaaagggccaacgtaattgcatcagccctggcccagatcccacaaaaggttctgtggagatttgatgggaataaaccagataccttaggtctcaatactcggctstayaagtggataccccagaatgaccttctaggtcatccaaagaccagagcttttataactcatggtggagccartggmatctacgaggcaatctaccatgggatccctatggtgggsattccattgtttgcygatcaacctgataayattgctcacatgaaggccargggagcagctgttagagtggacttcaacacaatgtcgagtacagacttgctgaatgcattgmagagagtaattaatgatccttcatataaagagaatgttatgaaattatcaagaattcaacatgatcaaccagtgaagcccctggatcgagcagtcttctggattgaatttgtcatgcgccacaaaggagctaaacaccttcgggttgcagcccacgacctcacctggttccagtaccactctttggatgtgattgggttcctgctggtctgtgtggcaactgtgatatttatcgtcacaaaatgttgtctgttttgtttctggaagtttgctagaaaagcaaagaagggaaaaaatgattagttatatctgagatttgaagctggaaaacctgataggtgagactacttcagtttattccagcaagaaagattgtgatgcaagatttctttcttcctgagacaaaaaaaaaaaaaagaaaaaaaaatcttttcaaaatttactttgtcaaataaaaatttgtttttcagagatttaccacccagttcatggttagaaatattttgtggcaatgaagaaaacactacggaaaataaaaaataagataaagcctt

SEQ ID NO: 1104 - DNA, 1532 bp, Homo sapiens
ccttaggcaacttaagcctgccttgtggagtgcccctgtgggggactccagccagcctgagtgacatgatccaaagagccctcctgggtaggaaattgccccggtggaatccctcaccagagaagcaggtagcaggccctcgcagaggattaacacagtggctgaacaccaggaaggaactggcacttggagtccagacatctaaaatttggaaatgaaagcatttgtccagatctctggcaaagatggcactgtggtgttttctctggggccagttgtgcaaaaccttatagaagagaaggctgatctcattgcttcagacttggcccagattccacagaaggaagacccactacrttatctgagacaatggggaaagctgacgtatggcttattcgaaactcctggaattttcagtttccwyatccactcttaccaaatgttgattttgttggaggactccactgcaaacctgcmaaacccctgcctaaggaaatggaagactttgtacagagctytggagaaaatggtgttgtggtgttttctctggggtcaatggtcagtaacatgacagaagaaagggccaacgtaattgcatcagccctggcccagatcccacaaaaggttctgtggagatttgatgggaataaaccagataccttaggtctcaatactcggctstayaagtggataccccagaatgaccttctaggtcatccaaagaccagagcttttataactcatggtggagccartggmatctacgaggcaatctaccatgggatccctatggtgggsattccattgtttgcygatcaacctgataayattgctcacatgaaggccargggagcagctgttagagtggacttcaacacaatgtcgagtacagacttgctgaatgcattgmagagagtaattaatgatccttcatataaagagaatgttatgaaattatcaagaattcaacatgatcaaccagtgaagcccctggatcgagcagtcttctggattgaatttgtcatgcgccacaaaggagctaaacaccttcgggttgcagcccacgacctcacctggttccagtaccactctttggatgtgattgggttcctgctggtctgtgtggcaactgtgatatttatcgtcacaaaatgttgtctgttttgtttctggaagtttgctagaaaagcaaagaagggaaaaaatgattagttatatctgagatttgaagctggaaaacctgataggtgagactacttcagtttattccagcaagaaagattgtgatgcaagatttctttcttcctgagacaaaaaaaaaaaaaagaaaaaaaaatcttttcaaaatttactttgtcaaataaaaatttgtttttcagagatttaccacccagttcatggttagaaatattttgtggcaatgaagaaaacactacggaaaataaaaaataagataaagccttatgagctcgtattgaaatttgttgaacttatattgaaatttgttgytctaattcacagtatactcacaa

SEQ ID NO: 1105 - DNA, 1831 bp, Homo sapiens
  misc_feature (1)...(1831): n = A,T,C or G
tgcattgcaccaggatgtctgtgaaatggacttcagtaattttgctaatacaactgagcttttgctttagctctgggaattgtggaaaggtgctggtgtgggcagcagaatacagccattggatgaatataaagacaatcctggatgagcttattcagagaggtcatgaggtgactgtactggcatcttcagcttccattctttttgatcccaacaactcatccgctcttaaaattgaaatttatcccacatctttaannnnnnnnnnnnnnnnnnnntggtcagaccttccaaaagatacattttggttatatttttcacaagtacaggaaatcatgtcaatatttggtgacataactagaaagttctgtaaagatgtagtttcaaataagaaatttatgaaaaaagtacaagagtcaagatttgacgtcatttttgcagatgctatttttccctgtagtgagctgctggctgagctatttaacataccctttgtgtacagtctcagcttctctcctggctacacttttgaaaagcatagtggaggatttattttccctccttcctacgtacctgttgttatgtcagaattaactgatcaaatgactttcatggagagggtaaaaaatatgatctatgtgctttactttgacttttggttcgaaatatttgacatgaagaagtgggatcagttttatagtgaagttctaggaagacccactacrttatctgagacaatggggaaagctgacgtatggcttattcgaaactcctggaattttcagtttccwyatccactcttaccaaatgttgattttgttggaggactccactgcaaacctgcmaaacccctgcctaaggaaatggaagactttgtacagagctytggagaaaatggtgttgtggtgttttctctggggtcaatggtcagtaacatgacagaagaaagggccaacgtaattgcatcagccctggcccagatcccacaaaaggttctgtggagatttgatgggaataaaccagataccttaggtctcaatactcggctstayaagtggataccccagaatgaccttctaggtcatccaaagaccagagcttttataactcatggtggagccartggmatctacgaggcaatctaccatgggatccctatggtgggsattccattgtttgcygatcaacctgataayattgctcacatgaaggccargggagcagctgttagagtggacttcaacacaatgtcgagtacagacttgctgaatgcattgmagagagtaattaatgatccttcatataaagagaatgttatgaaattatcaagaattcaacatgatcaaccagtgaagcccctggatcgagcagtcttctggattgaatttgtcatgcgccacaaaggagctaaacaccttcgggttgcagcccacgacctcacctggttccagtaccactctttggatgtgattgggttcctgctggtctgtgtggcaactgtgatatttatcgtcacaaaatgttgtctgttttgtttctggaagtttgctagaaaagcaaagaagggaaaaaatgattagttatatctgagatttgaagctggaaaacctgataggtgagactacttcagtttattccagcaagaaagattgtgatgcaagatttctttcttcctgagacaaaaaaaaaaaaaagaaaaaaaaatcttttcaaaatttactttgtcaaataaaaatttgtttttcagagatttaccacccagttcatggttagaaatattttgtggcaatgaagaaaacactacggaaaataaaaaataagataaagcctt

SEQ ID NO: 1106 - DNA, 1733 bp, Homo sapiens
acagaaagamacagcaaatggaaaaaagcattgcattgcaccaggatgtgtatgaaatggacttcaattttgctgctgatacagctgagctgttacattagctctggaagttgtggaaaggtgctggtgtggcccacagcattcagccattggatgaatgtaaagacaatcctggatgagcttgtccagagggcgcatgargtgcctgtactggcattttcagcttccatttgtttgatcccaacagcctacctactcttaaacttaagtttatcctgcatctttaactaaaactgagttggaggacatcatcatgcaactagtcaagagatggtcagaccttccaaaagatacattttggttatatttttcacaagtacaggaaatcatgtcaatatttggtgacataactagaaagttctgtaaagatgtagtttcaaataagaaatttatgaaaaaagtacaagagtcaagatttgacgtcatttttgcagatgctatttttccctgtagtgagctgctggctgagctatttaacataccctttgtgtacagtctcagcttctctcctggctacacttttgaaaagcatagtggaggatttattttccctccttcctacgtacctgttgttatgtcagaattaactgatcaaatgactttcatggagagggtaaaaaatatgatctatgtgctttactttgacttttggttcgaaatatttgacatgaagaagtgggatcagttttatagtgaagttctaggaagacccactacrttatctgagacaatggggaaagctgacgtatggcttattcgaaactcctggaattttcagtttccwyatccactcttaccaaatgttgattttgttggaggactccactgcaaacctgcmaaacccctgcctaaggaaatggaagactttgtacagagctytggagaaaatggtgttgtggtgttttctctggggtcaatggtcagtaacatgacagaagaaagggccaacgtaattgcatcagccctggcccagatcccacaaaaggttctgtggagatttgatgggaataaaccagataccttaggtctcaatactcggctstayaagtggataccccagaatgaccttctaggtcatccaaagaccagagcttttataactcatggtggagccartggmatctacgaggcaatctaccatgggatccctatggtgggsattccattgtttgcygatcaacctgataayattgctcacatgaaggccargggagcagctgttagagtggacttcaacacaatgtcgagtacagacttgctgaatgcattgmagagagtaattaatgatccttcatataaagagaatgttatgaaattatcaagaattcaacatgatcaaccagtgaagcccctggatcgagcagtcttctggattgaatttgtcatgcgccacaaaggagctaaacaccttcgggttgcagcccacgacctcacctggttccagtaccactctttggatgtgattgggttcctgctggtctgtgtggcaactgtgatatttatcgtcacaaaatgttgtctgttttgtttctggaagtttgctagaaaagcaaagaagggaaaaaatgattagttatatctgagatttgaagctggaaaacctgataggtgagactacttcagtttattccagcaagaaagattgtgatgcaagatttctttcttcctgagac

SEQ ID NO: 1107 - DNA, 1737 bp, Homo sapiens
cctcctgggtaggaaattgccccggtggaatccctcaccagagaagcaggtagcaggccctcgcagaggattaacacagtggctgaacaccaggaaggaactggcacttggagtccagacatctaaaatttggtcatagaaaagctccgtatgagtawctgggaattataaaaatacctgccaaagattcaggccttcctttggattttggcccctgcagtgttatggaactggtcagactcctcagcgtggcattcctgctaataggaacaccaagcagttgctgagatgtgtgtgcctgtcactgtgattagtacttccactcttgtttccaattcaccccaggtcattcaactctatagccactcctaatgcctctcctgaggtaggacaaaagtgggcttcccaaaccaaaaagattcacagatccatgaagaaactgaacattcacttcaaatttcctcctctgatcttggcaactgcaggaaatgaaagcatttgtccagatctctggcaaagatggcactgtggtgttttctctggggccagttgtgcaaaaccttatagaagagaaggctgatctcattgcttcagacttggcccagattccacagaaggaagacccactacrttatctgagacaatggggaaagctgacgtatggcttattcgaaactcctggaattttcagtttccwyatccactcttaccaaatgttgattttgttggaggactccactgcaaacctgcmaaacccctgcctaaggaaatggaagactttgtacagagctytggagaaaatggtgttgtggtgttttctctggggtcaatggtcagtaacatgacagaagaaagggccaacgtaattgcatcagccctggcccagatcccacaaaaggttctgtggagatttgatgggaataaaccagataccttaggtctcaatactcggctstayaagtggataccccagaatgaccttctaggtcatccaaagaccagagcttttataactcatggtggagccartggmatctacgaggcaatctaccatgggatccctatggtgggsattccattgtttgcygatcaacctgataayattgctcacatgaaggccargggagcagctgttagagtggacttcaacacaatgtcgagtacagacttgctgaatgcattgmagagagtaattaatgatccttcatataaagagaatgttatgaaattatcaagaattcaacatgatcaaccagtgaagcccctggatcgagcagtcttctggattgaatttgtcatgcgccacaaaggagctaaacaccttcgggttgcagcccacgacctcacctggttccagtaccactctttggatgtgattgggttcctgctggtctgtgtggcaactgtgatatttatcgtcacaaaatgttgtctgttttgtttctggaagtttgctagaaaagcaaagaagggaaaaaatgattagttatatctgagatttgaagctggaaaacctgataggtgagactacttcagtttattccagcaagaaagattgtgatgcaagatttctttcttcctgagacaaaaaaaaaaaaaagaaaaaaaaatcttttcaaaatttactttgtcaaataaaaatttgtttttcagagatttaccacccagttcatggttagaaatattttgtggcaatgaagaaaacactacggaaaataaaaaataagataaagcctt

SEQ ID NO: 1108 - DNA, 2150 bp, Homo sapiens
tgacagaaagaaacaacaactggaaaagaagcattgcataagaccaggatgtctctgaaatggacgtcagtctttctgctgatacagctcagttgttactttagctctggaagctgtggaaaggtgctagtgtggcccacagaatacagccattggataaatatgaagacaatcctggaagagcttgttcagaggggtcatgaggtgactgtgttgacatcttcggcttctactcttgtcaatgccagtaaatcatctgctattaaattagaagtttatcctacatctttaactaaaaatkatttggaagattctcttctgaaaatkctcgatagatggatatatggtgtttcaaaaaatacattttggtcatatttttcacaaytacaagaattgtgttgggaatattatgactacartawcaagctctgtaaagatgcagttttgaataagaaacttatgatgaaactacaagagtcaaartttgatgtcattctggcagatgcccttaatccctgtggtgagctactggctgarctatttaacataccctttcygtacagtctycgattctctgttggctacacatttgagaagaatggtggaggatttctgttccctccttcctatgtacctgttgttatgtcagaattaagtgatcaaatgattttcatggagaggataaaaaatatgatacatatgctttattttgacttttggtttcaaatttatgatctgaagaagtgggaccagttttatagtgaagttctaggaagacccactacattatttgagacaatggggaaagctgaaatgtggctcattcgaacctattgggattttgaatttcctcgcccattcttaccaaatgttgattttgttggaggacttcactgtaaaccagccaaacccctgcctaaggaaatggaagagtttgtgcagagctctggagaaaatggtattgtggtgttttctctggggtcgatgatcagtaacatgtcagaagaaagtgccaacatgattgcatcagcccttgcccagatcccacaaaaggttctatggagatttgatggcaagaagccaaatactttaggttccaatactcgactgtacaagtggttaccccagaatgaccttcttggtcatcccaaaaccaaagcttttataactcatggtggaaccaatggcatctatgaggcratctaccatgggatccctatggtgggcattcccttgtttgcggatcaacatgataacattgctcacatgaaagccaagggagcagccctcagtgtggacatcaggaccatgtcaagtagagatttgctcaatgcattgaagtcagtcattaatgaccctgtctataaagagaatgtcatgaaattatcaagaattcatcatgaccaaccaatgaagcccctggatcgagcagtcttctggattgagtttgtcatgcgccacaaaggagccaagcaccttcgagtcgcagctcacaacctcacctggatccagtaccactctttggatgtgatagcattcctgctgrcctgcgtggcaactgtgatatttatcatcacaaaattttgcctgttttgtttccgaaagcttgccaaaamaggaaagaagaagaaaagrgattagttatatcaaaagcctgaagtggaatgactgaaagatgggactcctcctttatttcagcatggagggttttaaatggaggatttcctttttcctgtgacaaaacatcttttcacaacttaccttgttaagacaaaatttattttccagggatttaatacgtactttagytggaattattctatgtcaatgatttttaagctatgaaaaatacaatggggggaaggatakcatttggagatatacctaatgttaaatgacgagttactggatgcagcacgccaacatggcacatgtatacatatgtagctaacctgcaygttgtgcacatgtaccctaaaacttaaagtataatttaaaaaaagcaaaaaaaaaaaaatacaactcttttttttaaaccaggaaggaaaatgtgaacatggaaacaacttctagtattggatctgaaaataaagtgtcatccaagccataaaaaaaaaagaaaagaaaaataaaaataatataaaacctta

SEQ ID NO: 1109 - DNA, 2077 bp, Homo sapiens
tgacagaaagaaacaacaactggaaaagaagcattgcataagaccaggatgtctctgaaatggacgtcagtctttctgctgatacagctcagttgttactttagctctggaagctgtggaaaggtgctagtgtggcccacagaatacagccattggataaatatgaagacaatcctggaagagcttgttcagaggggtcatgaggtgactgtgttgacatcttcggcttctactcttgtcaatgccagtaaatcatctgctattaaattagaagtttatcctacatctttaactaaaaatkatttggaagattctcttctgaaaatkctcgatagatggatatatggtgtttcaaaaaatacattttggtcatatttttcacaaytacaagaattgtgttgggaatattatgactacartawcaagctctgtaaagatgcagttttgaataagaaacttatgatgaaactacaagagtcaaartttgatgtcattctggcagatgcccttaatccctgtggtgagctactggctgarctatttaacataccctttcygtacagtctycgattctctgttggctacacatttgagaagaatggtggaggatttctgttccctccttcctatgtacctgttgttatgtcagaattaagtgatcaaatgattttcatggagaggataaaaaatatgatacatatgctttattttgacttttggtttcaaatttatgatctgaagaagtgggaccagttttatagtgaagttctaggaagacccactacattatttgagacaatggggaaagctgaaatgtggctcattcgaacctattgggattttgaatttcctcgcccattcttaccaaatgttgattttgttggaggacttcactgtaaaccagccaaacccctgcctaaggaaatggaagagtttgtgcagagctctggagaaaatggtattgtggtgttttctctggggtcgatgatcagtaacatgtcagaagaaagtgccaacatgattgcatcagcccttgcccagatcccacaaaaggttctatggagatttgatggcaagaagccaaatactttaggttccaatactcgactgtacaagtggttaccccagaatgaccttcttggtcatcccaaaaccaaagcttttataactcatggtggaaccaatggcatctatgaggcratctaccatgggatccctatggtgggcattcccttgtttgcggatcaacatgataacattgctcacatgaaagccaagggagcagccctcagtgtggacatcaggaccatgtcaagtagagatttgctcaatgcattgaagtcagtcattaatgaccctgtctataaagagaatgtcatgaaattatcaagaattcatcatgaccaaccaatgaagcccctggatcgagcagtcttctggattgagtttgtcatgcgccacaaaggagccaagcaccttcgagtcgcagctcacaacctcacctggatccagtaccactctttggatgtgatagcattcctgctgrcctgcgtggcaactgtgatatttatcatcacaaaattttgcctgttttgtttccgaaagcttgccaaaamaggaaagaagaagaaaagrgattagttatatcaaaagcctgaagtggaatgactgaaagatgggactcctcctttatttcagcatggagggttttaaatggaggatttcctttttcctgtgacaaaacatcttttcacaacttaccttgttaagacaaaatttattttccagggatttaatacgtactttagytggaattattctatgtcaatgatttttaagctatgaaaaatacataatataaaaccttatgggcttatattgatatttattattctaatccaaaagttacacacgaaagttactgagcttcattatgtttcacacattgtatttgaacacaacaacattaagaactccactcatagtatsaacattgttttgcaaatactcaaaatattttggcttcattttgagcagaatttttgttttactttagccaatgaaatcttcaagaatt

SEQ ID NO: 1110 - DNA, 1924 bp, Homo sapiens
ggaaaataatggtttcttatatacctaaatcattataaaagttcagaaaataaaatgtggttattctttttgcatcagtctttgagtagatttatttactaacatcccttgatttcatttctactctttttacagttctaacattttataacttttgagttccactcgtggaataagatattctctttactgtaacaggttctttggagatttgatgggaataaaccagatgccttaggtctcaatactcgactgtacaagtggataccccagaatgaccttctaggtcatccaaaaaccagagcttttataactcatggtggagccaatggcatctatgagrcaatctaccatgggatccctatggtgggcattccattgttttttgatcaacctgataatattgctcacatgaaggccaagggagcagctgttagagtggacttcaacacaatgtcgagtacagacctgctgaatgcactgaagacagtaattaatgatccttcatataaagagaatattatgaaattatcaagaattcaacatgatcaaccagtgaagcccctggatcgagcagtcttctggattgaatttgtcatgcgccacaaaggagccaaacatcttcgagttgcagcccacaacctcacctggttccagtaccactctttggatgtgattgggttcctgctggcttgtgtggcaaccgtgctatttatcatcacaaagtgttgtctgttttgtttctggaagtttgctagaaaaggaaagaagggaaaaagggattagttatatctgagatttgaagctggaaaacctgatagataggaatacttcagttgattccagcaataaatattgtgatgcaagatttctttcttcctgtgacaaaaaaaaatcctttcgaagtctaccttgtcaagtaaaaatttgtttttcagagatttaccacccagttaatggttagaaatattctgtggcaatgaagaaaacactaggggaaataaaaaataatataaagccatatgagcttgtattgaaatttgttgcacttatattgaaatgtgatcatggctcacttcagcctcaacttactaagctcaagaggttctctcacctcagccccccaagtagctgggaccataggtgcatgtcaccatgtccaactaattttttattttttgtagtgatgagatctcattgtgttctccatgctgatttcaaactcctgggctcaaacaatcctcccattttagcatcccaaagggatgagattacaggtatgtaccaccataactttacaaaatgagatttttatataagaatgattcaaatgttcagggatgaaagagtcactaacataaaagaagaatgggatgaggtgagaaggatgaatacaaaaataattagatattcttgaaatcagaaatgtgctccctaattatatgaaatgttgtttgattacataaaataaagtggaaatgaatgattgactgaacagcccacaagaagaatcacttaatgctctgaaaattaccagtaaactgattaaaatctaaaattgctttctgttaaagctttactgattagtttttcttccaaagctctcttgtttctagttgttttcttggtcttaactacccattatatgctttgttaaagtgtttatgccctgattcaatgtgattatctcaatttttatttcattctgtcctaactcttgcaacctgcatgtcctctttattattgatcaatccaactgcaaagttcaccttacctgactaaggattattcattaagttttacttgtttatctgacatttattattttgtctctttgctagtcactctgagccatggtcatgatgacttaggattctggatctcttatgaataacaaatttatccttaataaagtctctatact

SEQ ID NO: 1111 - DNA, 2735 bp, Homo sapiens
ttgcacaaggatggctctgaaatggactacagttctgctgatacaactcagtttttactttagctctgggagttgtggaaaggtgctggtatgggccgcagaatacagcctttggatgaayatgaagacaatcctgaaagaacttgttcagmgaggtcatgaggtgactgtactggcatcttcagcttccattctttttgatcccaackactcatccactcttaaacttgaagtttatcctacatctttaactaaaactgaatttgagaatatcatcatgcaattggttaagagattgtcagaaattcaaaaagatacattttggttacctttttcacaagaacaagaaatcctgtgggcaattaatgacataattagaaacttctgtaaagatgtagtttcaaataagaaacttatgaaaaaactacaagagtcaagatttgacatcgtttttgcagatgcttatttaccctgtggtgagctgctggctgagctatttaacataccctttgtgtacagtcacagcttcastcctggctactcatttgaaaggcacagtggaggatttattttccctccttcctacgtacctgttgttatgtcaaaattaagtgatcaaatgactttcatggagagggtaaaaaatatgctctatgtgctttattttgacttttggttccaaatatttaatatgaagaagtgggatcagttttacagtgaagttttaggaagacccactacattatctgagacaatgaggaaagctgacatatggcttatgcgaaactcctggaattttaaatttcctcatccattcttaccaaatgttgattttgttggaggactccactgcaaasctgccaaacccctacctaagmaaatggaggagtttgtacagagctctggagaaaatggtgttgtggtgttttctctggggtcaatggtcagtaacatgacagaagaaagggccaacgtaattgcaacagcccttgccaagatcccacaaaaggttctttggagatttgatgggaataaaccagatgccttaggtctcaatactcgactgtacaagtggataccccagaatgaccttctaggtcatccaaaaaccagagcttttataactcatggtggagccaatggcatctatgagrcaatctaccatgggatccctatggtgggcattccattgttttttgatcaacctgataatattgctcacatgaaggccaagggagcagctgttagagtggacttcaacacaatgtcgagtacagacctgctgaatgcactgaagacagtaattaatgatccttcatataaagagaatattatgaaattatcaagaattcaacatgatcaaccagtgaagcccctggatcgagcagtcttctggattgaatttgtcatgcgccacaaaggagccaaacatcttcgagttgcagcccacaacctcacctggttccagtaccactctttggatgtgattgggttcctgctggcttgtgtggcaaccgtgctatttatcatcacaaagtgttgtctgttttgtttctggaagtttgctagaaaaggaaagaagggaaaaagggattagttatatctgagatttgaagctggaaaacctgatagataggaatacttcagttgattccagcaataaatattgtgatgcaagatttctttcttcctgtgacaaaaaaaaatcctttcgaagtctaccttgtcaagtaaaaatttgtttttcagagatttaccacccagttaatggttagaaatattctgtggcaatgaagaaaacactaggggaaataaaaaataatataaagccatatgagcttgtattgaaatttgttgcacttatattgaaatgtgatcatggctcacttcagcctcaacttactaagctcaagaggttctctcacctcagccccccaagtagctgggaccataggtgcatgtcaccatgtccaactaattttttattttttgtagtgatgagatctcattgtgttctccatgctgatttcaaactcctgggctcaaacaatcctcccattttagcatcccaaagggatgagattacaggtatgtaccaccataactttacaaaatgagatttttatataagaatgattcaaatgttcagggatgaaagagtcactaacataaaagaagaatgggatgaggtgagaaggatgaatacaaaaataattagatattcttgaaatcagaaatgtgctccctaattatatgaaatgttgtttgattacataaaataaagtggaaatgaatgattgactgaacagcccacaagaagaatcacttaatgctctgaaaattaccagtaaactgattaaaatctaaaattgctttctgttaaagctttactgattagtttttcttccaaagctctcttgtttctagttgttttcttggtcttaactacccattatatgctttgttaaagtgtttatgccctgattcaatgtgattatctcaatttttatttcattctgtcctaactcttgcaacctgcatgtcctctttattattgatcaatccaactgcaaagttcaccttacctgactaaggattattcattaagttttacttgtttatctgacatttattattttgtctctttgctagtcactctgagccatggtcatgatgacttaggattctggatctcttatgaataacaaatttatccttaataaagtctctatact

SEQ ID NO: 1112 - DNA, 2171 bp, Homo sapiens
attgcacaaggatggctctgaaatggactacagttctgctgatacaactcagtttttactttagctctgggagttgtggaaaggtgctggtatgggccgcagaatacagcctttggatgaayatgaagacaatcctgaaagaacttgttcagmgaggtcatgaggaagacccactacattatctgagacaatgaggaaagctgacatatggcttatgcgaaactcctggaattttaaatttcctcatccattcttaccaaatgttgattttgttggaggactccactgcaaasctgccaaacccctacctaagmaaatggaggagtttgtacagagctctggagaaaatggtgttgtggtgttttctctggggtcaatggtcagtaacatgacagaagaaagggccaacgtaattgcaacagcccttgccaagatcccacaaaaggttctttggagatttgatgggaataaaccagatgccttaggtctcaatactcgactgtacaagtggataccccagaatgaccttctaggtcatccaaaaaccagagcttttataactcatggtggagccaatggcatctatgagrcaatctaccatgggatccctatggtgggcattccattgttttttgatcaacctgataatattgctcacatgaaggccaagggagcagctgttagagtggacttcaacacaatgtcgagtacagacctgctgaatgcactgaagacagtaattaatgatccttcatataaagagaatattatgaaattatcaagaattcaacatgatcaaccagtgaagcccctggatcgagcagtcttctggattgaatttgtcatgcgccacaaaggagccaaacatcttcgagttgcagcccacaacctcacctggttccagtaccactctttggatgtgattgggttcctgctggcttgtgtggcaaccgtgctatttatcatcacaaagtgttgtctgttttgtttctggaagtttgctagaaaaggaaagaagggaaaaagggattagttatatctgagatttgaagctggaaaacctgatagataggaatacttcagttgattccagcaataaatattgtgatgcaagatttctttcttcctgtgacaaaaaaaaatcctttcgaagtctaccttgtcaagtaaaaatttgtttttcagagatttaccacccagttaatggttagaaatattctgtggcaatgaagaaaacactaggggaaataaaaaataatataaagccatatgagcttgtattgaaatttgttgcacttatattgaaatgtgatcatggctcacttcagcctcaacttactaagctcaagaggttctctcacctcagccccccaagtagctgggaccataggtgcatgtcaccatgtccaactaattttttattttttgtagtgatgagatctcattgtgttctccatgctgatttcaaactcctgggctcaaacaatcctcccattttagcatcccaaagggatgagattacaggtatgtaccaccataactttacaaaatgagatttttatataagaatgattcaaatgttcagggatgaaagagtcactaacataaaagaagaatgggatgaggtgagaaggatgaatacaaaaataattagatattcttgaaatcagaaatgtgctccctaattatatgaaatgttgtttgattacataaaataaagtggaaatgaatgattgactgaacagcccacaagaagaatcacttaatgctctgaaaattaccagtaaactgattaaaatctaaaattgctttctgttaaagctttactgattagtttttcttccaaagctctcttgtttctagttgttttcttggtcttaactacccattatatgctttgttaaagtgtttatgccctgattcaatgtgattatctcaatttttatttcattctgtcctaactcttgcaacctgcatgtcctctttattattgatcaatccaactgcaaagttcaccttacctgactaaggattattcattaagttttacttgtttatctgacatttattattttgtctctttgctagtcactctgagccatggtcatgatgacttaggattctggatctcttatgaataacaaatttatccttaataaagtctctatact

SEQ ID NO: 1113 - DNA, 1350 bp, Homo sapiens
ggcagggccagcacagatttcttatcggcttccacactgcggagctgcagccctcagaagtaagcaaggtttcctgccgggagaaaaggatttgaagcattccagccaaaatgacggacagaagccccttcgaaaccgacatgctcaccctgacccgctacgttatggaaaaggggcgtcaggccaaagggactggggagctcacccagctgctgaactcaatgctgacggccatcaaagccatctcctcggctgtgcgcaaggccggtctggcccacctgtatggaatcgcaggaagcgttaacgtgacgggagatgaggtgaagaaactggatgtgctatccaattccctggtgatcaacatgstccaatcctcctatagtacctgcgtcctggtctcagaagagaataaggacgccatcatcaccgccaaggagaagmgggggaaatacgtggtctgctttgacccactggatggatcttccaatattgactgcctggcctccatcggaaccatctttgccatctatagaaagacctcagaggatgagccttctgaaaaggatgccctgcagtgtggccgcaatattgtggccgcaggttatgcgctgtacggtagtgcaaccctggtggctctctccacagggcaaggcgtggacctcttcatgcttgacccggctcttggtgaatttgtcctggtggaaaaagatgtcaagattaagaagaaaggaaagatttacagcctgaatgagggctatgccaagtattttgatgcggccaccactgaatatgtgcagaaaaagaaattccctgaggatggcagtgctccctatggggccaggtatgtgggctccatggtggctgacgtgcaccgcaccctggtctatggaggaatcttcctgtacccagccaaccagaagagccctaagggcaagctccggctcctgtatgaatgcaatcccgtggcctacatcattgagcaggcaggaggcttggcgaccacggggacccagcctgtactggacgtgaagcccgaggcaattcaccagcgagtccccctcattctggggtcaccagaggatgtgcaggaatatctcacctgtgtgcagaaaaatcaggcaggcagctagcgagtttgaccccacatgccctcttctgtttgtcttgcaccttgtctraggaccctaaatgaacgataaacagagatggtagctatgagtatrcaaaaggtaaatccacttaatcacatacagaagagcaacaacaaactgcttacgacaggtttggaagccacaggcgattctatggtcaatgtgaaggactagaaataaaaacccacatgtggaaagt

SEQ ID NO: 1114 - DNA, 575 bp, Homo sapiens
gagaggcagcgccagctccacgcagccggcccggggtcgctcgcactgacgtcacgtagcgacgcggaagatttacgtatggtgcctcgctctgggatagctttacggcttctgggagctgctgcttcgctggttctgtgctacaaattgatgtttagataaacttcagtgaaatgactcttcaggaattggtgcataaggctgcctcctgttatatggacagagtagctgtatgttttgatgaatgcaacaaccagcttccagtttactacacctacaagactgtggttaatgctgcttctgaattatcaaattttctgctgttacactgtgactttcaaggaattcgggaarttggtctctactgccaacctgggatagacttaccctcttggattttaggaattctccaagtcccggctgcttatgtacctatcgagccagattcacsaccgtcattatcaactcattttatgaaaaaatgtaatctaaagtatatccttgttgaaaaaaaacaaattaatgtaagtctggatgtttcaattgttttttgcctgtattacatttatttcaat

SEQ ID NO: 1115 - DNA, 837 bp, Homo sapiens
tatggtgcctcgctctgggatagctttacggcttctgggagctgctgcttcgctgtgagaagtatccgcgacgagctatccgggaaagggccgaatgcgatcaaacctaatccgcgagacttgctaaggttctgtgctacaaattgatgtttagataaacttcagtgaaatgactcttcaggaattggtgcataaggctgcctcctgttatatggacagagtagctgtatgttttgatgaatgcaacaaccagcttccagtttactacacctacaagactgtggttaatgctgcttctgaattatcaaattttctgctgttacactgtgactttcaaggaattcgggaarttggtctctactgccaacctgggatagacttaccctcttggattttaggaattctccaagtcccggctgcttatgtacctatcgagccagattcacsaccgtcattatcaactcattttatgaaaaaatgtaatctaaagtatatccttgttgaaaaaaaacaaattaataaatttaaatcttttcatgaaacattattgaactatgatacatttacagtggaacataatgacctagtgctcttcagacttcactggaaaaatactgaggtgaacttgatgctaaatgatggaaaagagaaatatgaaaaagaaaaaataaaaagcataagttctgagcatgtcaatgaagaaaaagcagaagaacacatggatctgaggctaaagcattgcttagcctatgttctacatacatcagggactacagggataccgaagattgtcagagtgcctcataagtgtatagtaccaaatatccagcattttcg

SEQ ID NO: 1116 - DNA, 1034 bp, Homo sapiens
gagaggcagcgccagctccacgcagccggcccggggtcgctcgcactgacgtcacgtagcgacgcggaagatttacgtatggtgcctcgctctgggatagctttacggcttctgggagctgctgcttcgctggttctgtgctacaaattgatgtttagataaacttcagtgaaatgactcttcaggaattggtgcataaggctgcctcctgttatatggacagagtagctgtatgttttgatgaatgcaacaaccagcttccagtttactacacctacaagactgtggttaatgctgcttctgaattatcaaattttctgctgttacactgtgactttcaaggaattcgggaarttggtctctactgccaacctgggatagacttaccctcttggattttaggaattctccaagtcccggctgcttatgtacctatcgagccagattcacsaccgtcattatcaactcattttatgaaaaaatgtaatctaaagtatatccttgttgaaaaaaaacaaattaataaatttaaatcttttcatgaaacattattgaactatgatacatttacagtggaacataatgacctagtgctcttcagacttcactggaaaaatactgaggtgaacttgatgctaaatgatggaaaagagaaatatgaaaaagaaaaaataaaaagcataagttctgagcatgtcaatgaagaaaaagcagaagaacacatggatctgaggctaaagcattgcttagcctatgttctacatacatcagggactacagggataccgaagattgtcagagtgcctcataagtgtatagtaccaaatatccagcattttcgggtactttttgacatcacacaagaagatgttttgtttctggcttcacctctgaccttcgatccttctgttgtggaaatatttcttgctctatcaagtggtgcctctctgcttattgtaccaacttcygtcaagttgctcccatcaaaattagccagcgttctcttttcccatcatagagtgactgttttgcag

SEQ ID NO: 1117 - DNA, 1365 bp, Homo sapiens
agcactcaggtrtctcaggcccacggaggatttaatagatgaaaccctggatcgtctcgaagccgtggttgttaagaagtttaaatatattgaccggaaacggggagaaaccagagggtggaagagccgctcgcactgcggtgcgatccctgagggctcggggcaggggactggggaccgagcaggagctggcggggtgagctctgcgaagcgggcgtgagaccgagcgcccatgggccggtcacgccgggtgcccgctcaccccccgacgccagcaggagcgcgcgcgcatgccccgcgccgtgcgggggtggcggcgccggcagggggtactgcgcgccgggcatggaagtgcgtgaagagccgcaagtaggcggargggtaaagccggggcagcagccggcggtccgggtgtaagcggcgtgtgcgtgtgcaagagccgctacccggtgtgcggcagcgacggcaccacctacccgagcggctgccagctgcgcgccgccagccagagggccgagagccgcggggagaaggccatcacccaggtcagcaagggcacctgcgagcaaggtccttccatagtgacgccccccaaggacatctggaatgtcactggtgcccaggtgtacttgagctgtgaggtcatcggaatcccracacctgtcctcatctggaacaaggtaaaaaggggtcactatggagttcaaaggacagaactcctgcctggtgaccgggacaacctggccattcagacccggggtggcccagaaaagcatgaagtaactggctgggtgctggtatctcctctaagtaaggaagatgytggagaatatgagtgccatgcatccaattcccaaggacaggcttcagcatcagcaaaaattacagtggttgatgccttacatgaaataccagtgaaaaaaggtgaaggtgccgagctataaacctccagaatattattagtctgcatggttaaaagtagtcatggataactacattacctgttcttgcctaataagtttcttttaatccaatccactaacactttagttatattcactggttttacacagagaaatacaaaataaagatcacacatcaagactatctacaaaaatttattatatatttacagaagaaaagcatgcatatcattaaacaaataaaatactttttatcacaacacagtacatatttgtcatttttaaaaagccacacaatagaaacaagacaccaagatatttaattatcttgttgactcctgtaaaatagctaaacactcatcattcgcggtgcaatactcatagacataagttyctgaaacaatagtttgcatgcgtaaggcattcgcaccaaagaaatctg

SEQ ID NO: 1118 - DNA, 1314 bp, Homo sapiens
agcactcaggtrtctcaggcccacggaggatttaatagatgaaaccctggatcgtctcgaagccgtggttgttaagaagtttaaatatattgaccggaaacggggagaaaccagagggtggaagagccgctcgcactgcggtgcgatccctgagggctcggggcaggggactggggaccgagcaggagctggcggggtgagctctgcgaagcgggcgtgagaccgagcgcccatgggccggtcacgccgggtgcccgctcaccccccgacgccagcaggagcgcgcgcgcatgccccgcgccgtgcgggggtggcggcgccggcagggggtactgcgcgccgggcatggaagtgcgtgaagagccgcaagtaggcggargggtaaagccggggcagcagccggcggtccgggtgtaagcggcgtgtgcgtgtgcaagagccgctacccggtgtgcggcagcgacggcaccacctacccgagcggctgccagctgcgcgccgccagccagagggccgagagccgcggggagaaggccatcacccaggtcagcaagggcacctgcgagcaaggtccttccatagtgacgccccccaaggacatctggaatgtcactggtgcccaggtgtacttgagctgtgaggtcatcggaatcccracacctgtcctcatctggaacaaggtaaaaaggggtcactatggagttcaaaggacagaactcctgcctggtgaccgggacaacctggccattcagacccggggtggcccagaaaagcatgaagtaactggctgggtgctggtatctcctctaagtaaggaagatgytggagaatatgagtgccatgcatccaattcccaaggacaggcttcagcatcagcaaaaattacagtggttgatgccttacatgaaataccagtgaaaaaaggtgaaggtgccgagctataaacctccagaatattattagtctgcatggttaaaatccaatccactaacactttagttatattcactggttttacacagagaaatacaaaataaagatcacacatcaagactatctacaaaaatttattatatatttacagaagaaaagcatgcatatcattaaacaaataaaatactttttatcacaacacagtacatatttgtcatttttaaaaagccacacaatagaaacaagacaccaagatatttaattatcttgttgactcctgtaaaatagctaaacactcatcattcgcggtgcaatactcatagacataagttyctgaaacaatagtttgcatgcgtaaggcattcgcaccaaagaaatctg

SEQ ID NO: 1119 - DNA, 859 bp, Homo sapiens
atggcggcggcagttgtggtggcggagggggacagcgactcccggcccggacaggagttgttagtggcctggaacaccgtgagcaccggcctggtgccgccggctgcgctggggctggtgaggccatgcggaccctcagttggaagcacaccctgggcctggtgaccatggacgtggagctggccgaccgcacgctgtctgtggcggtcaccccagtacaggcggtgatcttgctgtattttcaggaccaagccagctggaccctggaggaactgagcaaggcggtgaagatgcccgtggcgctgctgcggcggcggatgtccgtgtggctgcagcagggtgtgctgcgtgaggagccccccggcaccttctctgtcattgaggaggagcggcctcaggaccgggacaacatggtgctcattgacagtgacgacgagagcgactccggcatggcctcccaggccgaccagaaggaggaggagctgmtgctcttctggacgtacatccaggccatgctgaccaacctggagagcctctcactggatcgtatctacaacatgctccgcatgtttgtggtgactgggcctgcactggccgagattgacctgcaggagctgcagggctacctgcagaagaaggtgcgggaccagcagctcgtctactcggccggcgtctaccgcctgcccaagaactgcagctgacacatcgcccgcccgcccgcccgcccgccaggcgctgccctgcaggtgctctcgtcctcccgtgccagcccccgcccgcccgtgtcccagaatgcactgctgaggagcatgcccacccccacccccgcagtgtgcagattaaagcaagtcagatcatc

SEQ ID NO: 1120 - DNA, 1424 bp, Homo sapiens
accccatgtctcaccacgatgatggagctacagtgggacttggaatccagatgtgtgaaggatggagggttgaaggacaaggagtacgtgggttttgctgcyctccccaaccagctgcaccgcaagtctgtcaagaaggggtttgacttcacgctaatggtggcaggggagtcaggcctagggaaatccaccctcatcaacagcctcttcctcaccaacctctatgaggaycgccaggtgccagaggccagtgctcgcttgacacagaccctggccattgagcgccggggcgtagagattgaggaaggggktgtgaaagtgaagctgacccttgtggacacacctggctttggggactcagtggactgctctgactgctggcttccggtggtgaaattcatcgaggagcaatttgagcagtaccttagggatgagagtggcctgaaccggaagaacatccaggactcccgagtccactgctgcctctacttcatctcacccttcggccgggggctccggcccctagatgtggccttcctccgggcagtacacgagaaagtcaacatcatcccagtcattggcaaagcggatgctctgatgccccaggaaacccaggccctcaagcagaagatccgggatcagttgaaggaagaggagatccacatctaccagttccccgaatgtgactctgatgaagatgaagacttcaagaggcaggatgcagagatgaaggaaagcatcccttttgcagtcgtgggatcatgcgaggtggtgagggatggcgggaaccggccggtgaggggacgccgctactcctgggggaccgtggaggtggagaacccacatcactgcgatttcctgaacctgcgacggatgctggtgcagacacacctgcaggacctgaaagaggtcccgctcctgattcctgtccccttcccactgtcccgcagtaagctttcccgccagagcgccacagagatcccgctgcccatgctgcctctggcggacaccgagaagctgatccgcgagaaagacgaagagctgcgccgcatgcaagagatgctggagaagatgcaggcccaaatgcagcagagccaggcccagggcgagcagtcagacgccctctgaggccacgccccgcccggccttacctcggctccgccttcagtcggcctcttgtccaatccccgcgccccacactgcccagcgccccccgggacctccgcgggtgccgccctcgcgcgggctagggggaggttytcccagcctgagtccgtagccccgccccggcgctggtcccgcccacccagacaccgcccacttcccggcccggggcctgcacaatctccgaccgcatcactgtcttccggagtcccccttcttctcccagactctgtcttcaataaaaactgagcttcccgcgg

SEQ ID NO: 1121 - DNA, 1351 bp, Homo sapiens
gacaaggagtacgtgggttttgctgcyctccccaaccagctgcaccgcaagtctgtcaagaaggggtttgacttcacgctaatggtggcaggggagtcaggcctagggaaatccaccctcatcaacagcctcttcctcaccaacctctatgaggaycgccaggtgccagaggccagtgctcgcttgacacagaccctggccattgagcgccggggcgtagagattgaggaaggggktgtgaaagtgaagctgacccttgtggacacacctggctttggggactcagtggactgctctgactgctggcttccggtggtgaaattcatcgaggagcaatttgagcagtaccttagggatgagagtggcctgaaccggaagaacatccaggactcccgagtccactgctgcctctacttcatctcacccttcggccgggggctccggcccctagatgtggccttcctccgggcagtacacgagaaagtcaacatcatcccagtcattggcaaagcggatgctctgatgccccaggaaacccaggccctcaagcagaagatccgggatcagttgaaggaagaggagatccacatctaccagttccccgaatgtgactctgatgaagatgaagacttcaagaggcaggatgcagagatgaaggaaagcatcccttttgcagtcgtgggatcatgcgaggtggtgagggatggcgggaaccggccggtgaggggacgccgctactcctgggggaccgtggaggtggagaacccacatcactgcgatttcctgaacctgcgacggatgctggtgcagacacacctgcaggacctgaaagaggtgacgcacgatctgctctacgagggctaccgggccgcagtaagctttcccgccagagcgccacagagatcccgctgcccatgctgcctctggcggacaccgagaagctgatccgcgagaaagacgaagagctgcgccgcatgcaagagatgctggagaagatgcaggcccaaatgcagcagagccaggcccagggcgagcagtcagacgccctctgaggccacgccccgcccggccttacctcggctccgccttcagtcggcctcttgtccaatccccgcgccccacactgcccagcgccccccgggacctccgcgggtgccgccctcgcgcgggctagggggaggttytcccagcctgagtccgtagccccgccccggcgctggtcccgcccacccagacaccgcccacttcccggcccggggcctgcacaatctccgaccgcatcactgtcttccggagtcccccttcttctcccagactctgtcttcaataaaaactgagcttcccgcggcca

SEQ ID NO: 1122 - DNA, 1426 bp, Homo sapiens
accccatgtctcaccacgatgatggagctacagtgggacttggaatccagatgtgtgaaggatggagggttgaaggacaaggagtacgtgggttttgctgcyctccccaaccagctgcaccgcaagtctgtcaagaaggggtttgacttcacgctaatggtggcaggggagtcaggcctagggaaatccaccctcatcaacagcctcttcctcaccaacctctatgaggaycgccaggtgccagaggccagtgctcgcttgacacagaccctggccattgagcgccggggcgtagagattgaggaaggggktgtgaaagtgaagctgacccttgtggacacacctggctttggggactcagtggactgctctgactgctggcttccggtggtgaaattcatcgaggagcaatttgagcagtaccttagggatgagagtggcctgaaccggaagaacatccaggactcccgagtccactgctgcctctacttcatctcacccttcggccgggggctccggcccctagatgtggccttcctccgggcagtacacgagaaagtcaacatcatcccagtcattggcaaagcggatgctctgatgccccaggaaacccaggccctcaagcagaagatccgggatcagttgaaggaagaggagatccacatctaccagttccccgaatgtgactctgatgaagatgaagacttcaagaggcaggatgcagagatgaaggaaagcatcccttttgcagtcgtgggatcatgcgaggtggtgagggatggcgggaaccggccggtgaggggacgccgctactcctgggggaccgtggaggtggagaacccacatcactgcgatttcctgaacctgcgacggatgctggtgcagacacacctgcaggacctgaaagaggtgacgcacgatctgctctacgagggctaccgggccgcagtaagctttcccgccagagcgccacagagatcccgctgcccatgctgcctctggcggacaccgagaagctgatccgcgagaaagacgaagagctgcgccgcatgcaagagatgctggagaagatgcaggcccaaatgcagcagagccaggcccagggcgagcagtcagacgccctctgaggccacgccccgcccggccttacctcggctccgccttcagtcggcctcttgtccaatccccgcgccccacactgcccagcgccccccgggacctccgcgggtgccgccctcgcgcgggctagggggaggttytcccagcctgagtccgtagccccgccccggcgctggtcccgcccacccagacaccgcccacttcccggcccggggcctgcacaatctccgaccgcatcactgtcttccggagtcccccttcttctcccagactctgtcttcaataaaaactgagcttcccgcggcca

SEQ ID NO: 1123 - DNA, 2305 bp, Homo sapiens
gtcgtcattggatgttgcggctgtcaatcgccagggctataaataagggagtccggcggctcctctatcaggaagattgtgcatgccgtgggtctgacggcttgagtagcgctagggagaatccctgcaggtaatatttgacttttgcttcatattaatctgagtggaaaataaaagggccctcttctcctctcgcttccctgccgggcaggcgccatggcggaagcctcggcgacgggcgcctgcggagaggcgatggcagcggcggaaggctcctcgggcccggcgggcttgactctgggccggagcttctcgaactaccggcccttcgagccccaggcgttgggcctcagcccgagctggcggctgacgggcttctccggcatgaagggctgaggctgcaaggtcccgcaggaggcgctgctcaaactcctggcgggactgacgcggccggacgtgcggcccccgctgggccggggcctggtgggtggccaggaagaggcgtcccaggaagccggcctgccggcaggagcgggccccagccccacctttccagccctgggcatcgggatggactcctgcgtcatccccctgaggcacgggggcctgtcactggtgcagaccacggacttcttttaccccttggtagaagatccctacatgatggggcgcatagcttgtgccaacgtgctgagtgacctctacgccatggggattactgagtgtgacaacatgttgatgttactcagcgtcagccagagtatgagtgaggaggaacgcgaaaaggtaacgccactcatggtcaaaggctttcgggatgcggctgaggaaggagggacggcagtgaccggtgggcaaacggtggtcaacccttggattataatcggtggagttgccactgtagtatgccaaccaaatgagttcataatgccggacagcgccgtcgttggggacgtgctggtgttaaccaaaccgttaggaacccaggttgctgtcaatgcccaccaatggctggataatsctgaaagatggaataaagtaaagatggtggtctccagagaagaggtggagctggcctatcaggaagccatgttcaatatggctaccctcaacagaactgctgcaggtttaatgcacacatttaatgcccatgcggccacagatatcacaggctttggcattctaggacactcccagaaccttgcaaaacaacaaagaaatgaagtgtcctttgttattcataatctgccaataattgccaagatggctgccgtcagcaaggccagtggacggtttgggcttcttcaaggaacctcagctgaaacctctgggggattactgatttgtctgccaagagaacaggcggctcgcttttgttctgaaatcaaatcctccaagtacggagagggtcaccaagcgtggatcgttggcattgtggaaaagggaaaccgaacggcccggatcattgacaagccgcgagttattgaagtcctgcctcgtggggccacagctgctgttcttgctcctgacagttcaaatgcctcctctgagcctagctcgtgagatgaaagaacagaagttgtttggaccttagagccattgtccacaatcacggatggttctcaagagttgattgtaagaaatttccaaagaaggctgcctgcatagtggttccggctgccctttctaggtgattggaatcagcccatctaaagcagtctttatatgcattccgaggccagagtaacattttgaactttggggggatatttgttcatcacttgggtagaagaggagcaaaaatacytctgttttctcttgccaaagtaagatgaagctattccaggttgagggatttttctttgcacggggttgattaatttctgcacagggagtgagattattaaagtaacacacacacaaagtaaattgcaaaatgaaaaaaattagaagcaaatgagttttggaccaatattgttgataaatctaaattgttaagagagatcttataatgcaacatcaaattctttattcaattttactgaagtactggctctttcctgctctggacaagaattgagcaacttgtctgatgactgggaaaggaggacctgcaaccatctgacttggtctctgttaatgacgtctctccctctaaaccccattaaggactgggagaggcagagcaagcctcagagcccaggcctcagtggtcattaagatgttaagtcttttgcggcagattcctggtgatttgatcaataaagagtaatttcttgctaaataaataaaagaaaccttgttg

SEQ ID NO: 1124 - DNA, 1311 bp, Homo sapiens
gacaccagcctggtcactttcctaggaccgctcaatgccttctcctgtcagtgtcgcaccccactgggttcatccttccactttcacacttggggcgcggggaagggctgaatgcaggcaccactggtcacgagggcgtgactgggcaattcctccttcggcgggcgcccacctcctggcacccgtggcacagctccgggaacggctgcgggcccagccgctgcttccccgatagcgccgccgcagttccccggagacagaagtagagccggaccgccggaaaccgtagatccggggaggtcggggccgcggtgaactccagttcaccaggacaggaagtgacagcggaacgccggaaaccgcagatccacggaggtcagggccgcggagagctgtagttccccggaaccggaagtgatggcgsacctccggaaaccgtagattccgggcggtcggagccgccgggagctgtagttctcycgcggctcagagaagtaggcagagagcggacctggcggccgggcagcatggcggggctggagctcttgtcggaccagggctaccgggtrgacgggcggcgcgccggggagctgcgcaagatccaggcgcggatgggcgtgttcgcgcaggctgacggctcggcctacattgagcagggcaacaccaaggcactggctgtggtctacggcccgcacgagatccggggctcccgggctcgagccctgccggacagggccctagtgaactgtcaatatagttcagcgaccttcagcacaggtgagcgcaagcgacggccacatggggaccgtaagtcctgtgagatgggcctgcagctccgccagactttcgaagcagccatcctcacacagctgcacccacgctcccagattgatatctatgtgcaggtgctacaggcagatggtgggacctatgcagcttgtgtgaatgcagccacgctggcagtgctggatgccgggatacccatgagagactttgtgtgtgcgtgctcagctggcttcgtggacggcacagccctggcggacctcagccatgtggaggaagcagctggtggcccccagctggccctggccctgctgccagcctcaggacagattgcgctgcttgagatggatgcccggctgcacgargacsacmtgragsgggtgttggaggctgctgcccaggctgcccgagatgtgcacaccctcttagatcgagtggtccggcagcatgtgcgtgaggcctctatcttgctgggggactgaccacccagccacccatgtccagaataaaaccctcctctgcccacac

SEQ ID NO: 1125 - DNA, 1070 bp, Homo sapiens
atggcagctgagacttggaacgtggccgaagcagaggccccgcagccccagaagcgctactaccggcaatgtgctcaatccaaccccatggcagaccacacgctgcgctatcctgtgaagccagaggaaatggactggtctgagctatacccagagttcttcgctccactcactcaaaatcagagccacgatgacccaaaggataagaaagaaaagagagctcaggcccaagcggagtctgcagacataggctgtggctatggtggcctgttagtggaactatcaccactgttcccagacacactgattctgggtctggagatccaggtgaaggtctcagactatgtacaagaccggatttgggccctacgcgcagctcctggagataaagcacaagcggcaaatcatcagtcccactctgctagcaaaatatgcctacgtgctgagagttggggggttggtatatacgataacccatgtgctggagctacacgactggatgtgcactcattttgaagagcacccgctgtttgagcgtatgcctgtggaggacctgagtgaagactccattgtgggacatctaggtacctcaactgaggaggggaagaaagttctacgtaatggagggaagaatttcccagccatctttcgaagaatacaagatcccgtcctccaggcagtgaccccccaaaccagcctgcctggtcactgactgcttactctaccttagctggaccttgtcttccagggactagagagaagagcaggatccctgggtcttcccagttgagactgctggagctgagacacagtactctcaaagaaggtggggagctgcccagggcagaacccrctggtgttsatgactacccctggctcctctcaccttgtccctccactcccaacagaaaacaaagcagctgactgaggtggtcaaaggacttcggaccataggggatctttggaaggctgtggggtcttgctctgccttagcactcccttctccttgggagatctctcctcagctggaatgaggaatgtagtccatctaaactgcttgctaggcttaa

SEQ ID NO: 1126 - DNA, 1222 bp, Homo sapiens
aagaggctttcaggtagagaaacccgggaccgggatcatggcagctgagacttggaacgtggccgaagcagaggccccgcagccccagaagcgctactaccggcaatgtgctcaatccaaccccatggcagaccacacgctgcgctatcctgtgaagccagaggaaatggactggtctgagctatacccagagttcttcgctccactcactcaaaatcagagccacgatgacccaaaggataagaaagaaaagagagctcaggcccaagcggagtctgcagacataggctgtggctatggtggcctgttagtggaactatcaccactgttcccagacacactgattctgggtctggagatccaggtgaaggtctcagactatgtacaagaccggatttgggccctacgcgcagctcctggaggtggcttccagaacattgcctgtctctgtagcaatgccatgaagcaccttcctaacttctacaaggccagctgacaaagatgttcttcctcttccccgacccacatttcaagcagataaagcacaagcggcaaatcatcagtcccactctgctagcaaaatatgcctacgtgctgagagttggggggttggtatatacgataacccatgtgctggagctacacgactggatgtgcactcattttgaagagcacccgctgtttgagcgtatgcctgtggaggacctgagtgaagactccattgtgggacatctaggtacctcaactgaggaggggaagaaagttctacgtaatggagggaagaatttcccagccatctttcgaagaatacaagatcccgtcctccaggcagtgaccccccaaaccagcctgcctggtcactgactgcttactctaccttagctggaccttgtcttccagggactagagagaagagcaggatccctgggtcttcccagttgagactgctggagctgagacacagtactctcaaagaaggtggggagctgcccagggcagaacccrctggtgttsatgactacccctggctcctctcaccttgtccctccactcccaacagaaaacaaagcagctgactgaggtggtcaaaggacttcggaccataggggatctttggaaggctgtggggtcttgctctgccttagcactcccttctccttgggagatctctcctcagctggaatgaggaatgtagtccatctaaactgcttgctaggcttaa

SEQ ID NO: 1127 - DNA, 1036 bp, Homo sapiens
ggctttcaggtagagaaacccgggaccgggatcatggcagctgagacttggaacgtggccgaagcagaggccccgcagccccagaagcgctactaccggcaatgtgctcaatccaaccccatggcagaccacacgctgcgctatcctgtgaagccagaggaaatggactggtctgagctatacccagagttcttcgctccactcactcaaaatcagagccacgatgacccaaaggataagaaagaaaagagagctcaggcccaagcggagtctgcagacataggctgtggctatggtggcctgttactgacaaagatgttcttcctcttccccgacccacatttcaagcagataaagcacaagcggcaaatcatcagtcccactctgctagcaaaatatgcctacgtgctgagagttggggggttggtatatacgataacccatgtgctggagctacacgactggatgtgcactcattttgaagagcacccgctgtttgagcgtatgcctgtggaggacctgagtgaagactccattgtgggacatctaggtacctcaactgaggaggggaagaaagttctacgtaatggagggaagaatttcccagccatctttcgaagaatacaagatcccgtcctccaggcagtgaccccccaaaccagcctgcctggtcactgactgcttactctaccttagctggaccttgtcttccagggactagagagaagagcaggatccctgggtcttcccagttgagactgctggagctgagacacagtactctcaaagaaggtggggagctgcccagggcagaacccrctggtgttsatgactacccctggctcctctcaccttgtccctccactcccaacagaaaacaaagcagctgactgaggtggtcaaaggacttcggaccataggggatctttggaaggctgtggggtcttgctctgccttagcactcccttctccttgggagatctctcctcagctggaatgaggaatgtagtccatctaaactgcttgctaggcttaa

SEQ ID NO: 1128 - DNA, 3554 bp, Homo sapiens
aggttcagcggacgcgcgcggcctcgatctctggactcgtcacctgcccctccccctcccgccgccgtcacccaggaaaccggccgcaatcgccggccgacctgaagctggtttcrtggcagcctcaaagaaggcagttttggggccattggtgggggcrgtggaccagggcaccagttcsacgagctttttggttttcaattcaaraacagctgaactacttagtcatcatcaagtrgaaataaaacaagagtccccaagagaaggatgggtggaacaggaccctaaggaaattctacattctgtctatgagtgtatagagaaaacatgtgagaaacttggacagctcaatattgrtatttccaacataaaagctattggtgtcagcaaccagagggaaaccactgtagtctgggacaagataactggagagcctctctacaatgctgtggtgtggcttgatctaagaacccagtctaccgttgagagtcttagtaaaagaattccaggaaataataactttgtcaagtccaagacaggccttccacttagcacttacttcagtgcagtgaaacttcgttggctccttgacaatgtgagaaaagttcaaaaggccgttgaagaaaaatgagctctttttgggactattgattcatggcttatttggaatttgacaggaggagtcaatggaggtgtccactgtacagatgtaacaaatgcaagtaggactatgcttttcaacattcattctttggaatgggataaacaactctgygaattttttggaattccaatggaaattcttccamatgtccggagttcttctgagatctatggcctaatgaaagctggggccttggaaggtgtgccaatatctgggygtttaggggaccagtctgctgcattggtgggacaaatgtgcttccagattggacaagccaaaaatacgtatggaacaggatgtttcttactgtgtaatacaggccataagtgtgtattttctgatcatggccttctcaccacagtggyttacaaacttggcwgagacaaaccagtatattatgctttggaaggttctgtagctatagctggtgctgttattcgctggctaagagacaatcttggaattataaagacctcagaagaaattgaaaaacttgctaaagaagtaggtacttcttatggctgctacttcgtcccagcattttcggggttatatgcaccttattgggagcccagcacaagagggataatctgtggactcactcagttcaccaataaatgccatattgcttttgctgcattagaagctgtttgtttcyaaactcgagagattttggatgccatgaatygagactgtggaattccactcagtcatttgcaggtagatggaggaatgaccagcaacaaaattcttatgcagctacragcagwcattctgtatataccagtagtgaagccctcaatgcccgaaaccactgcactgggtgctgctatggaggcaggggctgcagaaggagtcrgcgtatggagtctcgaacccgaggatttgtctgccgtcacgatggagcggtttgaacctcagattaatgctgaggaaagtgaaattcgttattctacrtggaagaaagctgtgatgaagtcaatgggttgggttacaactcaatctccagaaagtggtattccataaaacctaccaaatcatggattcccaagatgtgagctttttacataatgaaagaacccagcaattctgtctcttaatgcaatgacactattcatagactttgattttatttataagccacttgctgcatgaccctccaagtagacctgtggcttaaaataaagaaaatgcagcaaaaagaatgctatagaaatatttggtgttttttttttttttaaacatccacagttaaggttgggccagctacctttggggctgaccccctccattgccataacatcctgctccattccctctaagatgtaggaagaattcggatccttaccattggaatcttccatcgaacatactcaaacactattggaccaggatttgagtctctgcatgacatatacttgattaaaaggttattactaacctgttaaaaatcagcagctctttgcttttaacagacaccctaaaagtcttcttttctacatagttgaagacagcaacatcttcactgaatgtttgaatagaaacctctactaaattattaaaatagacatttagtgttctcacagcttggatatttttctgaaaagttatttgccaaaactgaaatccttcagatgttttccatggtcccactaattataatgactttctgtctggatcttataggaaaggatactttcttttttcttccatctttcctttttatattttttactttgtatgtataacatacatgcctatatattttatacactgagggtagcccatttataaattaagagcacattatattcagaaggttctaacagggctggtcttaagtgaaccactgtgtatataaatatgttggaaaacagctgtatacatttttgggcaacggttatgcataatatttaccaggagaatttttttcttaacaagccaacatttaaaatttatgttttatgtcaataaaagaaaatatactttattgtgacttcaactatatttcttatcccttacatttttatttaattgtcttagcttaaaaaaataagaaactgtggaatactacagtaaatattgttttcaaacacaagcaataattcaaatagttatttttcttttgaattaattgtagacatattttggatcctattgaggggataagaggatgtcaaaaaagttaaatacctaagtagaaaaaaatatagaaataaagccaagaatctctttcagttcaaatgttatcaattgttaataagaaattgctatctgggatgacagaattatctctgcttagtgtcttattataactgaaagaaggtttatcattacaaatgccttccaatgaaaccaagaatttctcaaaatatttaatgtcacatattataagaagttacctaatcctgcttcttaacgtcaatttttaaaaatatcttaaaattactttgttttgcagtaaacagtgaagaaaagattgcctcctaattatttttttcaacragtgctgaatrggaaaacatttatatcttactataaaaggttctgttttgtttggaattaatggtagctttattgactgttctgattgtgctgtttctgaattattgaatctgctaggttttattcatgcagccaccacttaagtgacataaatattatagaaaggtactgtgaaatgatcactttgtggcaggggtacttttaaacataaatgtttctacaaaagtaggttgagttcattgtaaataattgtgaaagccactgttcaaataattttaagattacattaatttttctataaactgcaagatttataaatgtttgaaattgtacacattgatatttaatgacaaatttacttaaaataaattgaccccttgttctt

SEQ ID NO: 1129 - DNA, 1098 bp, Homo sapiens
tggttttttggatcatgtctggtggctccatggattataacagagaacgtggcagcccagagggaatggaccctgatggtgccattgagagcaactgtaatgagatcgttgataactttgatgatatgaatttaaaggagtctcttctttggggcatctatgcttacgattttgagaagtcttctgctattcagcagagagctattattacctgtatgaaagggtatgatgtgattgctcaagctcagtcaggtactggcaagacagccacatttgctatttccatcctgcaactggcccccaccagagaactggytccacakatccaaaaggtaattctggcacttggagactatatgggagcaacttgtcatgcctgcattggtggaacaaatgttcaaactgaaatgcaaaaactgcaggctgaagcaccacatattgttgttggtacacttgggagagtgtttgatatgttaaacagaagatatctttttccaaaatggatcaaaatgcttgttttggatgaagcagatgaaatgttgagccatgggtttaaggatgaaatctatgagattttccaaaaactaaatacaagtattcaggttgtgttgctttctgccacaatgccaactgatgtgttggaagtgaccaaaaaattcatgagagatccaatttgaattctggtgaaaaaggaataattgacccttgaaggaatcaaacagttttatattaatgttgagagagaagaatggaagttggatacactttgtgacttgtatgagacaccgaccattacgcaggctgttatttttctcaaggcccaaagtggactggctgactgagaaaatgcatgccagagacttcagtttctgctctgcatggtgacatggaccagaaggagagagatgttatcatgagggaattctgatcagggtcaagccgtgttctgatcactaaattggcagagggggtctatttgggaggaaaggtgtggctacaaactttgttactgaagaagacaagaggattcttcatgacattgagactttctacaatactacagtaaaggagatgcccatgaatgtggctgaccttatt

SEQ ID NO: 1130 - DNA, 1753 bp, Homo sapiens
gaggacttttcagtcgggcactgagtggttttttggatcatgtctggtggctccatggattataacagagaacgtggcagcccagagggaatggaccctgatggtgccattgagagcaactgtaatgagatcgttgataactttgatgatatgaatttaaaggagtctcttctttggggcatctatgcttacgattttgagaagtcttctgctattcagcagagagctattattacctgtatgaaaggatccaaaaggtaattctggcacttggagactatktgggagcaacttgtcatgcctgcattggtggaacaaatgttcaaactgaaatgcaaaaactgcaggctgaagcaccacatattgttgttggtacacttgggagagtgtttgatatgttaaacagaagatatctttttccaaaatggatcaaaatgcttgttttggatgaagcagatgaaatgttgagccatgggtttaaggatgaaatctatgagattttccaaaaactaaatacaagtattcaggttgtgttgctttctgccacaatgccaactgatgtgttggaagtgaccaaaaaattcatgagagatccaatttgaattctggtgaaaaaggaataattgacccttgaaggaatcaaacagttttatattaatgttgagagagaagaatggaagttggatacactttgtgacttgtatgagacaccgaccattacgcaggctgttatttttctcaaggcccaaagtggactggctgactgagaaaatgcatgccagagacttcagtttctgctctgcatggtgacatggaccagaaggagagagatgttatcatgagggaattctgatcagggtcaagccgtgttctgatcactagtgacttgttggctcgtgggattgatgtgcaacaactgtctttggttataaattatgatctacctaccaatcgtgaaactatattcacagaattggcagagggggtctatttgggaggaaaggtgtggctacaaactttgttactgaagaagacaagaggattcttcatgacattgagactttctacaatactacagtaaaggagatgcccatgaatgtggctgaccttatttaatttctgggatgagagttttggatgcagtgtttgctgttgctgaataggcaatgacaatatgcattgtggttctttctttgggactatttggatcttgtctcaatgctcataatggatcagaaatatagattttgatagcaaagctacattagtcttgagctcttgtgaggaaagtcattggcttcatcctctttagagttagactgttggggtgggtataaaagatggggtctgtaaaatctttctttcttagaaatttatttcctagttctgtagaaatggttgtatttgatgttctccatgatttaataatatacttgtggactaaaagatataagtgctgtataaaatcagccaattatgttaaactagcatatctgcctttattgtgtttgtcattagcctgagtagaaaggactttaaaattttttttaggaagcatttgaatgcattttgtttggtattatatttattcagtaaaatatttaattagtgctaagtgtgaactggaccctgttgctaagctccggcaagcaatcatcctaggtagggtttaatccccagtaaaattgccatattgcacatgtcttaacgaagtttgaatgttaagtaaattgtatgttcactttttaaaaaa

SEQ ID NO: 1131 - DNA, 1846 bp, Homo sapiens
ggcactgagtggttttttggatcatgtctggtggctccatggattataacagagaacgtggcagcccagagggaatggaccctgatggtgccattgagagcaactgtaatgagatcgttgataactttgatgatatgaatttaaaggagtctcttctttggggcatctatgcttacgattttgagaagtcttctgctattcagcagagagctattattacctgtatgaaagggtatgatgtgattgctcaagctcagtcaggtactggcaagacagccacatttgctatttccatcctgcaacagttggagatggcccccaccagagaactggytccacakatccaaaaggtaattctggcacttggagactatatgggagcaacttgtcatgcctgcattggtggaacaaatgttcaaactgaaatgcaaaaactgcaggctgaagcaccacatattgttgttggtacacttgggagagtgtttgatatgttaaacagaagatatctttttccaaaatggatcaaaatgcttgttttggatgaagcagatgaaatgttgagccatgggtttaaggatgaaatctatgagattttccaaaaactaaatacaagtattcaggttgtgttgctttctgccacaatgccaactgatgtgttggaagtgaccaaaaaattcatgagagatccaatttgaattctggtgaaaaaggaataattgacccttgaaggaatcaaacagttttatattaatgttgagagagaagaatggaagttggatacactttgtgacttgtatgagacaccgaccattacgcaggctgttatttttctcaaggcccaaagtggactggctgactgagaaaatgcatgccagagacttcagtttctgctctgcatggtgacatggaccagaaggagagagatgttatcatgagggaattctgatcagggtcaagccgtgttctgatcactagtgacttgttggctcgtgggattgatgtgcaacaactgtctttggttataaattatgatctacctaccaatcgtgaaactatattcacagaattggcagagggggtctatttgggaggaaaggtgtggctacaaactttgttactgaagaagacaagaggattcttcatgacattgagactttctacaatactacagtaaaggagatgcccatgaatgtggctgaccttatttaatttctgggatgagagttttggatgcagtgtttgctgttgctgaataggcaatgacaatatgcattgtggttctttctttgggactatttggatcttgtctcaatgctcataatggatcagaaatatagattttgatagcaaagctacattagtcttgagctcttgtgaggaaagtcattggcttcatcctctttagagttagactgttggggtgggtataaaagatggggtctgtaaaatctttctttcttagaaatttatttcctagttctgtagaaatggttgtatttgatgttctccatgatttaataatatacttgtggactaaaagatataagtgctgtataaaatcagccaattatgttaaactagcatatctgcctttattgtgtttgtcattagcctgagtagaaaggactttaaaattttttttaggaagcatttgaatgcattttgtttggtattatatttattcagtaaaatatttaattagtgctaagtgtgaactggaccctgttgctaagctccggcaagcaatcatcctaggtagggtttaatccccagtaaaattgccatattgcacatgtcttaacgaagtttgaatgttaagtaaattgtatgttcactttttaaaaaa

SEQ ID NO: 1132 - DNA, 1183 bp, Homo sapiens
ctgtcggggctccctcccgtcgcggctccgctataaaacccaggccggcaggatcgctgcacccgcggcggcctcctcggtgcgcgacccccggctcasaggactctttgctgtcccgcaagatgcggatgctgctggcgctcctggccctctccgcggcgcggccatcggccagtgcagagtcacactggtgctacgaggttcaagccgagtcctccaactacccctgcttggtgccagtcaagtggggtggaaactgccagaaggaccgccagtcccccatcaacatcgtcaccaccaaggcaaaggtggacaaaaaactgggrcgcttcttcttctctggctacgataagaagcaaacgtggactgtccaaaataacgggcactcagtgatgatgttgctggagaacaaggccagcatttctggaggaggactgcctgccccataccaggccaaacagttgcacctgcactggtccgacttgccatataagggctcggagcacagcctcgatggggagcactttgccatggagatgcacatagtacatgagaaagagaaggggacatcgaggaatgtgaaagaggcccaggaccctgaagacgaaattgcggtgctggcctttctggtggaggctggaacccaggtgaacgagggcttccagccactggtggaggcactgtctaatatccccaaacctgagatgagcactacgatggcagagagcagcctgttggacctgctccccaaggaggagaaactgaggcactacttccgctacctgggctcactcaccacaccgacctgcgatgagaaggtcgtctggactgtgttccgggagcccattcagcttcacagagaacagatcctggcattctctcagaagctgtactacgacaaggaacagacagtgagcatgaaggacaatgtcaggcccctgcagcagctggggcagcgcacggtgataaagtccggggccccgggtcggccgctgccctgggccctgcctgccctgctgggccccatgctggcctgcctgctggccggcttcctgcgatgatggctcacttmtgcacrcagcctctctgttgcctcagctctccaagttccaggcttccggtccttagccttcccaggtgggactttaggcatgattaaaatatggacatatttttggagaaa

SEQ ID NO: 1133 - DNA, 1007 bp, Homo sapiens
atgcggatgctgctggcgctcctggccctctccgcggcgcggccatcggccagtgcagtgccagtcaagtggggtggaaactgccagaaggaccgccagtcccccatcaacatcgtcaccaccaaggcaaaggtggacaaaaaactgggrcgcttcttcttctctggctacgataagaagcaaacgtggactgtccaaaataacgggcactcagtgatgatgttgctggagaacaaggccagcatttctggaggaggactgcctgccccataccaggccaaacagttgcacctgcactggtccgacttgccatataagggctcggagcacagcctcgatggggagcactttgccatggagatgcacatagtacatgagaaagagaaggggacatcgaggaatgtgaaagaggcccaggaccctgaagacgaaattgcggtgctggcctttctggtggaggctggaacccaggtgaacgagggcttccagccactggtggaggcactgtctaatatccccaaacctgagatgagcactacgatggcagagagcagcctgttggacctgctccccaaggaggagaaactgaggcactacttccgctacctgggctcactcaccacaccgacctgcgatgagaaggtcgtctggactgtgttccgggagcccattcagcttcacagagaacagatcctggcattctctcagaagctgtactacgacaaggaacagacagtgagcatgaaggacaatgtcaggcccctgcagcagctggggcagcgcacggtgataaagtccggggccccgggtcggccgctgccctgggccctgcctgccctgctgggccccatgctggcctgcctgctggccggcttcctgcgatgatggctcacttmtgcacrcagcctctctgttgcctcagctctccaagttccaggcttccggtccttagccttcccaggtgggactttaggcatgattaaaatatggacatatttttggagaaa

SEQ ID NO: 1134 - DNA, 928 bp, Homo sapiens
  misc_feature (1)...(928): n = A,T,C or G
cgcgtgcgaggcgattggtttggggccagagtgggcgaggcgcggaggtctggcctataaagtagtcgcggagacggggtgctggtttgcgtcgtagtctcctgcagcgtctggggtttccgttgcagtcctcggaaccaggacctcggcgtggcctagcgagttatggcgacgaagdycgtgkgcgwgcwgaagggcgacggcccagtgcagrscatcatcaatttcrrgcagaaggaaagtaatggaccagtgaaggtgtggggaagcattaaargaskgaytgaarrcctgcatggattccatgttcakragtttggagataatacagcaggctgtaccagtgcaggtcctcactttaatcctctatccagaaaacacrgtgggccaaagkatgaagagaggcrtgttggagacktssgcartgtgactgctgacaaagatnntgtggccratrtgtctattrrarrttctgtgwtctcastctcaggagaccattgcaysaytggcsgcacactggtggtccatgaaaaagcagwtsacthgggcaaaggtggaaatgaagaaartacaaagacaggaaahgstggaagtcgttysrctygtggtrkaaytgggaycgcccaataaayattcccttggatgtagtctgaggccccttarctcatctgttatcctgctagctgtagaaatagttgctttaaagtacctgtagtgagaaactgatttatgatcacttggaagatttgtatagttttataaaactcagttaaaatgtctgtttcaatgacctgtattttgccagacttaaatcacagatgggtattaaacttgtcagaatttctttgtcattcaagcctgtgaataaaaaccctgtatggcacttattatgaggctattaaaagaatccaaattcaaactaaattag

SEQ ID NO: 1135 - DNA, 987 bp, Homo sapiens
  misc_feature (1)...(987): n = A,T,C or G
cgcgtgcgaggcgattggtttggggccagagtgggcgaggcgcggaggtctggcctataaagtagtcgcggagacggggtgctggtttgcgtcgtagtctcctgcagcgtctggggtttccgttgcagtcctcggaaccaggacctcggcgtggcctagcgagttatggcgacgaagdycgtgkgcgwgcwgaagggcgacggcccagtgcagrscatcatcaatttcrrgcagaaggaaagtaatggaccagtgaaggtgtggggaagcattaaargaskgaytgaarrcctgcatggattccatgttcakragtttggagataatacagcaggctgtaccagtgcaggtcctcactttaatcctctatccagaaaacacrgtgggccaaagkatgaagagaggcrtgttggagacktssgcartgtgactgctgacaaagatnntgtggccratrtgtctattrrarrttctgtgwtctcastctcaggagaccattgcaysaytggcsgcacactggtggtccatgaaaaagcagwtsacthgggcaaaggtggaaatgaagaaartacaaagacaggaaahgstggaagtcgttysrctygtggtrkaaytgggaycgcccaataaayattcccttggatgtagtctgaggccccttarctcatctgttatcctgctagctgtagaaatgtatcckgataaacattaaacmctgtaatcttaaaagtgwaattgtgtgactttttmagagttgctttaaagtacctgtagtgagaaactgatttatgatcacttggaagatttgtatagttttataaaactcagttaaaatgtctgtttcaatgacctgtattttgccagacttaaatcacagatgggtattaaacttgtcagaatttctttgtcattcaagcctgtgaataaaaaccctgtatggcacttattatgaggctattaaaagaatccaaattcaaactaaattag

SEQ ID NO: 1136 - DNA, 665 bp, Homo sapiens
cttccagattggagcagacaccaatgcctatcatatttggaagcgggacagtggtgacwgtattgcagcaactggcaaatgagtttcccttccctgtcaatataatcctgagcaacccatggctatttgaaccacttataagcaggtttatggagagaaatcccttaaccaatgcaataatcaggaccaccacggcactcaccatattcaaagcargggtcaagttcaatgtcatccccccagtggcccaggccacagtcaacttccggattcaccctggacagacagtccaagaggtcctagaactcacgaaraacaytgtggctgataacagagtccagttccatgtgttgagtgcctttgaccccctccccgtcagcccttctgatgacaaggccttgggctaccagctgctccgccagaccgtacagtccgtcttcccggaagtcaatattactgccccagacagccgattctttacaaacctcaccactggcatctacaggttctaccccatctacatacagcctgaagacttcaaacgcatccatggagtcaacgagaaaatctcagtccaagcctatgagacccaagtgaaattcatctttgagttgattcagaatgctgacacagaccaggagccagtttctcacctgcacaaactg

SEQ ID NO: 1137 - DNA, 1155 bp, Homo sapiens
gagatagggtctcactctgttttccaggctagagagcaatagtgcaatcacaccyyactgcagcctcagtctcctgggctcaggygrtcctcccacctcagactcccgagtagctgggaccacaggagggcaccaccatacctggttttaaaactttttgtagagatggggtctcacyatgttgcccaggcyggtytcaaccttctgggctcaagtgatcctctcacctcagcctcccatagtgctgggattacaggcatgagccacacctagcccaatttagtgaattttaagaagcattttaaaaaaatgaaaactaaaacatagaggatatccgaggttctaaggktaagaatttctttatgaaacctgcttggaacacagttgtaaacaaatggactgatttatgatggaaggcacgtttcttgctgcagatcatggtctgaagtttgaaagccaccagcytagagggttctgaaaacttctccttcctaacacagctgaaggaaaaggggtgggtaggggcggaggcacagggacatctccaggtttggacttttccaacatgatttgcagaaggcacttgattctggaaagtagacctttggcatttcgaccctcacccacactcccacacccactctgcacagatcggtggtgcatccgaggcagggctgagttagaacaggacatcctagactcggcggcagtgactattattcagaaatggcacatcaagggccggcctgcccttcatcctgcaggggtacttgggcatgtggaggcccctttctccctggtgttgcaactggagaggagtcggttcctgaagaacagatgggagagtgctggggccaggtaccckgggagagaggagggaaatgmaatccggcacaggggctgcggggatmggggcagtcaggaggcggcagtgyggtgcaagggcccccccamgcrgccagctgtggaacttccaccacgactccctgtcctctcctgagcccgcccatcacgtgtagaagctcagatgctgggcgccaggagggcggcttcctggctctgggcaccgtggttctgtcctaacgaggggcgctctctgggtgtaaaaacagatgttctggctgggcgcggtggctcacgcctgtaatcccagca

SEQ ID NO: 1138 - DNA, 1522 bp, Homo sapiens
atggcggactacctgatcagcggcagcacccgctacgtgtccgaggccggcctcaccgcgcagcagctcttcgccagcgccgatggcctcacctacaacgacttcctgattctcccaggattcataggcttcataactgatgaggtggacctgacctcagccctgacccggaagatcacgctgaagactccgctgacctcctcctccatgggcactgtgacagatgccgacatggccatcgtgatggctctgatgggagggctctgataggaggtattagtttcattcaccacaactgcaccccagagtttcaggccaataaggtgcagaaggtcaagaagtttgaacagggcttcatcacggaccccgtggtgctgagcccctcgcacaccgtgggtgatgtactggaggccaagatgcggcatggcttctctggcatccccatcactgagacgggcaccatcggcagcaagctggtgggtatcatcgcctcccgagacatcgactttcttgctgagaaggacaccatcctcctcagtgagatgatgacgccaaggaccgagctggtggtggctccagcaggcgtgacattgaaagagcaaatgagatcctgcagcgtagcaagaaagggaagctgcctatcgtcaatgatcacaatgagctggtggccatcatcacccgcaccgacctgaagaagaaccgagactacctctggcctccaaggatttccacaagcagctgctgtgcggggcagttgtgggcacccgtgaagatgacaaattctgcctggacctgctcactcaggcgggcgtcgatgtcatagtcttggactcgtcccaagggaactcggtgtatcagatcgccacggtgcattacatcaaacagaagtacctccacctccaggtgattgcggggaacgtggtgacagcagcccagcgtgggcatgggctgcggctccatctgcatcaccggggaagtgatggcctgtggtcagacccacggcactgctgtgtacaaggtggccgagtatgtctggcgctttggtgtgcccgtcatagccgatggcagcatccagaccgtggggtacatggtcaaggccctggcccttggagcctccacagtgctggcccttggagcctccacagtgatgacgggctccttgctggccgctaccacggaggcctctggygagtacttcttctcagacagggtgtggctcaggaagtaccggggcatgggctcgctggatgccatggagaagagcagcagcacccagaaatgatacttcagcgagggggataaggtgaagatcacacagggtatctcgggctccatccaggacaaagggtccattcagaagtttgtgccctacctcatagcgggcatccagcatggctaccaggatatcggggtccacagcctgtctgtctttgggtccatgatgtactcaggagagctcaagtttgagaagcggaccatgttggctcagatcaagcgtggtgtccatggcctgcactcttag

SEQ ID NO: 1139 - DNA, 4157 bp, Homo sapiens
agtcctagcggaaacggaaacgcgcgrggagcgagatgttctggctcctctaggctagctggttcttcaaagatctcgatggttcctcataaatatgtaaatattgtgggggcgtggcgggactttakgccccgccctcccaccgaggctgcgctggaagacgggcgtccggaactcctgggtccattcccaatgtctcctggctcctcctccttttgctcagccccaccaccgccccgctcaggccgattgcaaaattcttagctgttctttgagtaaccacacgtcctccacgctcctttcctctttatcccaccctcctcctcctccccactttgaggcctccagctccagattgacagarctgaaggccactcgtttccgtaaagcgcagcggcaagctccgccccctggaggtctcacggccgaggcggggccgggacacagcgactccaacccgttccaccaatgrggacacgcggaaatccccgcccccgggcgtgggccaatggcgctggctggkgggggcggccaccgcctcctggcggctgcgaggtttcactgcaggggcgccagtgggctcagtgacgctgcggcckccttctgcctaggtcccaacgcttcggggcaggggtgcggtcttgcaataggaagcygagcgtcttgcaagcttcccgtcgggcaccagctactcggccccgcaccctacctggtgcattccctagacacctccggggtccctacctggagatccccggagcmccccttcctgcgccagccatgcctttaaaccgcactttgtccatgtcctcactgccaggactggaggactgggaggatgaattcgacctggagaacgcagtgctcttcgaagtggcctgggaggtggctaacaaggtgggtggcatctacacggtgctgcagacgaaggcgaaggtgacaggggacgaatggggcgacaactacttcctggtggggccgtacacggagcagggcgtsaggacccaggtggaactgctggaggcccccaccccggccctgaagaggacactggattccatgaacagcaagggctgcaaggtgtatttcgggcgctggctgatsgagggaggccctctggtggtgctcctggacgtgggtgcctcagcttgggccctggagcgctggragggagagctctgggayayctgcaacatcggrgtgccgtggtacgaccgcgaggccaacgacgctgtcctctttggctttctgaccacctggttcctgggtgagttcctggcacagagtgaggagaagccacatgtggttgctcacttccatgagtggttggcaggygttggactctgcctgtgtcgtgcccggcgactgcctgtagcaaccatcttcaccacccatgccacgctgctggggcgctacctgtgtgccggtgccgtggacttctacaacaacctggagaacttcaacgtggacaargaagcaggggagaggcagatctaccaccgatactgcatggaaagggcrgcagcccactgcgctcacgtcttcactactgtgtcccagatcaccgccatcgaggcacagcacttgctcaagaggaaaccagatattgtgacccccaatgggctgartgtgaagaagttttctgccatgcatgagttccagaacctccatgctcagagcaaggctcgaatccaggagtttgtgcggggccatttttatgggcatctggacttcaacttggacaagaccttatacttctttatcgccggccgctatgagttctccaacaagggtgctgacgtcttyctggaggcattggctcggctcaactatctgctcagagtgaacggcagcgrgcagacagtggttgccttcttcatcatgccagcgcggaccaacaatttcaacgtggaaaccctcaaaggccaagctgtgcgcaaacagctttgggacacggccaacacggtgaaggaaaagttcgggaggaagctttatgaatccttactggttgggagccttcccgacrtgaacaagatgctggataaggaagacttcactatgatgaagagagccatctttgcaacgcagcggcagtctttcccccctgtgtgcacccacaatatgctggatgactcctcagaccccatcctgaccaccatccgccgaatcggcctcttcaatagcagtgccgacagggtgaaggtgattttccacccggagttcctctcctccacaagccccctgctccctgtggactatgaggagtttgtccgtggctgtcaccttggagtcttcccctcctactatgagccttggggctacacrccggctgagtgcacggttatgggaatccccagtatctccaccaatctctccggcttcggctgcttcatggaggaacacatcgcagacccctcagcttacggtatctacattcttgaccggcggttccgcagcctggatgattcctgctcgcagctcacctccttcctctacagtttctgtcagcagagccggcggcagcgtatcatccagcggaaccgcacggagcgcctctccgaccttctggactggaaatacctaggccggtactatatgtctgcgcgccacatggcgctgtccaaggcctttccasagcacttcacctacgagcccaacgaggcggatgcggcccaggggtaccgctacccacggccagcctcggtrccaccgtcgccctcgctgtcacgacactccagcccgcaccagagtgaggacgaggaggatccccggaacgggccgctggaggaagayggcgagcgctacgatgaggacgaggaggccgccaaggaccggcgcaacatccgtgcascagagtggccgcgccgagcgtcctgcacctcctccaccagcggcmgcaagcgcaactctgtggacacggccacctccagctcactcagcaccccgagcgagcccctcagccccaccagctccctgggcgaggagcgtaactaagtccgccccaccacactccccgcctgtcctgcctctctgctccagagagaggatgcagaggggtgctgctcctaaacccccgmtccagatctgcackgggtgyggccccgcagtgcccccacccagtccgccaaacactccaccccctccagctccagtttccaagttcctgcactccagaatccacaaagccgtgcctttctctggctccagaatatgcataatcagcgccctggagtcccctgggcctggaccgcttcccagaggccaggaatctgccattactctgcggtggtgccagaggttttaggaaacctggcatggtgctttcaggtctggggcttttagagccccccgtgtggcttacaaattctacagcatacagagcaggccacgctcaggcccggcatgcgggccaccaagttctggaaaccacgtggtgtccctgcraatggggcgatcaagtccagagccggggcactttcagagtttgaaggtaactgagagcagatggtcctccatttcaactccagaagtggggctctgggagggatgttctagccctccctggcatgtcagagccaggctctgcctggaggatccctccatccggctcctgtcatcccctacactttggccaagcaagaggtggtagaaccacttggctgctcattccttctggaggacacacagtctcagtccagatgccttcctgtctttctggycctttctggaccagatcctactcttcctttctaaatctgagatctccctccagggaatccgcctgcagaggacagagctggctgtcttcccccacccctaacctggcttattcccaactgctctgcccactgtgaaaccactaggttctaggtcctggcttctagatctggaaccttaccacgttactgcatactgatccctttcccatgatccagaactgaggtcactgggttctagaacccccacatttacctcgaggctcttccatccccaaactgtgccctgccttcagctttggtgaaagggagggcccctcatgtgtgctgtgctgtgtctgcaccgcttggtttgcagttgagaggggagggcagraggggtgtgattggagtgtgtccggagatgagatgaaaaaaatacatctatatttaagaatccca

SEQ ID NO: 1140 - DNA, 3965 bp, Homo sapiens
agtcctagcggaaacggaaacgcgcgrggagcgagatgttctggctcctctaggctagctggttcttcaaagatctcgatggttcctcataaatatgtaaatattgtgggggcgtggcgggactttakgccccgccctcccaccgaggctgcgctggaagacgggcgtccggaactcctgggtccattcccaatgtctcctggctcctcctccttttgctcagccccaccaccgccccgctcaggccgattgcaaaattcttagctgttctttgagtaaccacacgtcctccacgctcctttcctctttatcccaccctcctcctcctccccactttgaggcctccagctccagattgacagarctgaaggccactcgtttccgtaaagcgcagcggcaagctccgccccctggaggtctcacggccgaggcggggccgggacacagcgactccaacccgttccaccaatgrggacacgcggaaatccccgcccccgggcgtgggccaatggcgctggctggkgggggcggccaccgcctcctggcggctgcgaggtttcactgcaggggcgccagtgggctcagtgacgctgcggcckccttctgcctaggtcccaacgcttcggggcaggggtgcggtcttgcaataggaagcygagcgtcttgcaagcttcccgtcgggcaccagctactcggccccgcaccctacctggtgcattccctagacacctccggggtccctacctggagatccccggagcmccccttcctgcgccagccatgcctttaaaccgcactttgtccatgtcctcactgccaggactggaggactgggaggatgaattcgacctggagaacgcagtgctcttcgaagtggcctgggaggtggctaacaaggtgggtggcatctacacggtgctgcagacgaaggcgaaggtgacaggggacgaatggggcgacaactacttcctggtggggccgtacacggagcagggcgtsaggacccaggtggaactgctggaggcccccaccccggccctgaagaggacactggattccatgaacagcaagggctgcaagttcctggcacagagtgaggagaagccacatgtggttgctcacttccatgagtggttggcaggygttggactctgcctgtgtcgtgcccggcgactgcctgtagcaaccatcttcaccacccatgccacgctgctggggcgctacctgtgtgccggtgccgtggacttctacaacaacctggagaacttcaacgtggacaargaagcaggggagaggcagatctaccaccgatactgcatggaaagggcrgcagcccactgcgctcacgtcttcactactgtgtcccagatcaccgccatcgaggcacagcacttgctcaagaggaaaccagatattgtgacccccaatgggctgartgtgaagaagttttctgccatgcatgagttccagaacctccatgctcagagcaaggctcgaatccaggagtttgtgcggggccatttttatgggcatctggacttcaacttggacaagaccttatacttctttatcgccggccgctatgagttctccaacaagggtgctgacgtcttyctggaggcattggctcggctcaactatctgctcagagtgaacggcagcgrgcagacagtggttgccttcttcatcatgccagcgcggaccaacaatttcaacgtggaaaccctcaaaggccaagctgtgcgcaaacagctttgggacacggccaacacggtgaaggaaaagttcgggaggaagctttatgaatccttactggttgggagccttcccgacrtgaacaagatgctggataaggaagacttcactatgatgaagagagccatctttgcaacgcagcggcagtctttcccccctgtgtgcacccacaatatgctggatgactcctcagaccccatcctgaccaccatccgccgaatcggcctcttcaatagcagtgccgacagggtgaaggtgattttccacccggagttcctctcctccacaagccccctgctccctgtggactatgaggagtttgtccgtggctgtcaccttggagtcttcccctcctactatgagccttggggctacacrccggctgagtgcacggttatgggaatccccagtatctccaccaatctctccggcttcggctgcttcatggaggaacacatcgcagacccctcagcttacggtatctacattcttgaccggcggttccgcagcctggatgattcctgctcgcagctcacctccttcctctacagtttctgtcagcagagccggcggcagcgtatcatccagcggaaccgcacggagcgcctctccgaccttctggactggaaatacctaggccggtactatatgtctgcgcgccacatggcgctgtccaaggcctttccasagcacttcacctacgagcccaacgaggcggatgcggcccaggggtaccgctacccacggccagcctcggtrccaccgtcgccctcgctgtcacgacactccagcccgcaccagagtgaggacgaggaggatccccggaacgggccgctggaggaagayggcgagcgctacgatgaggacgaggaggccgccaaggaccggcgcaacatccgtgcascagagtggccgcgccgagcgtcctgcacctcctccaccagcggcmgcaagcgcaactctgtggacacggccacctccagctcactcagcaccccgagcgagcccctcagccccaccagctccctgggcgaggagcgtaactaagtccgccccaccacactccccgcctgtcctgcctctctgctccagagagaggatgcagaggggtgctgctcctaaacccccgmtccagatctgcackgggtgyggccccgcagtgcccccacccagtccgccaaacactccaccccctccagctccagtttccaagttcctgcactccagaatccacaaagccgtgcctttctctggctccagaatatgcataatcagcgccctggagtcccctgggcctggaccgcttcccagaggccaggaatctgccattactctgcggtggtgccagaggttttaggaaacctggcatggtgctttcaggtctggggcttttagagccccccgtgtggcttacaaattctacagcatacagagcaggccacgctcaggcccggcatgcgggccaccaagttctggaaaccacgtggtgtccctgcraatggggcgatcaagtccagagccggggcactttcagagtttgaaggtaactgagagcagatggtcctccatttcaactccagaagtggggctctgggagggatgttctagccctccctggcatgtcagagccaggctctgcctggaggatccctccatccggctcctgtcatcccctacactttggccaagcaagaggtggtagaaccacttggctgctcattccttctggaggacacacagtctcagtccagatgccttcctgtctttctggycctttctggaccagatcctactcttcctttctaaatctgagatctccctccagggaatccgcctgcagaggacagagctggctgtcttcccccacccctaacctggcttattcccaactgctctgcccactgtgaaaccactaggttctaggtcctggcttctagatctggaaccttaccacgttactgcatactgatccctttcccatgatccagaactgaggtcactgggttctagaacccccacatttacctcgaggctcttccatccccaaactgtgccctgccttcagctttggtgaaagggagggcccctcatgtgtgctgtgctgtgtctgcaccgcttggtttgcagttgagaggggagggcagraggggtgtgattggagtgtgtccggagatgagatgaaaaaaatacatctatatttaagaatccca

SEQ ID NO: 1141 - DNA, 3111 bp, Homo sapiens
gctgatagcacagttctgtccagagaaggaaggcagaataaacttattcattcccaggaactcttggggtaggtgtgtgtttttcacatcttaaaggctcacagaccctgcgctggacaaatgttccattcctgaaggacctctccagaatccggattgctgaatcttccctgttgcctagaagggctccaaaccacctcttgacaatgggaaactgggtggttaaccactggttttcagttttgtttctggttgtttggttagggctgaatgttttcctgtttgtggatgccttcctgaaatatgagaaggccgacaaatactactacacaagaaaaatccttgggtcaacattggcctgtgcccgagcgtctgctctctgcttgaattttaacagcacgctgatcctgcttcctgtgtgtcgcaatctgctgtccttcctgaggggcacctgctcattttgcagccgcacactgagaaagcaattggatcacaacctcaccttccacaagctggtggcctatatgatctgcctacatacagctattcacatcattgcacacctgtttaactttgactgctatagcagaagccgacaggccacagatggctcccttgcctccattctctccagcctatctcatgatgagaaaaaggggggttcttggctaaatcccatccagtcccgaaacacgacagtggagtatgtgacattcaccagcattgctggtctcactggagtgatcatgacaatagccttgattctcatggtaacttcagctactgagttcatccggaggagttattttgaagtcttctggtatactcaccacctttttatcttctatatccttggcttagggattcacggcattggtggaattgtccggggtcaaacagaggagagcatgaatgagagtcatcctcrcaagtgtgcagagtcttttgagatgtgggatgatcgtgactcycactgtaggcgccctaagtttgaagggcatccccctgagtcttggaagtggatccttgcaccggtcattctttatatctgtgaaaggatcctccggttttaccgctcccagcagaaggttgtgattaccaaggtaaagaatatgcactttcctcttgctgtgataagagttatcttctaccggactacagaactaaatttttatgttgtcaccctgaaagaggaacttggaaactgggcacagtgggtggttgttatgcacccatccaaagttttggaattgcagatgaacaagcrtggcttcagcatggaagtggggcagtatatctttgttaattgcccctcaatctctctcctggaatggcatccttttactttgacctctgctccagaggaagatttcttctccattcatatccgagcagcagggractggacagaaaatctcataagggctttcgaacaacaatattcaccaattcccaggattgaagtggatggtccctttggcacagccagtgaggatgttttccagtatgaagtggctgtgctggttggagcaggaattggggtcaccccctttgcttctatcttgaaatccatctggtacaaattccagtgtgcagaccacaacctcaaaacaaaaaagatctatttctactggatctgcagggagacaggtgccttttcctggttcaacaacctgttgacttccctggaacaggagatggaggaattaggcaaagtgggttttctaaactaccgtctcttcctcaccggatgggacagcaatattgttggtcatgcagcattaaactttgacaaggccactgacatcgtgacaggtctgaaacagaaaacctcctttgggagaccaatgtgggacaatgagttttctacaatagctacctcccaccccaagtctgtagtgggagttttcttatgtggccctcggactttggcaaagagcctgcgcaaatgctgtcaccgatattccagtctggatcctagaaaggttcaattctacttcaacaaagaaaatttttgagttataggaataaggacggtaatctgcattttgtctctttgtatcttcagtaatttacttggtctcgtcaggtttgagcagtcactttaggataagaatgtgcctctcaagccttgactccctggtattctttttttgattgcattcaacttcgttacttgagcttcagcaacttaagaacttctgaagttcttaaagttctgaagttcttaaagcccatggatcctttctcagaaaaataactgtaaatctttctggacagccatgactgtagcaaggcttgatagcagaggtttggtggttcagagttatacaactaatcccaggtgattttatcaattccagtgttaccatctcctgagttttggtttgtaatcttttgtccctcccacccccacagaagatttctaagtagggtgactttttaaataaaaatttattgaataattartgataaaacataataataaacataaataataaacaaaattaccgagaaccccatccccatataacaccaacagtgtacatgtttactgtcacttttgatatggtcttatccagtgtgaacagcaatttattatttttgctcatcaaaaaataaaggattttcttcttcacttgatgaatgagtcttttgttacttctttttgggctctccatttgggaaagaaaatctagaaagtatgctcattgtaattgaaattgtattataattgcaagtcagctatactgtcatcttgtattattctgttaaaagcgattgtgaaaacttgaactccatgttaggatgacttatttagtcaagaggagctctttatcactattaagggagtttattaatgtctagtttaaaaaataacaatttataattttcatagatttttgtggactcctacctatatcgctaaggaatcattcagctaataacataagcaaaatgccttcattctctatcagaatgctttttatttctgccatctacccaacctcggcctacaaggaccacactggctctgggatgttagtcgtcacagtgaatccctagaaggagagaagcccagggctcttaagagagaaacctcacacttca

SEQ ID NO: 1142 - DNA, 2994 bp, Homo sapiens
gctgatagcacagttctgtccagagaaggaaggcagaataaacttattcattcccaggaactcttggggtaggtgtgtgtttttcacatcttaaaggctcacagaccctgcgctggacaaatgttccattcctgaaggacctctccagaatccggattgctgaatcttccctgttgcctagaagggctccaaaccacctcttgacaatgggaaactgggtggttaaccactggttttcagttttgtttctggttgtttggttagggctgaatgttttcctgtttgtggatgccttcctgaaatatgagaaggccgacaaatactactacacaagaaaaatccttgggtcaacattggcctgtgcccgagcgtctgctctctgcttgaattttaacagcacgctgatcctgcttcctgtgtgtcgcaatctgctgtccttcctgaggggcacctgctcattttgcagccgcacactgagaaagcaattggatcacaacctcaccttccacaagctggtggcctatatgatctgcctacatacagctattcacatcattgcacacctgtttaactttgactgctatagcagaagccgacaggccacagatggctcccttgcctccattctctccagcctatctcatgatgagaaaaaggggggttcttggctaaatcccatccagtcccgaaacacgacagtggagtatgtgacattcaccagcattgctggtctcactggagtgatcatgacaatagccttgattctcatggtaacttcagctactgagttcatccggaggagttattttgaagtcttctggtatactcaccacctttttatcttctatatccttggcttagggattcacggcattggtggaattgtccggggtcaaacagaggagagcatgaatgagagtcatcctcrcaagtgtgcagagtcttttgagatgtgggatgatcgtgactcycactgtaggcgccctaagtttgaagggcatccccctgagtcttggaagtggatccttgcaccggtcattctttatatctgtgaaaggatcctccggttttaccgctcccagcagaaggttgtgattaccaaggttgttatgcacccatccaaagttttggaattgcagatgaacaagcrtggcttcagcatggaagtggggcagtatatctttgttaattgcccctcaatctctctcctggaatggcatccttttactttgacctctgctccagaggaagatttcttctccattcatatccgagcagcagggractggacagaaaatctcataagggctttcgaacaacaatattcaccaattcccaggattgaagtggatggtccctttggcacagccagtgaggatgttttccagtatgaagtggctgtgctggttggagcaggaattggggtcaccccctttgcttctatcttgaaatccatctggtacaaattccagtgtgcagaccacaacctcaaaacaaaaaagatctatttctactggatctgcagggagacaggtgccttttcctggttcaacaacctgttgacttccctggaacaggagatggaggaattaggcaaagtgggttttctaaactaccgtctcttcctcaccggatgggacagcaatattgttggtcatgcagcattaaactttgacaaggccactgacatcgtgacaggtctgaaacagaaaacctcctttgggagaccaatgtgggacaatgagttttctacaatagctacctcccaccccaagtctgtagtgggagttttcttatgtggccctcggactttggcaaagagcctgcgcaaatgctgtcaccgatattccagtctggatcctagaaaggttcaattctacttcaacaaagaaaatttttgagttataggaataaggacggtaatctgcattttgtctctttgtatcttcagtaatttacttggtctcgtcaggtttgagcagtcactttaggataagaatgtgcctctcaagccttgactccctggtattctttttttgattgcattcaacttcgttacttgagcttcagcaacttaagaacttctgaagttcttaaagttctgaagttcttaaagcccatggatcctttctcagaaaaataactgtaaatctttctggacagccatgactgtagcaaggcttgatagcagaggtttggtggttcagagttatacaactaatcccaggtgattttatcaattccagtgttaccatctcctgagttttggtttgtaatcttttgtccctcccacccccacagaagatttctaagtagggtgactttttaaataaaaatttattgaataattartgataaaacataataataaacataaataataaacaaaattaccgagaaccccatccccatataacaccaacagtgtacatgtttactgtcacttttgatatggtcttatccagtgtgaacagcaatttattatttttgctcatcaaaaaataaaggattttcttcttcacttgatgaatgagtcttttgttacttctttttgggctctccatttgggaaagaaaatctagaaagtatgctcattgtaattgaaattgtattataattgcaagtcagctatactgtcatcttgtattattctgttaaaagcgattgtgaaaacttgaactccatgttaggatgacttatttagtcaagaggagctctttatcactattaagggagtttattaatgtctagtttaaaaaataacaatttataattttcatagatttttgtggactcctacctatatcgctaaggaatcattcagctaataacataagcaaaatgccttcattctctatcagaatgctttttatttctgccatctacccaacctcggcctacaaggaccacactggctctgggatgttagtcgtcacagtgaatccctagaaggagagaagcccagggctcttaagagagaaacctcacacttca

SEQ ID NO: 1143 - DNA, 2847 bp, Homo sapiens
gctgatagcacagttctgtccagagaaggaaggcagaataaacttattcattcccaggaactcttggggtaggtgtgtgtttttcacatcttaaaggctcacagaccctgcgctggacaaatgttccattcctgaaggacctctccagaatccggattgctgaatcttccctgttgcctagaagggctccaaaccacctcttgacaatgggaaactgggtggttaaccactggttttcagttttgtttctggttgtttggttagggctgaatgttttcctgtttgtggatgccttcctgaaatatgagaaggccgacaaatactactacacaagaaaaatccttgggtcaacattggcctgtgcccgagcgtctgctctctgcttgaattttaacagcacgctgatcctgcttcctgtgtgtcgcaatctgctgtccttcctgaggggcacctgctcattttgcagccgcacactgagaaagcaattggatcacaacctcaccttccacaagctggtggcctatatgatctgcctacatacagctattcacatcattgcacacctgtttaactttgactgctatagcagaagccgacaggccacagatggctcccttgcctccattctctccagcctatctcatgatgagaaaaaggggggttcttggctaaatcccatccagtcccgaaacacgacagtggagtatgtgacattcaccagcattgctggtctcactggagtgatcatgacaatagccttgattctcatggtaacttcagctactgagttcatccggaggagttattttgaagtcttctggtatactcaccacctttttatcttctatatccttggcttagggattcacggcattggtggaattgtccggggtcaaacagaggagagcatgaatgagagtcatcctcrcaagtgtgcagagtcttttgagatgtgggatgatcgtgactcycactgtaggcgccctaagtttgaagggcatccccctgagtcttggaagtggatccttgcaccggtcattctttatatctgtgaaaggatcctccggttttaccgctcccagcagaaggttgtgattaccaaggttgttatgcacccatccaaagttttggaattgcagatgaacaagcrtggcttcagcatggaagtggggcagtatatctttgttaattgcccctcaatctctctcctggaatggcatccttttactttgacctctgctccagaggaagatttcttctccattcatatccgagcagcagggractggacagaaaatctcataagggctttcgaacaacaatattcaccaattcccaggattgaagtggatggtccctttggcacagccagtgaggatgttttccagtatgaagtggctgtgctggttggagcaggaattggggtcaccccctttgcttctatcttgaaatccatctggtacaaattccagtgtgcagaccacaacctcaaaacaaaaaaggttggtcatgcagcattaaactttgacaaggccactgacatcgtgacaggtctgaaacagaaaacctcctttgggagaccaatgtgggacaatgagttttctacaatagctacctcccaccccaagtctgtagtgggagttttcttatgtggccctcggactttggcaaagagcctgcgcaaatgctgtcaccgatattccagtctggatcctagaaaggttcaattctacttcaacaaagaaaatttttgagttataggaataaggacggtaatctgcattttgtctctttgtatcttcagtaatttacttggtctcgtcaggtttgagcagtcactttaggataagaatgtgcctctcaagccttgactccctggtattctttttttgattgcattcaacttcgttacttgagcttcagcaacttaagaacttctgaagttcttaaagttctgaagttcttaaagcccatggatcctttctcagaaaaataactgtaaatctttctggacagccatgactgtagcaaggcttgatagcagaggtttggtggttcagagttatacaactaatcccaggtgattttatcaattccagtgttaccatctcctgagttttggtttgtaatcttttgtccctcccacccccacagaagatttctaagtagggtgactttttaaataaaaatttattgaataattartgataaaacataataataaacataaataataaacaaaattaccgagaaccccatccccatataacaccaacagtgtacatgtttactgtcacttttgatatggtcttatccagtgtgaacagcaatttattatttttgctcatcaaaaaataaaggattttcttcttcacttgatgaatgagtcttttgttacttctttttgggctctccatttgggaaagaaaatctagaaagtatgctcattgtaattgaaattgtattataattgcaagtcagctatactgtcatcttgtattattctgttaaaagcgattgtgaaaacttgaactccatgttaggatgacttatttagtcaagaggagctctttatcactattaagggagtttattaatgtctagtttaaaaaataacaatttataattttcatagatttttgtggactcctacctatatcgctaaggaatcattcagctaataacataagcaaaatgccttcattctctatcagaatgctttttatttctgccatctacccaacctcggcctacaaggaccacactggctctgggatgttagtcgtcacagtgaatccctagaaggagagaagcccagggctcttaagagagaaacctcacacttca

SEQ ID NO: 1144 - DNA, 4710 bp, Homo sapiens
gcaggagtcccgggctgccgctggcaacatcgtgtcacccagctaagaaaatccgcgggccggagccacgcgcctgtgaaccggagaggtcccactgcccgagtggagccgggctgagattcttctcaagttgagcctcagtgatcctgtggccgaagttagcgccttgacgtgggacaaccggacacgtcgccgggagagaactgaggcgccttctagcagttgtgacgccaaaatcacgtctctggagacccgcgccctccgccagccgggcgcaccctcggcgttagccttctttgtgcgccgtccggactcccagctcccggcccggcagccgagccccagcacaaagcagtcggaccgcgccgcccgcctcccggctcgtgcccccgcctcggttttccaactctgcgccgtcgggtcgcggcaggatggttgcctcgcatttgcttgcctacttcttcaaggagctcaaccatgaccaagtgcagaaggttgaccagtatctctaccacatgcacctctctgatgagaccctcttggagatctctaagcggttccgcaaggagatagagaaagggcttggatccaccactcaccccactgcagcagtgaagatgctgcccacctttgtgaggtccacttcagatgggacagaacacggagagttcctggctctggaccttggagggaccaacttccgtatgctttgggtgaaagtaacggacaatgggctccagaaggtggagatggagaaccagatctatgccatccccgaggacatcatgtgaggcagtgacaccgagctgtttgaccacattgtcgaatggctggctaacttcatggataagctacawatcaaagacaagaagctcccattgggttttaccttctcgttcccctgccgccagactaaactagacgagagtttcctggtctcatggaccaagggattcaagtccagtggagtggaaggcagagacgttgtggctctgatccggaaggccatccagaggagaggggactttgatatcgacattgtggctgtggtgaatgacacagttgggaccatgatgacctgtggttatgacgaccacaactgtgagattggtctcattgtgggcactggcagcaacgcctgctacatggaagagatgcgccacatcgagatggtagaaggcgaygaggggcagatgtgtatcaatatggagtggggggccttcggggacgatggctcgctcaatgacattcgcactgagtttgaccaggagattgacatgggctcactgaacctggggaagcaactgtttgagaaggtgatcagtgggatgtacatgggggagctgatgaggtttatcctggtgaagatggccaaggaggagctgctctttagggggaagctcagcccagagcttctcaacaccggtcactttgagaccaaagacatctcagacactgaaggggagaaggatggcatccggaaggccyrtgaggtcctgatgcggttgggcatggacccgactcaggaggactgygtggccactcaccggatctgtcagatcgtgtccacacactccgccagcctgtgckcagccaccctggcccccgtgctgcagcgcatcaaggagaacaaaggygaggagcagcttcgctctactattggggtcgacggttccgtctacaagaaacacccccattttgccaagcgtctacataagaccgtgtggmsgctggtgcccgactgctatgtctgcttcctccgctccgaggatggcagtggcaaaggtgcagccatggtgacagcagtggcttaccggctggccgatcaacaccgtgcccgccagaagacactagagcctctgcagctgagccatgaccagctgttggaggtcaagaggaggatgaaggtagaaatggagcraggtctgagcaaggagactcacgccagtgcccccgtcaagatgcttcccacctacgtgtgtgccacccctgacggcacagagaaaggggacttcttggccttggaccttggaggaacaaatttccgggtcctgctggtctgtattcggaatgggaagtggagtggagtggagatgcacaacaagatctatggcatcccgcaggaggtcatgcatggcaccggggacgagctctttgaccacattgtccagtgcatcgaggacttcctggagtacatgggcatgaagggcgtgtccctgcctctgggttttaccttctccttcccctgccagcagaacagcctggacgagagcatcctcctctagtggacaaaaggcttcaaggaatctggctgcgagggtgaggacgtggtgaccctgctgaaggaagcgatccactggcgagaggagtttgacctggatgtgattgctgtggtgaacgacacagtcagaactatgatgacctgtggctttgaagaccctcactgtgaagttggcctcatcggttggcatgggcagcaatgtctgctacatggaagagatgagcaaygtggaactggtggaaggagaagaggggcggatgtgtgtgaacatggaatggggggcctttggagacaatggatgcctagatgacttccacacagaatttgatgtggctgtggatgagctttcactcaacccsggcaagcagaggttcgagaaaatgatcaatggaatgtacctgggtgagattgtcggtaacattctcatcgatttcaccaagcgtgggctgctcttctgaggccacatctcagagctactcaagacaaggggcatctttgaaaccaagttcttgtctcagattgagagtgactgcctggccctgctgcaacacttagggcttgagagcacctgtgacgacagcatcattgttaaggaggtgtgcaccgtggtggcccggcgggcagcccagctctgtggtgcaggcatggcygctgtggtggacaagatacgagaaaaccgtgggctggacgctctcaaagtgacagtgggtgtggatgggaccctctacaagctacatcctcactttgccaaagtcatgcatgagacagtgaaggacctggctccgaaatgtgatgtgtctttcctgcagtcagaggatggcagcgggaagggggtggcgctcatcactgctgtgttctgccgcatccgtgaggctggacagcgatagaacccctgaaatcggaagggacttcctctttctctccctcctccctgttttaaattacaaggtgtcatccctttgtgtcagagacagaccccttggcttttccttggcagagaggaccccactggacagggttttgtctctgcatctcatcgtagagcttggtggccgagcttggccctattaagataaatacagttccaaataaggatttgttcacatgcgtcacaaccattcccattggttctcttaaaacatgaaaattgtcacccttagtaatccgccttgccaaattccacgtccctgtataattctacaggatggggacactaatgaagatgtggttgcttcaccttggagcctgaacatgacatttccaggtggggtgcatcccccagcactgacgttgttactgattctcctgtcagagatatgcgaggtctccactgaggacgtgagcctgattgtcctacaggcagacgtggggagggtggaggggcgacaatggagggaaatccatggatatccacgcagcagcccctctttaacctcatctacaagcatttgccctgtggattccagcatttgctattcctggaatcaaggaatcccaagtctgggcaatgaaaccaaagccaggagttgatgaattctgcagtcgggccagctgtcgcacctcagcggggtgcacatgttatccaccagcaatggacctttggggaggggggagtttttagtttgttttacaaatttttcctgcaaaagtggaaacactgtattttcattttaayttatatttgaaattttatttagttcttgaagtagatctgcttcttcatcttgacgtgtaatggtcagttgtacgtaatgtatttatatgttaatttgttatgtatacagatatgcaagtcttgtcagaattggcctcagtgtagttaaagggcggaagagaaagatactgactagtcatagaaatacctcattcgcctgtgggaagagaagagaagcctcttcagggtgagtgaatggcaaagtggttgcttctggctcctccttcccctgtggtcttggaagtgtgtggaaggcagggacagagatggaggctgagccaatagactgaagagaccacagcaattggctcctccatctagagattttcttggggcaacattccatgggatgttaagcaaaggaaaccaaaggaatcgtttcaaatggactcatggcttagaaatctttattcttagggcagtcagtagtattttaaagctttctgacaagataaaggaagtcgccaaaatttctttttttaagttgtatctaatcctcaacaacaaaccaaaacagaaaaattaaacaaccaaataaaacctcagggacaacatttttggtgtatttgtgccctcccagcaagtttcaccttgggtttgtattttaaatgttttacaagaattgttgtccatgtgcttccctaggctgagctggcattggtctgctaacctgtttttgtgttttttttttatacacaatatttatttcaaacta

SEQ ID NO: 1145 - DNA, 5544 bp, Homo sapiens
gcaggagtcccgggctgccgctggcaacatcgtgtcacccagctaagaaagtcccactgcccgagtggagccgggctgagattcttctcaagttgagcctcagtgatcctgtggccgaagttagcgccttgacgtgggacaaccggacacgtcgccgggagagaactgaggcgccttctagcagttgtgacgccaaaatcacgtctctggagacccgcgccctccgccagccgggcgcaccctcggcgttagccttctttgtgcgccgtccggactcccagctcccggcccggcagccgagccccagcacaaagcagtcggaccgcgccgcccgcctcccggctcgtgcccccgcctcggttttccaactctgcgccgtcgggtcgcggcaggatggttgcctcgcatttgcttgcctacttcttcaaggagctcaaccatgaccaagtgcagaaggttgaccagtatctctaccacatgcacctctctgatgagaccctcttggagatctctaagcggttccgcaaggagatagagaaagggcttggatccaccactcaccccactgcagcagtgaagatgctgcccacctttgtgaggtccacttcagatgggacagaacacggagagttcctggctctggaccttggagggaccaacttccgtatgctttgggtgaaagtaacggacaatgggctccagaaggtggagatggagaaccagatctatgccatccccgaggacatcatgtgaggcagtgacaccgagctgtttgaccacattgtcgaatggctggctaacttcatggataagctacawatcaaagacaagaagctcccattgggttttaccttctcgttcccctgccgccagactaaactagacgagagtttcctggtctcatggaccaagggattcaagtccagtggagtggaaggcagagacgttgtggctctgatccggaaggccatccagaggagaggggactttgatatcgacattgtggctgtggtgaatgacacagttgggaccatgatgacctgtggttatgacgaccacaactgtgagattggtctcattgtgggcactggcagcaacgcctgctacatggaagagatgcgccacatcgagatggtagaaggcgaygaggggcagatgtgtatcaatatggagtggggggccttcggggacgatggctcgctcaatgacattcgcactgagtttgaccaggagattgacatgggctcactgaacctggggaagcaactgtttgagaaggtgatcagtgggatgtacatgggggagctgatgaggtttatcctggtgaagatggccaaggaggagctgctctttagggggaagctcagcccagagcttctcaacaccggtcactttgagaccaaagacatctcagacactgaaggggagaaggatggcatccggaaggccyrtgaggtcctgatgcggttgggcatggacccgactcaggaggactgygtggccactcaccggatctgtcagatcgtgtccacacactccgccagcctgtgckcagccaccctggcccccgtgctgcagcgcatcaaggagaacaaaggygaggagcagcttcgctctactattggggtcgacggttccgtctacaagaaacacccccattttgccaagcgtctacataagaccgtgtggmsgctggtgcccgactgctatgtctgcttcctccgctccgaggatggcagtggcaaaggtgcagccatggtgacagcagtggcttaccggctggccgatcaacaccgtgcccgccagaagacactagagcctctgcagctgagccatgaccagctgttggaggtcaagaggaggatgaaggtagaaatggagcraggtctgagcaaggagactcacgccagtgcccccgtcaagatgcttcccacctacgtgtgtgccacccctgacggcacagagaaaggggacttcttggccttggaccttggaggaacaaatttccgggtcctgctggtctgtattcggaatgggaagtggagtggagtggagatgcacaacaagatctatggcatcccgcaggaggtcatgcatggcaccggggacgagctctttgaccacattgtccagtgcatcgaggacttcctggagtacatgggcatgaagggcgtgtccctgcctctgggttttaccttctccttcccctgccagcagaacagcctggacgagagcatcctcctctagtggacaaaaggcttcaaggaatctggctgcgagggtgaggacgtggtgaccctgctgaaggaagcgatccactggcgagaggagtttgacctggatgtgattgctgtggtgaacgacacagtcagaactatgatgacctgtggctttgaagaccctcactgtgaagttggcctcatcggttggcatgggcagcaatgtctgctacatggaagagatgagcaaygtggaactggtggaaggagaagaggggcggatgtgtgtgaacatggaatggggggcctttggagacaatggatgcctagatgacttccacacagaatttgatgtggctgtggatgagctttcactcaacccsggcaagcagaggttcgagaaaatgatcaatggaatgtacctgggtgagattgtcggtaacattctcatcgatttcaccaagcgtgggctgctcttctgaggccacatctcagagctactcaagacaaggggcatctttgaaaccaagttcttgtctcagattgagagtgactgcctggccctgctgcaacacttagggcttgagagcacctgtgacgacagcatcattgttaaggaggtgtgcaccgtggtggcccggcgggcagcccagctctgtggtgcaggcatggcygctgtggtggacaagatacgagaaaaccgtgggctggacgctctcaaagtgacagtgggtgtggatgggaccctctacaagctacatcctcactttgccaaagtcatgcatgagacagtgaaggacctggctccgaaatgtgatgtgtctttcctgcagtcagaggatggcagcgggaagggggtggcgctcatcactgctgtgttctgccgcatccgtgaggctggacagcgatagaacccctgaaatcggaagggacttcctctttctctccctcctccctgttttaaattacaaggtgtcatccctttgtgtcagagacagaccccttggcttttccttggcagagaggaccccactggacagggttttgtctctgcatctcatcgtagagcttggtggccgagcttggccctattaagataaatacagttccaaataaggatttgttcacatgcgtcacaaccattcccattggttctcttaaaacatgaaaattgtcacccttagtaatccgccttgccaaattccacgtccctgtataattctacaggatggggacactaatgaagatgtggttgcttcaccttggagcctgaacatgacatttccaggtggggtgcatcccccagcactgacgttgttactgattctcctgtcagagatatgcgaggtctccactgaggacgtgagcctgattgtcctacaggcagacgtggggagggtggaggggcgacaatggagggaaatccatggatatccacgcagcagcccctctttaacctcatctacaagcatttgccctgtggattccagcatttgctattcctggaatcaaggaatcccaagtctgggcaatgaaaccaaagccaggagttgatgaattctgcagtcgggccagctgtcgcacctcagcggggtgcacatgttatccaccagcaatggacctttggggaggggggagtttttagtttgttttacaaatttttcctgcaaaagtggaaacactgtattttcattttaayttatatttgaaattttatttagttcttgaagtagatctgcttcttcatcttgacgtgtaatggtcagttgtacgtaatgtatttatatgttaatttgttatgtatacagatatgcaagtcttgtcagaattggcctcagtgtagttaaagggcggaagagaaagatactgactagtcatagaaatacctcattcgcctgtgggaagagaagagaagcctcttcagggtgagtgaatggcaaagtggttgcttctggctcctccttcccctgtggtcttggaagtgtgtggaaggcagggacagagatggaggctgagccaatagactgaagagaccacagcaattggctcctccatctagagattttcttggggcaacattccatgggatgttaagcaaaggaaaccaaaggaatcgtttcaaatggactcatggcttagaaatctttattcttagggcagtcagtagtattttaaagctttctgacaagataaaggaagtcgccaaaatttctttttttaagttgtatctaatcctcaacaacaaaccaaaacagaaaaattaaacaaccaaataaaacctcagggacaacatttttggtgtatttgtgccctcccagcaagtttcaccttgggtttgtattttaaatgttttacaagaattgttgtccatgtgcttccctaggctgagctggcattggtctgctaacctgtttttgtgttttttttttatacacaatatttatttcaatttattgggagggatgagagtggcttaaaaacttccatccctacttttcaagagtgcagttgattctgaatctgaaagcctgcctctgccctaaaatacgcaaaagcacagacattaaacctggatactatataatagagggatgtaactattgaattggatacaaggatcagaatggaaagaaactcacgatgaaattgcacccagtttttgtgtatctatcaaacttgtgctgggaatagtgtccgattatacaacttttacgcaaagttgggtgtaattaggtgaaaacggcccagctcctcctgggagcacagaggggagaggggctggtctttctcgtttattctagtcttgctttgctgtctggtgtagctcttctgctgctcccatctgcactaattgacccaaaatgtgggtgtctcctgctacacaaaagccaaaagctttcacgtagattttagttcactaaagggtgtccacaaaatagagattaattttaacttaaattttaagcttgaagattaggtgctatctatgaagttacacttttttttttaaaggtagagatgtgtgtgtgtgtttgtgtaggtattaaagatgtgttgttggtttccaaaaaggaacactggaaataaattttgaatgtttgcgttctcagaatcaggttgacagtcccttgctgacatggctttgcttgtgtaaatacagtggatctcaatcttcggggtgtgatgaatagcaaatcatctcaaatccttgagcactcagtctagtgaagatgttgtcattatgtacaatacataactagtttaattaactatgtgatgttaactattattaataaattttaacattttccaaaataaataaaaa

SEQ ID NO: 1146 - DNA, 4797 bp, Homo sapiens
gcaggagtcccgggctgccgctggcaacatcgtgtcacccagctaagaaaatccgcgggccggagccacgcgcctgtgaaccggagaggtcccactgcccgagtggagccgggctgagattcttctcaagttgagcctcagtgatcctgtggccgaagttagcgccttgacgtgggacaaccggacacgtcgccgggagagaactgaggcgccttctagcagttgtgacgccaaaatcacgtctctggagacccgcgccctccgccagccgggcgcaccctcggcgttagccttctttgtgcgccgtccggactcccagctcccggcccggcagccgagccccagcacaaagcagtcggaccgcgccgcccgcctcccggctcgtgcccccgcctcggttttccaactctgcgccgtcgggtcgcggcaggatggttgcctcgcatttgcttgcctacttcttcaaggagctcaaccatgaccaagtgcagaaggttgaccagtatctctaccacatgcacctctctgatgagaccctcttggagatctctaagcggttccgcaaggagatagagaaagggcttggatccaccactcaccccactgcagcagtgaagatgctgcccacctttgtgaggtccacttcagatgggacagaacacggagagttcctggctctggaccttggagggaccaacttccgtatgctttgggtgaaagtaacggacaatgggctccagaaggtggagatggagaaccagatctatgccatccccgaggacatcatgtgaggcagtgacaccgagctgtttgaccacattgtcgaatggctggctaacttcatggataagctacawatcaaagacaagaagctcccattgggttttaccttctcgttcccctgccgccagactaaactagacgagagtttcctggtctcatggaccaagggattcaagtccagtggagtggaaggcagagacgttgtggctctgatccggaaggccatccagaggagaggggactttgatatcgacattgtggctgtggtgaatgacacagttgggaccatgatgacctgtggttatgacgaccacaactgtgagattggtctcattgtgggcactggcagcaacgcctgctacatggaagagatgcgccacatcgagatggtagaaggcgaygaggggcagatgtgtatcaatatggagtggggggccttcggggacgatggctcgctcaatgacattcgcactgagtttgaccaggagattgacatgggctcactgaacctggggaagcaactgtttgagaaggtgatcagtgggatgtacatgggggagctgatgaggtttatcctggtgaagatggccaaggaggagctgctctttagggggaagctcagcccagagcttctcaacaccggtcactttgagaccaaagacatctcagacactgaaggggagaaggatggcatccggaaggccyrtgaggtcctgatgcggttgggcatggacccgactcaggaggactgygtggccactcaccggatctgtcagatcgtgtccacacactccgccagcctgtgckcagccaccctggcccccgtgctgcagcgcatcaaggagaacaaaggygaggagcagcttcgctctactattggggtcgacggttccgtctacaagaaacacccccattttgccaagcgtctacataagaccgtgtggmsgctggtgcccgactgctatgtctgcttcctccgctccgaggatggcagtggcaaaggtgcagccatggtgacagcagtggcttaccggctggccgatcaacaccgtgcccgccagaagacactagagcctctgcagctgagccatgaccagctgttggaggtcaagaggaggatgaaggtagaaatggagcraggtctgagcaaggagactcacgccagtgcccccgtcaagatgcttcccacctacgtgtgtgccacccctgacggcacagagaaaggggacttcttggccttggaccttggaggaacaaatttccgggtcctgctggtctgtattcggaatgggaagtggagtggagtggagatgcacaacaagatctatggcatcccgcaggaggtcatgcatggcaccggggacgagctctttgaccacattgtccagtgcatcgaggacttcctggagtacatgggcatgaagggcgtgtccctgcctctgggttttaccttctccttcccctgccagcagaacagcctggacgagagcatcctcctctagtggacaaaaggcttcaaggaatctggctgcgagggtgaggacgtggtgaccctgctgaaggaagcgatccactggcgagaggagtttgacctggatgtgattgctgtggtgaacgacacagtcagaactatgatgacctgtggctttgaagaccctcactgtgaagttggcctcatcggttggcatgggcagcaatgtctgctacatggaagagatgagcaaygtggaactggtggaaggagaagaggggcggatgtgtgtgaacatggaatggggggcctttggagacaatggatgcctagatgacttccacacagaatttgatgtggctgtggatgagctttcactcaacccsggcaagcagaggttcgagaaaatgatcaatggaatgtacctgggtgagattgtcggtaacattctcatcgatttcaccaagcgtgggctgctcttctgaggccacatctcagagctactcaagacaaggggcatctttgaaaccaagttcttgtctcagattgagagtgactgcctggccctgctgcaacacttagggcttgagagcacctgtgacgacagcatcattgttaaggaggtgtgcaccgtggtggcccggcgggcagcccagctctgtggtgcaggcatggcygctgtggtggacaagatacgagaaaaccgtgggctggacgctctcaaagtgacagtgggtgtggatgggaccctctacaagctacatcctcactttgccaaagtcatgcatgagacagtgaaggacctggctccgaaatgtgatgtgtctttcctgcagtcagaggatggcagcgggaagggggtggcgctcatcactgctgtgttctgccgcatccgtgaggctggacagcgatagaacccctgaaatcggaagggacttcctctttctctccctcctccctgttttaaattacaaggtgtcatccctttgtgtcagagacagaccccttggcttttccttggcagagaggaccccactggacagggttttgtctctgcatctcatcgtagagcttggtggccgagcttggccctattaagataaatacagttccaaataaggatttgttcacatgcgtcacaaccattcccattggttctcttaaaacatgaaaattgtcacccttagtaatccgccttgccaaattccacgtccctgtataattctacaggatggggacactaatgaagatgtggttgcttcaccttggagcctgaacatgacatttccaggtggggtgcatcccccagcactgacgttgttactgattctcctgtcagagatatgcgaggtctccactgaggacgtgagcctgattgtcctacaggcagacgtggggagggtggaggggcgacaatggagggaaatccatggatatccacgcagcagcccctctttaacctcatctacaagcatttgccctgtggattccagcatttgctattcctggaatcaaggaatcccaagtctgggcaatgaaaccaaagccaggagttgatgaattctgcagtcgggccagctgtcgcacctcagcggggtgcacatgttatccaccagcaatggacctttggggaggggggagtttttagtttgttttacaaatttttcctgcaaaagtggaaacactgtattttcattttaayttatatttgaaattttatttagttcttgaagtagatctgcttcttcatcttgacgtgtaatggtcagttgtacgtaatgtatttatatgttaatttgttatgtatacagatatgcaagtcttgtcagaattggcctcagtgtagttaaagggcggaagagaaagatactgactagtcatagaaatacctcattcgcctgtgggaagagaagagaagcctcttcagggtgagtgaatggcaaagtggttgcttctggctcctccttcccctgtggtcttggaagtgtgtggaaggcagggacagagatggaggctgagccaatagactgaagagaccacagcaattggctcctccatctagagattttcttggggcaacattccatgggatgttaagcaaaggaaaccaaaggaatcgtttcaaatggactcatggcttagaaatctttattcttagggcagtcagtagtattttaaagctttctgacaagataaaggaagtcgccaaaatttctttttttaagttgtatctaatcctcaacaacaaaccaaaacagaaaaattaaacaaccaaataaaacctcagggacaacatttttggtgtatttgtgccctcccagcaagtttcaccttgggtttgtattttaaatgttttacaagaattgttgtccatgtgcttccctaggctgagctggcattggtctgctaacctgtttttgtgttttttttttatacacaatatttatttcaaactattattgggagggatgagagtggcttaaaaacttccatccctacttttcaagagtgcagttgattctgaatctgaaagcctgcctctg

SEQ ID NO: 1147 - DNA, 1181 bp, Homo sapiens
gcggccgcggcgagcggcgctgcccgggccgggcgcgcacggcgggcgccctgtgagcggccccgatgtggcaggaggcgatgcggcgccgccgctacctgcgggaccgctccgaggaggcggcgggcggcggagacgggctgccgcggtcccgggactggctctacgagtcctactactgcatgagccagcagcacccgctcatcgtcttcctgctgctcatcgtcatgggctcctgcctcgccctgctcgccgtcttcttcgcgctcgggctggaagttgaagaccatgtggcgtttctaataacagttccaactgccctggcgattttctttgcgatatttatcctggtctgcatcgagtctgtgtttaagaagctgctgcgcctcttctcgttggtgatatggatatgccttgttgccatgggatacctgttcatgtgttttggaggcaccgtctctccctgggaccaggtatcgttcttcctcttcatcatcttcgtgktgtacaccatgctgcccttcaacatgcgagacgccatcattgccagcrtcctcacctcctcctcccacaccatcgtgcttagcgtctgcctgtctgcaacaccgggaggcaaggagcacctggtctggcagatcctggccaatgtgatcattttcatctgtgggaacctggcgggagcctaccataagcacctcatggaactcgctcttcagcaaacatatcaggacacctgtaattgcatcaagtcgcggatcaagttggaatttgaaaaacgtcaacaggcaaaagaatcagcacatatcagtgcatgtcatgttataaccatattccagggaagaactgctatccagagcwtgagagtttcaaggttgggcagtttaactacaagcacaatcctcattataaatatggaaaaagcaaaaaggctaggagcttctcctccagggcaggaaccaatgattggaggaacaaaagtgcatttgagagaaagaaaacacactcctggcatgaggcatgatgccaatgatgaaagaaacaaaacacactcccagcatgaggccaatgtgtgtaagtgccttgcagaagtcttagcacagactcttcctgtgactctgccagtccaggatcactggaatgcagcagccatttcagcagccaccagagagttggatcccgga

SEQ ID NO: 1148 - DNA, 4001 bp, Homo sapiens
gcggccgcggcgagcggcgctgcccgggccgggcgcgcacggcgggcgccctgtgagcggccccgatgtggcaggaggcgatgcggcgccgccgctacctgcgggaccgctccgaggaggcggcgggcggcggagacgggctgccgcggtcccgggactggctctacgagtcctactactgcatgagccagcagcacccgctcatcgtcttcctgctgctcatcgtcatgggctcctgcctcgccctgctcgccgtcttcttcgcgctcgggctggaagttgaagaccatgtggcgtttctaataacagttccaactgccctggcgattttctttgcgatatttatcctggtctgcatcgagtctgtgtttaagaagctgctgcgcctcttctcgttggtgatatggatatgccttgttgccatgggatacctgttcatgtgttttggaggcaccgtctctccctgggaccaggtatcgttcttcctcttcatcatcttcgtgktgtacaccatgctgcccttcaacatgcgagacgccatcattgccagcrtcctcacctcctcctcccacaccatcgtgcttagcgtctgcctgtctgcaacaccgggaggcaaggagcacctggtctggcagatcctggccaatgtgatcattttcatctgtgggaacctggcgggagcctaccataagcacctcatggaactcgctcttcagcaaacatatcaggacacctgtaattgcatcaagtcgcggatcaagttggaatttgaaaaacgtcaacaggagcggcttctgctctccctgctgccggcccacatcgccatggagatgaaagcggagatcatccagagrctgcagggccccaaggcgggccagatggagaacacaaataacttccacaacctgtatgtgaagcggcatacaaacgtgagcatcttatacgctgacatcgttggctttacccggctggcaagtgactgctccccgggagaactagtccacatgctgaatgagctctttggaaagtttgatcaaattgcaaaggagaatgaatgcatgagaattaaaattttaggagactgctactactgtgtatctggactccctatatctctccctaaccatgccaagaactgtgtgaaaatggggctggacatgtgtgaagccataaagaaagtgagggatgctactggagttgatatcaacatgcgcgtgggygtgcattctgggaatgtcctgtgtggcgtgattggtctgcagaagtggcaatatgatgtgtggtcacatgatgtgaccttggccaaccacatggaagctggaggggtccctggacgtgttcacatttcttctgtcaccctggagcacttgaatggcgcttataaagtggaggagggagatggtgacattagggacccatatttaaaacagcayctggtgaaaacctactttgtgatcaaccccaagggagaacgacggagcccccagcatctcttcagacctcgccacacccttgatggagccaaaatgagggcctcggtccgcatgacccggtacttggagtcctggggggcagccaagccctttgcacacctacatcacagggacagcatgaccacagagaacggcaagatcagcaccacggatgtacccatgggtcagcataattttcaaaatcgcaccttaagaaccaagtcacaaaagaagagatttgaagaagaattgaatgaaaggatgattcaagcaattgatgggattaatgcacagaagcaatggctcaagtctgaagacattcagagaatctcactgcttttctataacaaagtactagaaaaagagtaccgggccacggcactgccagcgttcaagtattatgtgacttgtgcctgtctcatattcttctgcatcttcattgtgcagattctcgtgctgccaaaaacgtccgtcctgggcatctcctttggggctgcgtttctcttgctggccttcatcctcttcgtctgctttgctggacagcttctgcaatgcagcaaaaaagcctctcccctgctcatgtggcttttgaagtcctcgggcatcattgccaaccgcccctggccacggatctctctcacgatcatcaccacagccatcatattaatgatggccgtgttcaacatgtttttcctgagtgactcagaggaaacaatccctccaactgccaacacaacaaacacaagcttttcagcctcaaataatcaggtggcgattctgcgtgcgcagaatttatttttcctcccgtactttatctacagctgcattctgggactgatatcctgttccgtgttcctgcgggtaaactatgagctgaagatgttgatcatgatggtggccttggtgggctacaacaccatcctactscacacccacgcccacgtcctgggcgactacagccaggtcttatttgagagaccaggcatttggaaagacctgaagaccatgggctctgtgtctctctctatattcttcatcacactgcttgttctgggtagacagaatgaatattactgtaggttagacttcttatggaagaacaaattcaaaaaagagcgggaggagatagagaccatggagaacctgaaccgcgtgctgctggagaacgtgcttcccgcgcacgtggctgagcacttcctggccaggagcctgaagaatgaggagctataccaccagtcctatgactgcrtctgygtcatgtttgcctccattccggatttcaaagaattttatacagaatccgaygtgaacaaggagggcttggaatgccttcggctcctgaacgagatcatcgctgactttgatgatcttctttccaagccaaaattcagtggagttgaaaagattaagaccattggcagcacatacatggcagcaacaggtctgagcgctgtgcccagccaggagcactcccaggagcccgagcggcagtacatgcacattggcaccatggtggagtttgcttttgccctggtagggaagctggatgccatcaacaagcactccttcaacgacttcaaattgcgagtgggtattaaccatggacctgtgatagctggtgtgattggagctcagaagccacaatatgatatctggggcaacactgtcaatgtggccagtaggatggacagcaccggagtcctggacaaaatacaggttaccgaggagacgagcctcgtcctgcagaccctcggatacacgtgcacctgtcgaggaataatcaacgtgaaaggaaagggggacctgaagacgtactttgtaaacacagaaatgtcaaggtccctttcccagagcaacgtggcatcctgaagagtcaccttcattttggcaagaagactgtattttcaggaaggtatcacacactttctgactgcaacttctgtcccttgtttttgatgtgcgtgctgtctgtcctatggagcctctgcagactcgttctcgtgacccagtggcataccgtttggtgtctgatgtgtgcccagatcgttctgccacttgcactgtgcttgctcctaagcaaaagggaaaaggagcgcgcgtgatagaagaaaagcactgggagaactaacagaggagaaaggtgaaacacacacacattcttaaggcaataaaactagggggtgtatattatcttctggtgcatgttcttttctggaaaatatggtagctcgccaaccgcatctgctcatctgatattcaaacacacagtattcgtgaataagttgattctgtcccccacgtggactctgtgctcacccattgtctcattgccagtggtgtccaagggcccccgttgggacccacggctctcgtccctctgctccgtgtgtctcatgccagcagcacgtcgccatccgtcaccagaattagtcctcacagcctaggaccagttttgtatcaaactcgtctgatgttttgatgccatttgtcttttgtaaagttaattcattaaaagttttatgtactttg

SEQ ID NO: 1149 - DNA, 369 bp, Homo sapiens
atgtctatagctaatggcgagtccagttggaacaaggaggatgttggaatgtttttagagatgcatttggtatcgttcttcctcttcatcatcttcgtgktgtacaccatgctgcccttcaacatgcgagacgccatcattgccagcrtcctcacctcctcctcccacaccatcgtgcttagcgtctgcctgtctgcaacaccgggaggcaaggagcacctggtctggcagactttccctgctgaagattatccagacctttatggggtggaagtcctatattgcagacatgggggtgcccccagtggaacacatttccaccctcagaccaatcgtgtagggcagatttggccattacagtaytggaga

SEQ ID NO: 1150 - DNA, 1341 bp, Homo sapiens
atgcggcgccgccgctacctgcgggaccgctccgaggaggcggcgggcggcggagacgggctgccgcggtcccgggactggctctacgagtcctactactgcatgagccagcagcacccgctcatcgtcttcctgctgctcatcgtcatgggctcctgcctcgccctgctcgccgtcttcttcgcgctcgggctggagccagatgcaagtgagagtcgggtagacacagaagttgaagaccatgtggcgtttctaataacagttccaactgccctggcgattttctttgcgatatttatcctggtctgcatcgagtctgtgtttaagaagctgctgcgcctcttctcgttggtgatatggatatgccttgttgccatgggatacctgttcatgtgttttggaggcaccgtctctccctgggaccagacccttcctacttctgtgacactgattttccctccacatggtcacaagctattgaaggggtggcttcggatacctgctgaaaaacccacattcattcattttgcaccttttgaggctctggrcctcaggaaaacctcatcaggtgcaaagggcactggaagggcattcactaggatgccacacagggttcaatccagccactcgccagcttctccctgtgcggtgccagccatgggtcctgtgacctcccttgaagcctgcccagtgctgctcactgtctcgagagccccagacctatgtgtgcagctctcagggcatctggaagagcctcctagggaaggcaacacaagggcgcaacaaggaggagatctagagctgccagcactggcttccaccctctgtaacggctttgaggtcatggctccttttgccatctctaaagagtgtgacccaaatgaggaatggccatgggaggctcaccaggcgcagaatttaggagagaaaagctttgccaagagtgaagacattgtggaagagtccagggcacttcatgtcatggatgaggatggagaagagcaggaggagctaagctggctgcaagttttgaatgtggcagagaggagaaatgggagacacaggtgggagggagtgaaggagtttaccactctacaggtgaagaattccggggaaaaattcatggtggttgaaacgagaaagagaatgaatttgattgaaagattaaaaatgtttcttggagacagtggtttcaaaggtgggataggatcacaggaagaaaggacaaatgctggaggaagtaacagcaacagccaagctacaaagaaagcaatgggggatgacttaggggacaggtcctatgttctccattttggctgctgtgttttggtgcatcttatr

SEQ ID NO: 1151 - DNA, 889 bp, Homo sapiens
gtggccgatagctggtcctctttctccaacacctagcctgagacttggcggcgcggctgctatcctgaactagcttggtaagtgttgtgtcccgaaccagcgtagagagacctcggaccagccgccttgatgacagcatccgcgtcctccttttcatcatctcagggtgtccagcagccctccatctacagcttctcccaaataaccagaagcttgtttctcagcaatggtgtggccgccaacgacaaactccttctgtccagcaatcgcatcaccgccattgtcaatgcctcggtggaagtggtcaacgtattcttcgagggcattcagtacataaaggtgcctgttaccgatgctcgtgactcgcgtctctacgacttttttgaccccattgctgatcttatccacaccatcgatatgaggcagggccgtacgctgctgcactgcatggctggagtgagccgttccgcctcactgtgccttgcgtacctcatgaaataccactccatgtcgctgctggacgcccatacatggaccaagtcgcgccgccccatcatccggcccaacaacggcttttgggaacagctcatcaattacgaattcaagctgtttaataacaayaccgtgcgcatgatcaactcgccggtaggtaacatccctgacatctatgagaaggacctacgtaygatgatatcaatgtaagccatcccggccagcccctgacatctgccatcgatcttgcaccaagactgaacttgaacactgacattttgttagtaaagaaaaccggatggtgccttgttaaagggcaagaaaaaagggagggggttggagttttgaacgtagtaagccttaccttaatagaattaaattcatgaaacataagata

SEQ ID NO: 1152 - DNA, 1592 bp, Homo sapiens
atgctctccgtccgcgtcccgctgctgcacattacggacccgcagcagctgcagctctcgccgctgaaggggctcagcctggtcgacaaggtgaacaggccgccggccctgagcgggacccgggttctggccagcaagactgcatggaggatcttccaggagcccgcgagccgaaaactaaagcagctgcccccggcgtggaggatgagccgctgctgagaggaaacccttgccgctttgtcatcttccccatcgagtaccatgatatctggcagatgtatgagaaggcggaggcttccttctggaccaccgaggaggtggacctgtccaaggacattcggcactgggaatccctgaagcccgaggagagatattttatatcccatgttctggttttctttgcagcaagtgatggcataataaatgaaaatttggtggagcgatttagccaaatagttcagattacagaagcccgctgtttctatggcttccaaattgccatggaaaacatacattctgaaatgtatagtctccttattgacacttacatcaaagatcccaaagaaagggaatttctcttcaatgccattgaacgatgccttgtgtcaagaagaaggcagattgggccttgcgctggattggggacaaagaggctacctatggtgaacgtgttgtagcctttgctgcagtagaaggcatcttcttttctggttcttttgcatcgatattctggctcaagaaacgaggaccgatgcctggcctcacgttttccaatgaacttattagcagagaagagggtttacactgtgattttgcttgcttgatgttcaaacacctggtacacaaaccatcggaggagaaagtgagagaaataattatcaatgctgttcagatagaacaagaattcctcaccgaggccttgcctgtgaagctcattgggatgaattgcactctaatgaagcaatacattgagtttgtggcagacagacttatgctggaactgggttttagcaaggttttcggagtagagagcccatttgactttacggagaatatttcactgaaagactaacttctttgagaggagagtaggcgagtatcagaggatgggagtggtgtcaagtccaaaagagaattcttttaccttaaatgctgacttctaaatgaactgaagatgtgcccttattttgctgatttttttccatctcataaaaaaaatcagctgaagtattatcaactagccacaccatgaattgtccataatgttcattaacagcatctttaaaactgtgtagctacctcacaaccagtcctgtttatttataatgctggtagtatcaccttttgccagcaggcctggctggctgtgacttactatagcagtgacaatggcagtcttggctttaaagtgagggttgaccctctagtgagcttggcacagcaggattaaacagtcatttaaccagcacagggagttgaaagttgaaagatgcagcctcactgcttcagcgcagatttcaatgtttacttaaatataaaactggcactttacaaacaaataaacattgtttgtactcacaaggcgataatag

SEQ ID NO: 1153 - DNA, 1565 bp, Homo sapiens
ggagcggcagcggcggccaggcacggcgcgaggcgacgccacaggacagcggcggcagcaggaaatgcagcggcggcmgcagcagcagcaaaacggatcggtggagaggcgccgccgccgccgggccgggcgtcgcgcrccgaggctcggggggagtcgtcgcagccgccgccaccgctaccgcagccgccgccgccgccgccgcccaggtgactgaggagagaggcacctcctcgctcccgccgccgccggacttcaatgcccagtccccagctcgccagcgtttttcgttggaatatacgttgcacatttatggcgattctgaatgtgagagcagatttctgccaggctgagcacagcgttttcgctgacaagtgagcttggaggttctatgtgccataattaacattgccttgaagacttctggacaccgagactggcctcagaaatagttggcagctttttttttttaattgcaagcatatttctttgaatgactccagtaaaattaagcatcaagtaaacaagtggaaagtgacctacacttttaacttgtctcactagtgcctaaatgtagtaaaggctgcttcagttttgtatgtagttgggttttttggagtccgaaggtatccatctgcagaaattgaggcccaaattgaatttggattcaagtggattctaaatactttgcttatcttgaagagagaagcttcataaggaataaacaagttgaatagagaaaacactgattgataataggcattttcatggtctttttaatgttttctgttgttaaacatttcaagatttattgattttttttttcactttccccatcacactcacaggcacgctcacactttttatttgccgtaatgaaccgtctagcccctgtggagatctcctatgagaacatgtgttttctgataactcacaacccwaccaatgctactctcaacaagttcacagaggaacttaagaagtatggagtgacgacttcggtttgagtttgtgatgctacatatgataaagctccagttgaaaaagaaggaatccacgttctagattggccatttgatgatggagctccatcccctaatcagatagtagatgattggttaaacctgttaaacaccaaatttcgtgaagagccaggttgctgtgttgcagtgcattgcgttgtggaattgggaagggcacctgtgctggttgcacttgctttgattgaatgtggaatgaagtacgtagatgcagttcagtttataagacaaaaaagaaggggagtgttaaattccaaacagctgctttacttaagatgcgattacgcttcagagataccaatgggcattgctgtgttcagyagaaagaaatgtaaatgaaggctgacttgattgtggcatttagagggaactcctggtacctggaaatgtgaatctggactcttacctgtgtcatcaaagtagtgatggattcaatactcctcaaccactctcctaatgatcagaacaaaagcaaacaagaaatctctctataaaatgaataaaatgtttaagaaaaaaaaagag

SEQ ID NO: 1154 - DNA, 1410 bp, Homo sapiens
ggagcggcagcggcggccaggcacggcgcgagccgccgccgccgccgccgcccaggtgactgaggagagaggcacctcctcgctcccgccgccgccggacttcaatgcccagtccccagctcgccagcgtttttcgttggaatatacgttgcacatttatggcgattctgaatgtgagagcagatttctgccaggctgagcacagcgttttcgctgacaagtgagcttggaggttctatgtgccataattaacattgccttgaagacttctggacaccgagactggcctcagaaatagttggctctttttttttttaattgcaagcatatttctttgaatgactccagtaaaattaagcatcaagtaaacaagtggaaagtgacctacacttttaacttgtctcactagtgcctaaatgtagtaaaggctgcttcagttttgtatgtagttgggttttttggagtccgaaggtatccatctgcagaaattgaggcccaaattgaatttggattcaagtggattctaaatactttgcttatcttgaagagagaagcttcataaggaataaacaagttgaatagagaaaacactgattgataataggcattttcatggtctttttaatgttttctgttgttaaacatttcaagatttattgattttttttttcactttccccatcacactcacaggcacgctcacactttttatttgccgtaatgaaccgtctagcccctgtggagatctcctatgagaacatgtgttttctgataactcacaacccwaccaatgctactctcaacaagttcacagaggaacttaagaagtatggagtgacgacttcggtttgagtttgtgatgctacatatgataaagctccagttgaaaaagaaggaatccacgttctagattggccatttgatgatggagctccatcccctaatcagatagtagatgattggttaaacctgttaaacaccaaatttcgtgaagagccaggttgctgtgttgcagtgcattgcgttgtggaattgggaagggcacctgtgctggttgcacttgctttgattgaatgtggagtgaagtacgtagatgcagttcagtttataagacaaaaaagaaggggagtgttaaattccaaacagctgctttacttaagatgcgattacgcttcagagataccaatgggcattgctgtgttcagyagaaagaaatgtaaatgaaggctgacttgattgtggcatttagagggaactcctggtacctggaaatgtgaatctggactcttacctgtgtcatcaaagtagtgatggattcaatactcctcaaccactctcctaatgatcagaacaaaagcaaacaagaaatctctctataaaatgaataaaatgtttaagaaaaaaaaagag

SEQ ID NO: 1155 - DNA, 1357 bp, Homo sapiens
ggagcggcagcggcggccaggcacggcgcgaggcgacgccacaggacagcggcggcagcaggaaatgcagcggcggcmgcagcagcagcaaaacggatcggtggagaggcgccgccgccgccgggccgggcgtcgcgcrccgaggctcggggggagtcgtcgcagccgccgccaccgctaccgcagccgccgccgccgccgccgcccaggtgactgaggagagaggcacctcctcgctcccgccgccgccggacttcaatgcccagtccccagctcgccagcgtttttcgttggaatatacgttgcacatttatggcgattctgaatgtgagagcagatttctgccaggctgagcacagcgttttcgctgacaagtgagcttggaggttctatgtgccataattaacattgccttgaagacttctggacaccgagactggcctcagaaatagttggcagctttttttttttaattgcaagcatatttctttgaatgactccagtaaaattaagcatcaagtaaacaagtggaaagtgacctacacttttaacttgtctcactagtgcctaaatgtagtaaaggctgcttcagttttgtatgtagttgggttttttggagtccgaaggtatccatctgcagaaattgaggcccaaattgaatttggattcaagtggattctaaatactttgcttatcttgaagagagaagcttcataaggaataaacaagttgaatagagaaaacactgattgataataggcattttcatggtctttttaatgttttctgttgttaaacatttcaagatttattgattttttttttcactttccccatcacactcacaggcacgctcacactttttatttgccgtaatgaaccgtctagcccctgtggagatctcctatgagaacatgtgttttctgataactcacaacccwaccaatgctactctcaacaagttcacagaggaacttaagaagtatggagtgacgacttcggtttgagtttgtgatgctacatatgataaagctccagttgaaaaagaaggaatccacgttaaaaaagaaggggagtgttaaattccaaacagctgctttacttaagatgcgattacgcttcagagataccaatgggcattgctgtgttcagyagaaagaaatgtaaatgaaggctgacttgattgtggcatttagagggaactcctggtacctggaaatgtgaatctggactcttacctgtgtcatcaaagtagtgatggattcaatactcctcaaccactctcctaatgatcagaacaaaagcaaacaagaaatctctctataaaatgaataaaatgtttaagaaaaaaaaagag

SEQ ID NO: 1156 - DNA, 1975 bp, Homo sapiens
tggtgccactccacccgcccgggtttccgcgccctgccgcgctgctccgacgccgcttccggcggggatgggagcgcgcaacgcggaagcgggcggcagaccggccgccggggcgaggcgggggaggggccgtgagtgccgcagtcggccagccatggagcggagcttgctggcggcgaggccgcggcgacaaggtagccacccccgcagcatgcctcgaccgcggtccgcagctgcaccgcctctccccgccccccagggtgcgctggtcccggtcgcgcgctcagacctccgcatcccgggcgtggtcggttaagtccccggccgtgacccaggcccggggagctagtctccgcccttcgctcttacggatcccctcggagtacgccgcaccatgcagctcaggctcttccggcgcctccttctcgccgctttgctgctggtgatcgtctggaccctcttcgggccttcggggttgggggaggagctgctgagcctctcactagcctccctgctcccagcccccgcctcaccggggccgcccctggccstkccccgcctcttgatccccaaccaggaagcttgcagtggtcccggggcccctcccttcctgctcatcctggtgtgcacggctccggagaacctgaaccagagaaacgccattcgggcttcgtggggcgggctgcgcgaggcccgggggctcagggtacagacgctattcttgctgggagagccgaacgcacagcaccccgtgtggggttcccaggggagtgacctggcctcggagtcagcagcccagggggatatcttgcaggccgccttccaggactcctaccgcaacctcaccctaaagaccctcagcgggctgaactgggctgagaaacactgccccatggcccgatacgtcctcaagacggacgatgatgtgtatgtcaacgtccctgaactggtatcagagctggtcttgcgagggggccgttgggggcaatgggagagaagcacggaaccccagagagaggctgagcaggaaggaggccaggttttgcacagcgaggaagtgcctctwctgtacttgggccgggtgcactggcgcgtgaacccctctcggacaccgsggggcaggcaccgcgtatcagaggagcagtggcctcacacctggggcccctttccaccctatgcctcaggcacggggtatgtgctgtcagcgtctgctgtgcagctcattctcaaggtggccagccgggcaccccttctcccattagaggatgtctttgtgggggtaagtgcccgacgaggaggcctcgccccaacacagtgtgtcaagctggctggtgccacccactacccgctagaccggtgctgctatgggaaattcctgctgacgtcccayaggctggacccctggaagatgcaggaagcctggaagctggtgggtggctctgayggggaaaggactgcgcccttttgctcctggttccagggagtcctgggcatcctgcggtgtcgagcaatagcctggcttcagagctgagagtgcctggggccacaggaaaggcaggaacaggaccttctctctcccaggcccaacgcaggggccctcactggctgcagctgatctgtttccttataccagatcctcagtctcactaaagacagcratatgggagacacccargggcctggcccgccagcccaaaagatggtcatcgggaagaraaaaagaaaaaaatgctgcagttgttctctcaagctagggcagaagaggggtgtcaagctcctcaataaacttgtctccacttcttcgagtgcagtgtggtcttcaccaggacccccagaacaccacaaacctggagagcccagaggctgccagaccctgctgcatgggaaggacatctccagggacatgggagagaggacagcctctctgaggaggaaggcccctaaaaggcaaagctaaggccacagcagccacaag

SEQ ID NO: 1157 - DNA, 786 bp, Homo sapiens
tgaactcatataaccctaatgtagacaatgcctcaggtaacaccacagctcaacaaacagacaaaatgacacacacgtctcactgcctttatttccaggaattagtggtgggcccttggaaaaccactacagactgaagcaatttcacttccactggggagcagtgaacgaggggggctcagagcacacagtggacggccacgcgtacccygcagagctgcatttagttcactggaattctgtgaaataccaaaattacaaggaagctgtcgtgggagagaatggtttggctgtgataggcgtgtttttaaagctcggggcccatcatcagacgctgcagaggctggtggacatcttgccggaaataaaacataaggacgcgcgggcggccatgcgccccttcgacccctccactctgctgcccacctgctgggattactggacctacgcgggctcgctcaccaccccgccgctgaccgagtcggtcacctggatcatccagaaggagcccgttgaagtggccccaagccagctctctgcatttcgtactctcctgttttctgcacttggtgaagaggagaagatgatggtgaacaactatcgcccacttcaacccttgatgaaccggaaggtctgggcgtccttccaggccactaatgagggcacaaggtcctagagacattaggtccacatgaatagcagaactgactttgaaggaaggaagcgttgtttcccaagtttcacaatgtgattgtacatgacttctgaaattaaaaagagagcatg

SEQ ID NO: 1158 - DNA, 1116 bp, Homo sapiens
ccagtccacagtggtcctgatcaaagtgagaacagacagcagggaacatcaccctcttcagactggagtcagtgggaacagacccaagatgttggggaggaacacttggaagacctcagctttctccttcttggttgagcagatgtgggcccctctctggagtcgttcgatgaggccagggcgatggtgttctcagcgttcctgtgcatggcaaaccagcaataacactttgcacccactctggacggtcccggtctccgtgccagggggcacccggcagtctcctattaacatccagtggagggacagcgtctatgacccccagctgaagccactcagggtctcctatgaagcggcatcctgcctgtacatctggaacactggctacctcttccaggtggaatttgacgatgccaccgaggcatcaggaattagtggtgggcccttggaaaaccactacagactgaagcaatttcacttccactggggagcagtgaacgaggggggctcagagcacacagtggacggccacgcgtacccygcagagctgcatttagttcactggaattctgtgaaataccaaaattacaaggaagctgtcgtgggagagaatggtttggctgtgataggcgtgtttttaaagctcggggcccatcatcagacgctgcagaggctggtggacatcttgccggaaataaaacataaggacgcgcgggcggccatgcgccccttcgacccctccactctgctgcccacctgctgggattactggacctacgcgggctcgctcaccaccccgccgctgaccgagtcggtcacctggatcatccagaaggagcccgttgaagtggccccaagccagctctctgcatttcgtactctcctgttttctgcacttggtgaagaggagaagatgatggtgaacaactatcgcccacttcaacccttgatgaaccggaaggtctgggcgtccttccaggccactaatgagggcacaaggtcctagagacattaggtccacatgaatagcagaactgactttgaaggaaggaagcgttgtttcccaagtttcacaatgtgattgtacatgacttctgaaattaaaaagagagcatg

SEQ ID NO: 1159 - DNA, 2952 bp, Homo sapiens
gattttcgtaaggaagcagcgtctgagccaggtttgaggcccaatattttctttccgtggccacgtgcagactggcccaggtgagagctgagaatcgcctcccagactcagtgttcctctcctgcctwatgattcgtgctgtttgacacgaagtggttgtcgttttgtgtctcatacgctgttgtgtatgatcccattctaatattgtgagggtaagtgcagggaattttgactccattctggatctactgaatttaattctctgggatttgaaagtagcacgtatgtttgcattaggcatttcgcattagacttaacgttaggtttggtagccaataacacaagaaaaggatataactccatagtgcgttaacccagaactaatcatttgggttaacagatttgtgatgtgtttctttgtagagttaaagaaagcaagtaaacgcatgacctgccataagcggtataaaatccaaaaaaaggttcgagaacatcatcgaaaattaagaaaggaggctaaaaagcrgggtcacaagaagcctaggaaagacccaggagttccaaacagtgctccctttaaggaggctcttcttagggaagctgagctaaggaaacagaggcttgaagaactaaaacagcagcagaaacttgacaggcagaaggaactagaaaagaaaagaaaacttgaaactaatcctgatattaagccatcaaatgtggaacctatggaaaaggagtttgggctttgcaaaactgagaacaaagccaagtcgggcaaacagaattcaaagaagctgtactgccaagaacttaaaaaggtgattgaagcctccgatgttgtcctagaggtgttggatgccagagatcctcttggttgcagatgtcctcaggtagaagaggccattgtccagagtggacagaaaaagctggtacttatattaaataaatcagatctggtaccaaaggagaatttggagagctggctaaattatttgaagaaagaattgccaacagtggtgttcagagcctcaacaaaaccaaaggataaagggaagawaaccaagcgtgtgaaggcaaagaagaatgctgctccattcagaagtgaagtctgctttgggaaagagggcctttggaaacttcttggaggttttcaggaaacttgcagcaaagccattcgggttggagtaattggtttcccaaatgtggggaaaagcagcattatcaatagcttaaaacaagaacagatgtgtaatgttggtgtatccatggggcttacaaggagcatgcaagttgtccccttggacaaacagatcacaatcatagatagtccgagcttcatcgtatctccacttaattcctcctctgcgcttgctctgcgaagtccagcaagtattgaagtagtaaaaccgatggaggctgccagtgccatcctttcccaggctgatgctcgacaggtagtactgaaatatactgtcccaggctacaggaattctctggaattttttactrtgcttgctcagagaagasgtatgcaccaaaaaggtggaatcccaaatgttgaaggtgctgccaaactgctgtggtctgagtggacaggtgcctcattagcttactattgccatccccctacatcttggactcctcctccatattttaatgagagtattgtggtagacatgaaaagyggcttcaatctggaagaactggaaaagaacaatgcacagagcataagagccatcaagggccctcatttggccaatascatccttttccagtcttccggtctgacaaatggaataatagaagaaaaggacatacatgargaattgccaaaacggaaagaaaggaagcaggaggagagggaggatgacaaagacagtgaccaggaaactgttgatgaagaagttgatgaaaacagctcaggcatgtttgctgcagaagagacaggggaggcactgtctgargagactacagcaggtgaacagtctacaaggtcttttatcttggataaaatcattgaagaggatgatgcttatgacttcagtacagattatgtgtaacagaacaatggctttttatgattttttttttaacattttaagcagactgctaaactgttctctgtataagttatggtatgcatgagctgtgtaaattttgtgaatatgtattatattaaaaccaggcaacttggaatccctaaattctgtaaaaagacaattcatctcattgtgagtggaagtagttatctggaataaaaaaagaagatacctattgaaaaatgtaagttttatttacagatcaggccacaggttacaaaattaaaaccaacagcagttttgaattatctgtaccagctagctgaactagccatatcagttcttctttccagtcattcagcattgtagtaagaaaacacttggtaaggcagatggagacatatttatagtctatagtctgtctgggaagctgactgccagacagggcagtttgtcatctttacctagctgacacatctttttccatggcttgctaccgataggcattgaagcctagcaactgttacttcccaygcatgctatcttccaggacttcctgagaaatgcttgcttacagttcaaattctgtttcactttatgtttgagatctcggtatatcttcggattaggttgaatttgcctgttgggtctggaatataccatttttcccaaacatcagtatatgaagcagtccttccccatggcttcaaatgtccattccaatggagtaacttggcagcctttacaaactgaggtgaatatcgttttccagcactggaaccttacatttgagacaaaaatagccacatcgttgcgccatgtgaaattgtgcagaaaacttacttaagggaaacaaagaatataccccatccctgaggatagttctttagataccaattctttactagcttat

SEQ ID NO: 1160 - DNA, 2715 bp, Homo sapiens
gcggccgccaagcgatccctgctccgcgcgacactgcgtgcccgcgcacgcagagaggcggtgacgcactttacggcggcagcgtaagtgcgtgacgctcgtcagtggcttcagttcacacgtggcgccagcggargcaggttgmtgtgtttgtgcttccttctacagccaatatgaaaaggcctaagttaaagaaagcaagtaaacgcatgacctgccataagcggtataaaatccaaaaaaaggttcgagaacatcatcgaaaattaagaaaggaggctaaaaagcrgggtcacaagaagcctaggaaagacccaggagttccaaacagtgctccctttaaggaggctcttcttagggaagctgagctaaggaaacagaggcttgaagaactaaaacagcagcagaaacttgacaggcagaaggaactagaaaagaaaagaaaacttgaaactaatcctgatattaagccatcaaatgtggaacctatggaaaaggagtttgggctttgcaaaactgagaacaaagccaagtcgggcaaacagaattcaaagaagctgtactgccaagaacttaaaaaggtgattgaagcctccgatgttgtcctagaggtgttggatgccagagatcctcttggttgcagatgtcctcaggtagaagaggccattgtccagagtggacagaaaaagctggtacttatattaaataaatcagatctggtaccaaaggagaatttggagagctggctaaattatttgaagaaagaattgccaacagtggtgttcagagcctcaacaaaaccaaaggataaagggaagawaaccaagcgtgtgaaggcaaagaagaatgctgctccattcagaagtgaagtctgctttgggaaagagggcctttggaaacttcttggaggttttcaggaaacttgcagcaaagccattcgggttggagtaattggtttcccaaatgtggggaaaagcagcattatcaatagcttaaaacaagaacagatgtgtaatgttggtgtatccatggggcttacaaggagcatgcaagttgtccccttggacaaacagatcacaatcatagatagtccgagcttcatcgtatctccacttaattcctcctctgcgcttgctctgcgaagtccagcaagtattgaagtagtaaaaccgatggaggctgccagtgccatcctttcccaggctgatgctcgacaggtagtactgaaatatactgtcccaggctacaggaattctctggaattttttactrtgcttgctcagagaagasgtatgcaccaaaaaggtggaatcccaaatgttgaaggtgctgccaaactgctgtggtctgagtggacaggtgcctcattagcttactattgccatccccctacatcttggactcctcctccatattttaatgagagtattgtggtagacatgaaaagyggcttcaatctggaagaactggaaaagaacaatgcacagagcataagagccatcaagggccctcatttggccaatascatccttttccagtcttccggtctgacaaatggaataatagaagaaaaggacatacatgargaattgccaaaacggaaagaaaggaagcaggaggagagggaggatgacaaagacagtgaccaggaaactgttgatgaagaagttgatgaaaacagctcaggcatgtttgctgcagaagagacaggggaggcactgtctgargagactacagcaggtgaacagtctacaaggtcttttatcttggataaaatcattgaagaggatgatgcttatgacttcagtacagattatgtgtaacagaacaatggctttttatgattttttttttaacattttaagcagactgctaaactgttctctgtataagttatggtatgcatgagctgtgtaaattttgtgaatatgtattatattaaaaccaggcaacttggaatccctaaattctgtaaaaagacaattcatctcattgtgagtggaagtagttatctggaataaaaaaagaagatacctattgaaaaatgtaagttttatttacagatcaggccacaggttacaaaattaaaaccaacagcagttttgaattatctgtaccagctagctgaactagccatatcagttcttctttccagtcattcagcattgtagtaagaaaacacttggtaaggcagatggagacatatttatagtctatagtctgtctgggaagctgactgccagacagggcagtttgtcatctttacctagctgacacatctttttccatggcttgctaccgataggcattgaagcctagcaactgttacttcccaygcatgctatcttccaggacttcctgagaaatgcttgcttacagttcaaattctgtttcactttatgtttgagatctcggtatatcttcggattaggttgaatttgcctgttgggtctggaatataccatttttcccaaacatcagtatatgaagcagtccttccccatggcttcaaatgtccattccaatggagtaacttggcagcctttacaaactgaggtgaatatcgttttccagcactggaaccttacatttgagacaaaaatagccacatcgttgcgccatgtgaaattgtgcagaaaacttacttaagggaaacaaagaatataccccatccctgaggatagttctttagataccaattctttactagcttat

SEQ ID NO: 1161 - DNA, 1732 bp, Homo sapiens
gctcggcccagcgtgcagggaacgcgggcggccagacaacgggctgggctccggggcctgcggcgcgggcgctgmgctggcagggcgggtcggggcgcgggctgcatccgcatctcctccatcgcctgcaggttaaaaactaatatttatatgayagaagaaaaagatgtcattccgtaaagtaaacatcatcatcttggtcctggctgttgctctcttcttactggttttgcaccataacttcctcagcttgagcagtttgttaaggaatgaggttacagattcaggaattgtrgggcctcaacctatagactttgtcccaaatgctctccgacatgcagtagatgggagacaagaggagattcctgtggtcatcgctgcatctgaagacaggcttgggggggccattgcagctataaacagcattcagcacaacactcgctccaatgtgattttctacattgttactctcaacaatacagcagaccatctccggtcctggctcaacagtgattccctgaaaagcatcagatacaaaattgtcaattttgaccctaaacttttggaaggaaaagtaaaggaggatcctgaccagggggaatccatgaaacctttaacctttgcaaggttctacttgccaattctggttcccagcgcaaagaaggccatatacatggatgatgatgtaattgtgcaaggtgatattcttgccctttacaatacagcactgaagccaggacatgcagctgcattttcagaagattgtgattcagcctctactaaagttgtcatccrtggagcaggaaaccagtacaattacattggctatcttgactataaaaaggaaagaattcgtaagctttccatgaaagccagcacttgctcatttaatcctggagtttttgttgcaaacctgacggaatggaaacgacagaatataactaaccaactggaaaaatggatgaaactcaatgtagaagagggactgtatagcagaaccctggctggtagcatcacaacacctcctctgcttatcgtattttatcaacagcactctaccatcgatcctatgtggaatgtccgccaccttggttccagtgctggaaaacgatattcacctcagtttgtaaaggctgccaagttactccattggaatggacatttgaagccatggggaaggactgcttcatatactgatgtttgggaaaaatggtatattccagacccaacaggcaaattcaacctaatccgaagatataccgagatctcaaacataaagtgaaacagaatttgaactgtaagcaagcatttctcaggaagtcctggaagatagcatgcrtgggaagtaacagttgctaggcttcaatgcctatcggtagcaagccatggaaaaagatgtgtcagctaggtaaagatgacaaactgccctgtctggcagtcagcttcccagacagactatagactataaatatgtctccatctgccttaccaagtgttttcttactacaatgctgaatgactggaaagaagaactgatatggctagttcagctagctggtacagataattcaaaactgctgttggttttaattttgtaacctgtggcctgatctgtaaataaaacttacatttttcaataggtatcttctttttttattccagataactacttccactcacaatgagatgaattgtctttttacagaatttagggattccaagttgcctggtt

SEQ ID NO: 1162 - DNA, 2137 bp, Homo sapiens
ggccgccttgtcgaggcatcgcgcgcccgtgaagtgttcgccgtcagtgctgttgggtgcctggagccgcgtcccccgtcccgaaaactgtccttgacagtacttgcgcggcccaacggccgccggcgcccccgcgtctccatggcgacggcctttttccctgcgaggaccccggcggcagggctgccccgcggcgcctgcttggcgcgacgctctagcggttaccgctgcgggctggctgggcgtagtggggctgcgcggctgccacggagctagagggcaagtgtgctcggcccagcgtgcagggaacgcgggcggccagacaacgggctgggctccggggcctgcggcgcgggcgctgmgctggcagggcgggtcggggcgcgggctgcatccgcatctcctccatcgcctgcagtaagggcggccgcggcgagcctttgaggggaacgacttgtcggagccctaaccaggggtrtctctgagcctggtgggatccccggagcgtcacatcactttccgatcacttcaaagtggttaaaaactaatatttatatgayagaagaaaaagatgtcattccgtaaagtaaacatcatcatcttggtcctggctgttgctctcttcttactggttttgcaccataacttcctcagcttgagcagtttgttaaggaatgaggttacagattcaggaattgtrgggcctcaacctatagactttgtcccaaatgctctccgacatgcagtagatgggagacaagaggagattcctgtggtcatcgctgcatctgaagacaggcttgggggggccattgcagctataaacagcattcagcacaacactcgctccaatgtgattttctacattgttactctcaacaatacagcagaccatctccggtcctggctcaacagtgattccctgaaaagcatcagatacaaaattgtcaattttgaccctaaacttttggaaggaaaagtaaaggaggatcctgaccagggggaatccatgaaacctttaacctttgcaaggttctacttgccaattctggttcccagcgcaaagaaggccatatacatggatgatgatgtaattgtgcaaggtgatattcttgccctttacaatacagcactgaagccaggacatgcagctgcattttcagaagattgtgattcagcctctactaaagttgtcatccrtggagcaggaaaccagtacaattacattggctatcttgactataaaaaggaaagaattcgtaagctttccatgaaagccagcacttgctcatttaatcctggagtttttgttgcaaacctgacggaatggaaacgacagaatataactaaccaactggaaaaatggatgaaactcaatgtagaagagggactgtatagcagaaccctggctggtagcatcacaacacctcctctgcttatcgtattttatcaacagcactctaccatcgatcctatgtggaatgtccgccaccttggttccagtgctggaaaacgatattcacctcagtttgtaaaggctgccaagttactccattggaatggacatttgaagccatggggaaggactgcttcatatactgatgtttgggaaaaatggtatattccagacccaacaggcaaattcaacctaatccgaagatataccgagatctcaaacataaagtgaaacagaatttgaactgtaagcaagcatttctcaggaagtcctggaagatagcatgcrtgggaagtaacagttgctaggcttcaatgcctatcggtagcaagccatggaaaaagatgtgtcagctaggtaaagatgacaaactgccctgtctggcagtcagcttcccagacagactatagactataaatatgtctccatctgccttaccaagtgttttcttactacaatgctgaatgactggaaagaagaactgatatggctagttcagctagctggtacagataattcaaaactgctgttggttttaattttgtaacctgtggcctgatctgtaaataaaacttacatttttcaataggtatcttctttttttattccagataactacttccactcacaatgagatgaattgtctttttacagaatttagggattccaagttgcctggtt

SEQ ID NO: 1163 - DNA, 3988 bp, Homo sapiens
gtcacgccgcggtgcgactgaggcgtggcgtctgctggggcacctgaaggagacttgggggcacccgcgtcgtgcctcctgggttgtgaggagtcgccgctgccgccactgcctgtgcttcatgaggaagatgctcgccgccgtctcccgcgtgctgtctggcgcttctcagaagccggcaagcagagtgctggtagcatcccgtaattttgcaaatgatgctacatttgaaattaagaaatgtgaccttcrccggctggaagaaggccctcctgtcacaacagtgctcaccagggaggatgggctcaaatactacaggatgatgcagactgyaygccgaatggagttgaaagcagatcagctgtataaacagaaaattattcgtggtttctgtcacttgtgtgatggtcaggaagcttgctgtgtgggcctggaggccggcatcaaccccacagacsatctcatcacagcctaccgggctcacggctttactttcaccyggggcctttccgtccgagaaattctcgcagagcttacaggacdaaaaggaggttgtgctaaagggaaaggaggatcgatgcacatgtatgccaagaacttctacgggggcartggcatcrtgggagcgcaggtgcccctgggcsctgggattgctctagcctgtaagtataatggaaaagatgaggtctgcctgactttatatggcgatggtgctrctaaccagggccagatattmgaagcttacaacatggcagctttgtggaaattmcyttgtattttcatctgtgagaataatcgctatggaatgggarmgtctgttgagagagcggcagccagcactgattactacaagagaggcgatttcattcctgggctgagagtggatggaatggmtatcctgtgcgtccgagaggcracraggtttgctgctgcctattgtagatctgggaaggggcccatcctgmtggagctgcagacttaccgttaccacggacacagtatgagtgaccctggagtcagttacydtacacgagaagaaattcaggaagtaagaagtaagagtraccytattatgcttctcaaggacaggatggtgaacagcaatcktgccagtgtggaagaactaaaggaaattgatgtggaagtgaggaaggagattgaggatgctgcccagtttsccacggccgatcctgagccacctttggaagagctgggctaccacatctactccagcgacccaccttttgaagttyrtggtgccaatcagtggatcaagtttaagtmagtcagttaaggggaggagaaggagaggttataccttcagggggctaccagacagtgttctcaacttggttaaggaggaagaaaacccagtcaatgaaattcaatgaaattcttggaaayttccattaagtgtgtagattgagcaggtagtaattgcatgcagtttgtacattagtgcattaaaagatgaattattgagtgcttaaagattatttttgacttaaaatagtatactttgaacaaatactctaattatgaaaaggaagaacaattccttgtatgcctgtttcccctgcccccagccacctttttgggaggagaccattatkgcrgggccccatcacagcaattctaccaaccatagcacccaccccgagcagcgctggtgctgcagcctgttcgcgctgaccatttctctacaagatacaatatttattatcaggcaagaggacagttccattttaaaataagacttttgtaatcattccaattttgtaatcatttcaaaggccacataacttagttttctctacttacacattcagtataaatatgaagctattttctgttcatatcaaacattaactacaaggcacattcgtatcagttttgtgtttctcaaattgaagtaccataccagttctgaggcagtgtcccagcttccatgtttgttaaataccccttgtttgtttcaccattccagcaagtgctgaagggtgtactttttttgagacagggtygggctctgttgcccaggctggagtgcagtggtgtgatcatggctcactgcagcctccacacctcctgggctcaagcaatcctcccacctcagcctcctgcatagctgggactacargtgaatttcctaatattccgggaggtcaaaaccaaggctcactgttttcacaatacacacagttctatgtttataaataacaggtttcaaaagaaactcaggacagtatttaaaacaagttcttaaactattaattgaacaatggcatttttaaatatgtaaacacagmggaattcgtgtatacactaacagaagctttaacaaaacatgtagcrtggtgggacactctgccacagcttagctgattggtatcaagccttgtctttggtttctgaggcctcctgagccyttctgtactgggagaccgcactccagagtctgcagaggagaccacccctgggaaacaaacacagctgtcttcagagtcagtgcttcaagccaacagagcttaaaactgcagtccctaatttaaaaacctaatgaaaataaaaacattctcctcacatatggaggtgacgctcgtgtcccagcagtagtaggacatggccttagaggtacgtacctgcagagagctggctatttcaaatgactcgggaacaagaaggcaggctgcagtttaaagaagggggtgggtccagcgtgcaggcacgcttgccatgtgcctccacccactcccagccaggcattaatggcaggagattggccagctcttctctgtcacattcctatttctgacttctgcctggctttcagtttctgccccaccttggctttttcccagcttgaacctaatagaactccagagtttggggggaggcccagccctttgttttctgctcttgaagcatattcacacataaaaagttgtattctcttatacaaactgttttgaggctcytaccgtagtcgaaggtatcttagatcttccttagtgatctcattaagaatatccgaaagtgtataaccctcttcaacaatctgaaacaaagatcagatccttaagagctgagcagctgtgtaacaacagcataagaatttctttgttgtaaatttaccttttcaattgtctttgcatcagctccttscagccgcaaccagtctataagctctttatctgttctctgcccgtaggggcctgctgggttctctgtaatacctgtaacgattggcaatttgttatatattagtctaaccataaaactcttcaaaagtaaccagttggattaataaatgattccagaatgtaaatgtgatgtgaaaaagagatgaattaaccctgtatcactgaaccacgctaatacgtattacacaattcataattctgagattcactttctagaaagcctcctcatctaggataccttcagttagtttggaatttgacatgttaggtctaccactttaaatgctyatccccacatctttcaaatgcctttccttaggaatcacatccctaactgcactggaaatcctacaaggaaataggttttagtgttgaggtcagagcttatctagtccacattccaagaggtagctctggagctcgtttctaagtggcccaaaacgaatgtcaggttgatggaggcatatttatttacttatgcagtaaactaccctttttaggtgtccaatgtgctatgaaggtggcagcacagatacagaaatgactgtcactcccaaaagtcctcatgtgccctttacaatcagtcccgtcacctccccattctgattctgtccctgtagttttgccttttctggaggaaaaggaatcatggtatgtggccttttgaatctttttttttttttttttttttgagacagggtttcactgtcactcaggccagagtgcagtggcatgacctcggctcactgcagcctcaacctcctgggctcaggtgatcctcccat

SEQ ID NO: 1164 - DNA, 3305 bp, Homo sapiens
gtcacgccgcggtgcgactgaggcgtggcgtctgctggggcacctgaaggagacttgggggcacccgcgtcgtgcctcctgggttgtgaggagtcgccgctgccgccactgcctgtgcttcatgaggaagatgctcgccgccgtctcccgcgtgctgtctggcgcttctcagaagccggcaagcagagtgctggtagcatcccgtaattttgcaaatgatgctacatttgaaattaagaaatgtgaccttcrccggctggaagaaggccctcctgtcacaacagtgctcaccagggaggatgggctcaaatactacaggatgatgcagactgyaygccgaatggagttgaaagcagatcagctgtataaacagaaaattattcgtggtttctgtcacttgtgtgatggtcaggaagcttgctgtgtgggcctggaggccggcatcaaccccacagacsatctcatcacagcctaccgggctcacggctttactttcaccyggggcctttccgtccgagaaattctcgcagagcttacaggacdaaaaggaggttgtgctaaagggaaaggaggatcgatgcacatgtatgccaagaacttctacgggggcartggcatcrtgggagcgcaggtgcccctgggcsctgggattgctctagcctgtaagtataatggaaaagatgaggtctgcctgactttatatggcgatggtgctrctaaccagggccagatattmgaagcttacaacatggcagctttgtggaaattmcyttgtattttcatctgtgagaataatcgctatggaatgggarmgtctgttgagagagcggcagccagcactgattactacaagagaggcgatttcattcctgggctgagagtggatggaatggmtatcctgtgcgtccgagaggcracraggtttgctgctgcctattgtagatctgggaaggggcccatcctgmtggagctgcagacttaccgttaccacggacacagtatgagtgaccctggagtcagttacydtacacgagaagaaattcaggaagtaagaagtaagagtraccytattatgcttctcaaggacaggatggtgaacagcaatcktgccagtgtggaagaactaaaggaaattgatgtggaagtgaggaaggagattgaggatgctgcccagtttsccacggccgatcctgagccacctttggaagagctgggctaccacatctactccagcgacccaccttttgaagttyrtggtgccaatcagtggatcaagtttaagtmagtcagttaaggggaggagaaggagaggttataccttcagggggctaccagacagtgttctcaacttggttaaggaggaagaaaacccagtcaatgaaattcaatgaaattcttggaaayttccattaagtgtgtagattgagcaggtagtaattgcatgcagtttgtacattagtgcattaaaagatgaattattgagtgcttaaagattatttttgacttaaaatagtatactttgaacaaatactctaattatgaaaaggaagaacaattccttgtatgcctgtttcccctgcccccagccacctttttgggaggagaccattatkgcrgggccccatcacagcaattctaccaaccatagcacccaccccgagcagcgctggtgctgcagcctgttcgcgctgaccatttctctacaagatacaatatttattatcaggcaagaggacagttccatttttgtaatcattccaattttgtaatcatttcaaaggccacataacttagttttctctacttacacattcagtataaatatgaagctattttctgttcatatcaaacattaactacaaggcacattcgtatcagttttgtgtttctcaaattgaagtaccataccagttctgaggcagtgtcccagcttccatgtttgttaaataccccttgtttgtttcaccattccagcaagtgctgaagggtgtactttttttgagacagggtygggctctgttgcccaggctggagtgcagtggtgtgatcatggctcactgcagcctccacacctcctgggctcaagcaatcctcccacctcagcctcctgcatagctgggactacargtgaatttcctaatattccgggaggtcaaaaccaaggctcactgttttcacaatacacacagttctatgtttataaataacaggtttcaaaagaaactcaggacagtatttaaaacaagttcttaaactattaattgaacaatggcatttttaaatatgtaaacacagmggaattcgtgtatacactaacagaagctttaacaaaacatgtagcrtggtgggacactctgccacagcttagctgattggtatcaagccttgtctttggtttctgaggcctcctgagccyttctgtactgggagaccgcactccagagtctgcagaggagaccacccctgggaaacaaacacagctgtcttcagagtcagtgcttcaagccaacagagcttaaaactgcagtccctaatttaaaaacctaatgaaaataaaaacattctcctcacatatggaggtgacgctcgtgtcccagcagtagtaggacatggccttagaggtacgtacctgcagagagctggctatttcaaatgactcgggaacaagaaggcaggctgcagtttaaagaagggggtgggtccagcgtgcaggcacgcttgccatgtgcctccacccactcccagccaggcattaatggcaggagattggccagctcttctctgtcacattcctatttctgacttctgcctggctttcagtttctgccccaccttggctttttcccagcttgaacctaatagaactccagagtttggggggaggcccagccctttgttttctgctcttgaagcatattcacacataaaaagttgtattctcttatacaaactgttttgaggctcytaccgtagtcgaaggtatcttagatcttccttagtgatctcattaagaatatccgaaagtgtataaccctcttcaacaatctgaaacaaagatcagatccttaagagctgagcagctgtgtaacaacagcataagaatttctttgttgtaaatttaccttttcaattgtctttgcatcagctccttscagccgcaaccagtctataagctctttatctgttctctgcccgtaggggcctgctgggttctctgtaatacctgtaacgattggcaatttgttatatattagtctaaccataaaactcttcaaaagtaaccagttggattaataaatgattcc

SEQ ID NO: 1165 - DNA, 3932 bp, Homo sapiens
cgactgcgttaactggagccaggctgagcgtcggcgccggggttcggtggcctctagtgagatctggaggatccaaggattctgtagctacaatgttgtcaagactttttcgaatgcatggcctctttgtggcctcccatccctgggaagtcatagtggggacagtgacactgaccatctgcatgatgtccatgaacatgtttactggtaacaataagatctgtggttggaattatgaatgtccaaagtttgaagaggatgttttgagcagtgacattataattctgacaataacacgatgcatagccatcctgtatatttacttccagttccagaatttacgtcaacttggatcaaaatatattttgggtattgctggccttttcacaattttctcaagttttgtattcagtacagttgtcattcacttcttagacaaagaattgacaggcttgaatgaagctttgccctttttcctacttttgattgacctttccagagcaagcacattagcaaagtttgccctcagttccaactcacaggatgaagtaagggaaaatattgctcgtggaatggcaattttaggtcctacgtttaccctcgatgctcttgttgaatgtcttgtgattggagttggtaccatgtcaggggtacgtcagcttgaaattatgtgctgctttggctgcatgtcagttcttgccaactacttcgtgttcatgactttcttcccagcttgtgtgtccttggtattagagctttctcgggaaagccgcgagggtcgtccaatttggcagctcagccattttgcccgagttttagaagaagaagaaaataagccgaatcctgtaactcagagggtcaagatgattatgtctctaggcttggttcttgttcatgctcacagtcgctggatagctgatccttctcctcaaaacagtacagcagatacttctaaggtttcattaggactggatgaaaatgtgtccaagagaattgaaccaagtgtttccctctggcagttttatctctctaaaatgatcagcatggatattgaacaagttattaccctaagtttagctctccttctggctgtcaagtacatcttctttgaacaaacagagacagaatctacactctcattaaaaaaccctatcacatctcctgtagtgacacaaaagaaagtcccagacaattgttgtagacgtgaacctatgctggtcagaaataaccagaaatgtgattcagtagaggaagagacagggataaaccgagaaagaaaagttgaggttataaaacccttagtggctgaaacagataccccaaacagagctacatttgtggttggtaactcctccttactcgatacttcatcagtactggtgacacaggaacctgaaattgaacttcccagggaacctcggcctaatgaagaatgtctacagatacttgggaatgcagagaaaggtgcaaaattccttagtgatgctgagatcatccagttagtcaatgctaagcatatcccagcctacaagttggaaactctgatggaaactcatgagcgtggtgtatctattcgccgacagttactttccaagaagctttcagaaccttcttctctccagtacctaccttacagggattataattactccttggtgatgggagcttgttgtgagaatgttattggatatatgcccatccctgttggagtggcaggrcccctttgcttagatgaaaaagaatttcaggttccaatggcaacaacagaaggttgtcttgtggccagcaccaatagaggctgcagagcaataggtcttggtggaggtgccagcagccgagtccttgcagatgggatgactcgtggcccagttgtgcgtcttccacgtgcttgtgactctgcagaagtgaaagcstgsctcgaaacatctgaagggttcgcagtgataaaggaggcatttgacagcactagcagatttgcacgtctacagaaacttcatacaagtrtagctggacgcaacctttatatccgtttccagtccaggtcaggggatgccatggggatgaacatgatttcaaagggtacagagaaagcactttcaaaacttcacgagtatttccctgaaatgcagattctagccgttagtggtaactattgtactgacaagaaacctgctgctataaattggatagagggaagaggaaaatctgttgtttgtgaagctgtcattccagccaaggttgtcagagaagtattaaagactaccacagaggctatgattgaggtcaacattaacaagaatttagtgggctctgccatggctgggagcataggaggctacaacgcccatgcagcaaacattgtcaccgccatctacattgcctgtggacaggatgcagcacagaatgttggtagttcaaactgtattactttaatggaagcaagtggtcccacaaatgaagatttatatatcagctgcaccatgccatctatagagataggaacggtgggtggtgggaccaacctactacctcagcaagcctgtttgcagatgctaggtgttcaaggagcatgcaaagataatcctggggaaaatgcccggcagcttgcccgaattgtrtgtgggaccgtaatggctggggaattgtcacttatggcagcattggcagcaggacatcttgtcaaaagtcacatgattcacaacaggtcgaagatcaatttacaagacctccaaggagcttgcaccaagaagacagcctgaatagcccracagttctgaactggaacatgggcattgggttctaaaggactaacataaaatctgtgaattaaaaaagctcartgcattgtcttgtggaggatgaataratgtgatcactgagacagccacttggtttttggctctttcagagaggtctcaggttctttccatgcagactcctcagatctgaacacagtttagtgctttacatgctgtgctctttgaagagatttcaacaagaatattgtatgttaaagcatcagagatggtaatctacagctcacctctgaaggcaaatataagctgggaaaaaagttttgatgaaattcttgaagttcatggtgatcagtgcaattgaccttctccctcacycctgccagttgaaaatggatttttaaattatactgtagctgatgaaactcctgattttgtagttaatttattaagtctgggatgtagaacttcaagaagtaagagctaagttctaagttcatgtttgtaaattaatacttcatttggtgctggtctattttgattttggggggtaatcagcattattcttcagaaggggacctgttttcttcaagggaagaaacactcttattcccaaactacagaataatgtgttaaacatgctaaatagttctatcaggaaaacaaatcactgtatttatctccgcaggctatttgttcagagaggccttttgtttaaatataaatgtttaaatataaatgtttgtctggattggctataacatgtctttcagcattaggcttttaagaaacacagggttttgtattctttactaaagatatcagagctcttaatgttgcttagatgagggtgactgtcaagtacaagcaagactgggaccttagaaatcattgtagaaacacagttttgaaagaaaaataccatgtctctaagccaactttaattgcttaaaagacatttttatttagttgaaaaatctagttttttttgtaaactgtatcaaatctgtatatgttgtaataaaacttatgctagtttattggaagtgttcaagaaataatgttctttaawgttgtccaggaaaccctggcttgcttgccgagcctaatgaaagggaaagtcagctttcagagccagtgaaggagccacgtgaatggccctagaactgtgcctagttc

SEQ ID NO: 1166 - DNA, 4521 bp, Homo sapiens
cgactgcgttaactggagccaggctgagcgtcggcgccggggttcggtggcctctagtgagatctggaggatccaaggattctgtagctacaatgttgtcaagactttttcgaatgcatggcctctttgtggcctcccatccctgggaagtcatagtggggacagtgacactgaccatctgcatgatgtccatgaacatgtttactggtaacaataagatctgtggttggaattatgaatgtccaaagtttgaagaggatgttttgagcagtgacattataattctgacaataacacgatgcatagccatcctgtatatttacttccagttccagaatttacgtcaacttggatcaaaatatattttgggtattgctggccttttcacaattttctcaagttttgtattcagtacagttgtcattcacttcttagacaaagaattgacaggcttgaatgaagctttgccctttttcctacttttgattgacctttccagagcaagcacattagcaaagtttgccctcagttccaactcacaggatgaagtaagggaaaatattgctcgtggaatggcaattttaggtcctacgtttaccctcgatgctcttgttgaatgtcttgtgattggagttggtaccatgtcaggggtacgtcagcttgaaattatgtgctgctttggctgcatgtcagttcttgccaactacttcgtgttcatgactttcttcccagcttgtgtgtccttggtattagagctttctcgggaaagccgcgagggtcgtccaatttggcagctcagccattttgcccgagttttagaagaagaagaaaataagccgaatcctgtaactcagagggtcaagatgattatgtctctaggcttggttcttgttcatgctcacagtcgctggatagctgatccttctcctcaaaacagtacagcagatacttctaaggtttcattaggactggatgaaaatgtgtccaagagaattgaaccaagtgtttccctctggcagttttatctctctaaaatgatcagcatggatattgaacaagttattaccctaagtttagctctccttctggctgtcaagtacatcttctttgaacaaacagagacagaatctacactctcattaaaaaaccctatcacatctcctgtagtgacacaaaagaaagtcccagacaattgttgtagacgtgaacctatgctggtcagaaataaccagaaatgtgattcagtagaggaagagacagggataaaccgagaaagaaaagttgaggttataaaacccttagtggctgaaacagataccccaaacagagctacatttgtggttggtaactcctccttactcgatacttcatcagtactggtgacacaggaacctgaaattgaacttcccagggaacctcggcctaatgaagaatgtctacagatacttgggaatgcagagaaaggtgcaaaattccttagtgatgctgagatcatccagttagtcaatgctaagcatatcccagcctacaagttggaaactctgatggaaactcatgagcgtggtgtatctattcgccgacagttactttccaagaagctttcagaaccttcttctctccagtacctaccttacagggattataattactccttggtgatgggagcttgttgtgagaatgttattggatatatgcccatccctgttggagtggcaggrcccctttgcttagatgaaaaagaatttcaggttccaatggcaacaacagaaggttgtcttgtggccagcaccaatagaggctgcagagcaataggtcttggtggaggtgccagcagccgagtccttgcagatgggatgactcgtggcccagttgtgcgtcttccacgtgcttgtgactctgcagaagtgaaagcstgsctcgaaacatctgaagggttcgcagtgataaaggaggcatttgacagcactagcagatttgcacgtctacagaaacttcatacaagtrtagctggacgcaacctttatatccgtttccagtccaggtcaggggatgccatggggatgaacatgatttcaaagggtacagagaaagcactttcaaaacttcacgagtatttccctgaaatgcagattctagccgttagtggtaactattgtactgacaagaaacctgctgctataaattggatagagggaagaggaaaatctgttgtttgtgaagctgtcattccagccaaggttgtcagagaagtattaaagactaccacagaggctatgattgaggtcaacattaacaagaatttagtgggctctgccatggctgggagcataggaggctacaacgcccatgcagcaaacattgtcaccgccatctacattgcctgtggacaggatgcagcacagaatgttggtagttcaaactgtattactttaatggaagcaagtggtcccacaaatgaagatttatatatcagctgcaccatgccatctatagagataggaacggtgggtggtgggaccaacctactacctcagcaagcctgtttgcagatgctaggtgttcaaggagcatgcaaagataatcctggggaaaatgcccggcagcttgcccgaattgtrtgtgggaccgtaatggctggggaattgtcacttatggcagcattggcagcaggacatcttgtcaaaagtcacatgattcacaacaggtcgaagatcaatttacaagacctccaaggagcttgcaccaagaagacagcctgaatagcccracagttctgaactggaacatgggcattgggttctaaaggactaacataaaatctgtgaattaaaaaagctcartgcattgtcttgtggaggatgaataratgtgatcactgagacagccacttggtttttggctctttcagagaggtctcaggttctttccatgcagactcctcagatctgaacacagtttagtgctttacatgctgtgctctttgaagagatttcaacaagaatattgtatgttaaagcatcagagatggtaatctacagctcacctctgaaggcaaatataagctgggaaaaaagttttgatgaaattcttgaagttcatggtgatcagtgcaattgaccttctccctcacycctgccagttgaaaatggatttttaaattatactgtagctgatgaaactcctgattttgtagttaatttattaagtctgggatgtagaacttcaagaagtaagagctaagttctaagttcatgtttgtaaattaatacttcatttggtgctggtctattttgattttggggggtaatcagcattattcttcagaaggggacctgttttcttcaagggaagaaacactcttattcccaaactacagaataatgtgttaaacatgctaaatagttctatcaggaaaacaaatcactgtatttatctccgcaggctatttgttcagagaggccttttgtttaaatataaatgtttaaatataaatgtttgtctggattggctataacatgtctttcagcattaggcttttaagaaacacagggttttgtattctttactaaagatatcagagctcttaatgttgcttagatgagggtgactgtcaagtacaagcaagactgggaccttagaaatcattgtagaaacacagttttgaaagaaaaataccatgtctctaagccaactttaattgcttaaaagacatttttatttagttgaaaaatctagttttttttgtaaactgtatcaaatctgtatatgttgtaataaaacttatgctagtttattggaagtgttcaagaaataaaaatcaacttgtgtactgataaaatactctagcctgggccagagaagataatgttctttaawgttgtccaggaaaccctggcttgcttgccgagcctaatgaaagggaaagtcagctttcagagccagtgaaggagccacgtgaatggccctagaactgtgcctagttcctgtggccaggaggttggtgactgaaacattcacacagggctctttgatggacccacgaacgctcttakctttctcagggggtcagcagagttattgaatcttaattttttttaatgtacaagttttgtataaataataaagaactccttattttgtattacatctaatgcttcaagtgttgctcttggaaagctgatgatgtctcttgtagaagatggactctgaaaaacattccaggaaaccatggcagcatggagagcctcttagtgattgtgtctgcattgttattgtggaagatttaccttttctgttgtacgtaaagcttaaattgcttttgttgtgactttttagccagtgactttttctgagcttttcatggaagtggcagtgaaaaatatgttgagtgttcattttagtgactgtaattaatatcttgctggattaatgttttgtacaattactaaattgtatacattttgttatagaatacttttttctagtttcagtaaataatgaaaaggaagttaataccaataa

SEQ ID NO: 1167 - DNA, 1001 bp, Homo sapiens
ataaaagggggccsccgcattggccagtgggacaggaaaaacatcaagaagggggagaagaacacaattgtcacctcctacaacaggaacttcacgggccgcaatgacacaaaccccaagaccatgccttcaatcatctccccagagattgtcacagccctggccattgcaagaaccctaagttcaacccagagaccgactgccttatgggcaaggatggcaagaagttcaagctggaggctccagacgcaatatgagcttccccaagcgcagtttgacccagggcaggacacctaccagcaccccccaaaggacagcagcaggcagcatgtggatgtgagctccaccagccagcacctgcagctcgtggagccttttgacaagtgggatggcaaggacctggaggacctgcagatcctcatcaaagtcaaagggaagtgtcccactgaccacatctcggctgctggcccctggctcaagttccacgggcacttggagtacatctccaacaacttgctcattggtgccatgaacattgaaaacagcaaggccaactccgtgcacaatgccctcacccaggagtttggccccatccctgacactgcccgctactacaagaaacatggcatcaggtgggtggtgattagggatgagaactaccgcgaggactcgcacggggagcacacagcactggagcatcacctcctcaggggccgggccatcatcaccaagagctttgccaggatccacgagaccagggcctgcagggcctgctgaccctgaccttcgctgacccagcccattacaataagattcaccctgtggacaagctgaccattcagggcctgaagaacgtctcgcctggcaagtccctgaagtgcatcatcaagcaccccaacgggacccaagagaccatcctcctgaaccgcaccttcaaggagacgcagattgagtggttccacaccggcagtgccctcaacagaatgaaggagctgcaggag

SEQ ID NO: 1168 - DNA, 930 bp, Homo sapiens
ataaaagggggccsccgcattggccagtgggacaggaaaaacatcaagaagggggagaagaacacaattgtcacctcctacaacaggaacttcacgggccgcaatgacacaaaccccaagaccatgccttcaatcatctccccagagattgtcacagccctggccattgcaagaaccctaagttcaacccagagaccgactgccttatgggcaaggatggcaagaagttcaagctggaggctccagacgcaatatgagcttccccaagcgcagtttgacccagggcaggacacctaccagcaccccccaaaggacagcagcaggcagcatgtggatgtgagctccaccagccagcacctgcagctcgtggagccttttgacaagtgggatggcaaggacctggaggacctgcagatcctcatcaaagtcaaagggaagtgtcccactgaccacatctcggctgctggcccctggctcaagttccacgggcacttggagtacatctccaacaacttgctcattggtgccatgaacattgaaaacagcaaggccaactccgtgcacaatgccctcacccaggagtttggccccatccctgacactgcccgctactacaagaaacatggcatcaggtgggtggggccgggccatcatcaccaagagctttgccaggatccacgagaccagggcctgcagggcctgctgaccctgaccttcgctgacccagcccattacaataagattcaccctgtggacaagctgaccattcagggcctgaagaacgtctcgcctggcaagtccctgaagtgcatcatcaagcaccccaacgggacccaagagaccatcctcctgaaccgcaccttcaaggagacgcagattgagtggttccacaccggcagtgccctcaacagaatgaaggagctgcaggag

SEQ ID NO: 1169 - DNA, 2810 bp, Homo sapiens
cctccgctcctccccttccctacatctagccgccgcgctttcccgctcccgcagcagcagcctcccgcgtcgctgtcgctgttgcctccgccacctcctccgccgccgcgcgcccctcggagttccgcgccccaccatgcccaacatcgtgctgttcagcggcagctcgcatcaggacctrtcccagcgcgtggccgaccgcctgggcctggagctgggcaaggtggtcacgaagaagttcagcaaccaggagaccagcgtggagattggtgaaagcgtgagaggggaagatgtctacatcatccagagcggctgcggggaaattaacgacaacctgatggaactcctcatcatgatcaatgcctgcaagattgcgtcatcatccagagtaactgccgtgatcccgtgtttcccatacgcccgacaagataaaaaggacaagagtcgtgccccaatttctgcaaaacttgtggccaatatgctgtcggtggctggggcggatcacatcatcaccatggacctgcatgcttctcagatacagggattctttgatattcctgtggataatttgtatgcggagcccgcagtcctgcagtggattcgggaaaacattgccgagtggaagaactgtatcattgtttcacctgacgcagggggagccaaaagggttacatcaattgcagacaggttgaatgtggaatttgctttgatccacaaagagaggaagaaggcgaatgaagtggaccggatggtcctggtgggcgacgtgaaggaccgtgtggccatcctcgtggatgacatggctgacacttgcggcaccatctgccatgctgcggacaagctgctgtcagctggagccaccaaagtgtatgctatccttacccatgggatcttctctggaccagctatttccagaataaataatgccgcctttgaggctgttgtcgtcacaaacacaattccgcaagaggacaaaatgaaacactgcaccaagattcaggtcattgacatttccatgatcttggccgaagcaatccgaaggacacacaatggggaatccgtgtcctacctgttcagccatgtcccgctataaatccagaatgggaagtgtccagcaagcctactctgacttctgacttgtttttgttttctggatttttagctgtaggtattcagcaatgataggttaatcactggcaaaagcatcagatctttgtatatgctaagatttattgtttccccttctaaagctcaakatcatttctttccagtttttggggaaatggtggtggttatttggtctttaagtgaactgtcttaaatgagaaacgtttttgtcattttgacttttaacaggtacaggtgatctcttcctttgttctttcagtactttgaggcgacaactttcaagtatataatttcattgtggaagtcatagtttatatatttcgaggttgccaaaggtgacttcasattaaagccttctgtgtaaatatatactgataatgcctatggacatttgggtaaaaccctgtatagaattaattatccttttactttggagtgaaccttggaaaatttataattataataccatggattttgaattttccttttttttttttttttggataactcagtttcagataaaccatcttggttactgtgcttaatttggaccaaattttatttagcttaatatggacactgacacattttggggggtatacattagacatatcagagcagtgtatttctggatcattttttaaatgacctcttctaaaacataactgtcacttacctgaaatgctgcatcctaaaattccaaaattatattgagcaatcgccaaggcctaaagccaactgacttaaaggtaatcatttcagctaagattaaatttaaagcctaagaatgtatagagctagttttaaaataatgatctcagatttttaaaaaggatataggaacctgcattgtcattctctgaattaagaactgatggtttctatcattatttagccccacctttgtattttaaaatccttcagaatacatttatgaaccaatgcgactggacttagccacacacaatggaaattcagaccttgactatttggtgtttccagttcacaaaggtgatgaagactgtcttgggagcagcttaatcccaaaatttgtacatttcttgctgctcctggcgtggaaacttaagtgagaccaccaaatacattggtcctgtccaattctactgaatgggggtggacctggcatttatctggccaaaaacaggagccagagaaatatgaatataccaaagttgtttgtttagcctccaacttaaattacattagtcaacttatagatactcatatgatcacttttctttttagatactacatcaactagattcaggagtatatcatttgcagtgcttgtattggtttaaaatgtaagattttaagatcctctaacactgtactaaaacatttcaataaaatcattctgactgcgttcatagtttgtatgtatcattgtggagtaatatgttttgacggagtgatgtgttgcagtacctgaaaatgtttgctactttacgattataggccagcatacaaaattacagaaaagccagaagttaattgatgtcagctgttttccattttgaaggtgtttcttcctgaagaacttaccagcaatcgcctttcctcaaagcgtaacagctgtgccacataaggtgtccacgttgttaattccacatgtttcctataaaattaaagatggtacagtgtgttcacgcatcagagta

SEQ ID NO: 1170 - DNA, 4624 bp, Homo sapiens
aagggcgcctcggcgcgtgtattggctccttcggctgcgggccggctcgsctacgcgctctgctccgagccgctcactgcatggtagagtctggtgcccccgccgccgcctgcatcgccgccaccgccgctccgccacgaccaccgccgcctcctgycctgcagccaccgccaccgcctgtgtcgccgccgcctcgggaccggctgtatgattaggccacaatcttcaatgagtaaacatattcctcaattctgtggtgttcttggtcacacatttatggagtttctgaagggcagtggagattactgccaggcacagcacgacctctatgcagacaagtgaactgtagaaactgattactgctccaccaagaagcccccataagagtggttatcctggacacagaagtgttgaattgaaatccacagagcattttacaagagttctgacctggatggggtaaacctcagtgcacttcttttctgttggcctcagtattactggattgaagaattgctgcttcttgttaggaggttcatttcacttaycattacttacaacttcatactcaaagcactgagaatttcaagtggagtatattgaagtagacttcagtttctttgsatcatttctgtattcaatttttttaattatttcataaccctattgagtgttttttaactaaattaacatggctcgaatgaaccgcccagctcctgtggaagtcacatacaagaacatgagatttcttattacacacaatccaaccaatgcgaccttaaacaaatttatagaggaacttaagaagtatggagttaccacaatagtaagagtatgtgaagcaacttatgacactactcttgtggagaaagaaggtatccatgttcttgattggccttttgatgatggtgcaccaccrtccaaccagattgttgatgactggttaagtcttgtgaaaattaagtttcgtgaagaacctggttgttgtattgctgttcattgcgttgcaggccttgggagagctccagtacttgttgccctagcattaattgaaggtggaatgaaatacgaagatgcagtacaattcataagacaaaagcgkcgtggagcttttaacagcaagcaacttytgtatttggagaagtatcgtcctaaaatgcggctgcgtttcaaagattccaacggtcatagaaacaactgttgcattcaataaaattggggtgcctaatgctactggaagtggaacttgagatagggcctaatttgttatacatattagccaacatgttggcttagtaagtctaatgaagcttccataggagtattgaaaggcagttttaccaggcctcaagctagacagatttggcaacctctgtatttgggttacagtcaacctatttggatacttggcaaaagattcttgctgtcagcatataaaatgtgcttgtcatttgtatcaattgacctttccccaaatcatgcagtattgagttatgacttgttaaatctattcccatgccagaatcttatcaatacataagaaatttaggaagattaggtgccaaaatacccagcacaatacttgtatatttttagtaccatacagaagtaaaatcccaggaactatgaacactagaccttatgtggtttattccttcartcatttcaaacattgaaagtagggcctacatggttatttgsctgctcactttatgtttacatctcccacattcataccaatatacgtcaggtttgsttaaccattgatttttttttttttttaccaagtcttacagtgattattttacgtgtttccatgtatctcactttgtgctgtrttaaaaaaacctccattttgaaaatctacgttgtacagaagcacatgtctttaatgtcttcagacaaaaaagccttacattaatttaatgtttgcactctgaggtgcaacttaacagggagggcctgagaaaagaatgggagggggctattaattatttttagcaaaatgttgcctttgtcttgtgcaaacatgtagaatatgctctttaatttagtaaaatatttttttaaaaggtagagatgctttgttattgtaatcataaacttcctgaaattcttgtaatttttttcccatacttatcagaagtgtgtttaccaacttattyttgtttgaaagtgtgattttttttttccttcccaacctctcttgcaaaaaaagaaatgggtttctgctaatgaattgagcagacatctaatattttatatgccttttgagctgtgtaacttaatatttggatacttgacaatttgttttattatgtaattgataaaatggtgatgtgtattaatgttagttcaaccatatatttatactgtctggggatgtgtggttatagttctgtgggagaaataattttgtcagtgttcaccagcttgtaaaaacttagtgcgagagctgaaacatctaaataaataatgacatgcatttatcatcattgagattggtttgcttaaaattaacttattttgtagaagacaaaatgaattgcacttcacttaatgtgtgtcctcatctttttacaaataaatgaaggattataaatgatgtcagcattttagtaaacttwtagacaaaatttgttagggtcattcatgaaaactttaatactaaaagcactttccattatatactttttaaaggtctagataattttgaaccaatttattattgtgtactgaggagaaataatgtatagtagaggacagccttggtttgtaaagctcagytccactagttcatggttttgtgcaacttctgagcctcagttytctcctttgcaaattaataattacataccttyatagatttygaaattaatytaaatattagtatytggtacatgawggcttaatgttaagtttcctttaatgatccacaataatccctttgatcacgttaatctaaatctagatgtctttgtctaattttttttgaatagcagttataaatgtaaaggactcaaagtttaagtaaaaagtgatactccaccttgtgtttcaaagaatttagttccacctcttcataccagtttaacacttaatatatttcattggattttagacagggcaaaaggaagaacaggggcctctggaggcccttggttatttaaatcttggattatttgtgatagtaatcacaaatttttggctaatttttaacctgaggttttgttttttttttaaaggaaatgcagcctagtcttgagaacataattttatataatcarttactaaatgttaaactattaccacacagcccataaaacagcatttgcgtttattgagagagaggatgtgccatcatgattaatgaaaactatcttttgagtttgaaaagaaattaatttgcagtgtttggattgtatatatggtgctaaaaataaattaatttactttataaaccttatctgtacattatacgatgtgatgaaatttgctttttatccaaatattttgtatcttgtaaatatggctaattataggaatgcctataatacatcttagattccttatatctaataagagttcaaagagttatgagttgaagtcttgaatgcaggaaactatctgatagtgttctaaaatttggttacttgggtttggatacccttagtgggatgatgtaaatagaggctagctacctaggcttgtctatagcaaccataatgttgatgtaagtaatgcggttactgaatcataagaaaatgccatctctttttagttgaaggaaaactctggaagtaggtgccattggtcattctgcagtgcactgcaaccattgtttcccctagtgccctcttttccctagggcattgctctcctattcccacgccttaacacagctctatacctagaagcagccagcccaggcatgcagtcacatttaatcacatcccccttctagagtgcttcaaaatgatgtagtccctcaacttggctaaagaatctcaatctcttgaaatttatttttttaatgtcatattcatctggtaaatatctactgtttgccaggcatttaagaatatggcaaagaacataaaagatggtgtcaccagattttggtcaccaatgagtacccgacccgttgccatgattaagagagaatgctttctattggagtttcaggaaatataatttgagaatactttaaagggaagtggaagtataagtgaatgatatttttcttttacatgtaaacaatgaagttatttcaaagttaagttttaaacaaaatacatgaagtagtgtctgccatacatgttaatattytacattcttgcttccttaaattaatatgtttgtgtgtatatatgtgcctcacacctgaattgaaaattaaagactggtttaaaagtggtttaaaagtgacatttaatgtttctccattacgtttggggtaaccagcctaagtggaatcttggaaggaaagtaagggaaaaacttgtatttgccttcaatgaattaaaccagtgatatgtgttaacgtatgaatgaaaggattgatggtgattttataattatatatattgccgcagtaaccagttaataaattgatagctaccat

SEQ ID NO: 1171 - DNA, 3996 bp, Homo sapiens
ttgtctggtatccttatgcagaatgaactgaaataatcatcaatctgaaaagctactcttaaacagagacttgcttcaacaccaggaagaacatgaaagggtgactcataattcccagcagcagtgccagttcatgtgctgggattctgaccacaagyctaacaatcaggtcagggagtcagatttctgttggatttagaaaagcatctatgtgtttatgaaagaaacccactggatttttaatagttctgcagctcttggaggctctacatctaccctttctccccagccaagagcatggctatgggagaaggaaggcaggcagcaggcagcaattctgtggtgttcttggtcacacatttatggagtttctgaagggcagtggagattactgccaggcacagcacgacctctatgcagacaagtgaactgtagaaactgattactgctccaccaagaagcccccataagagtggttatcctggacacagaagtgttgaattgaaatccacagagcattttacaagagttctgacctggatggggtaaacctcagtgcacttcttttctgttggcctcagtattactggattgaagaattgctgcttcttgttaggaggttcatttcacttaycattacttacaacttcatactcaaagcactgagaatttcaagtggagtatattgaagtagacttcagtttctttgsatcatttctgtattcaatttttttaattatttcataaccctattgagtgttttttaactaaattaacatggctcgaatgaaccgcccagctcctgtggaagtcacatacaagaacatgagatttcttattacacacaatccaaccaatgcgaccttaaacaaatttatagaggaacttaagaagtatggagttaccacaatagtaagagtatgtgaagcaacttatgacactactcttgtggagaaagaaggtatccatgttcttgattggccttttgatgatggtgcaccaccrtccaaccagattgttgatgactggttaagtcttgtgaaaattaagtttcgtgaagaacctggttgttgtattgctgttcattgcgttgcaggccttgggagagctccagtacttgttgccctagcattaattgaaggtggaatgaaatacgaagatgcagtacaattcataagacaaaagcgkcgtggagcttttaacagcaagcaacttytgtatttggagaagtatcgtcctaaaatgcggctgcgtttcaaagattccaacggtcatagaaacaactgttgcattcaataaaattggggtgcctaatgctactggaagtggaacttgagatagggcctaatttgttatacatattagccaacatgttggcttagtaagtctaatgaagcttccataggagtattgaaaggcagttttaccaggcctcaagctagacagatttggcaacctctgtatttgggttacagtcaacctatttggatacttggcaaaagattcttgctgtcagcatataaaatgtgcttgtcatttgtatcaattgacctttccccaaatcatgcagtattgagttatgacttgttaaatctattcccatgccagaatcttatcaatacataagaaatttaggaagattaggtgccaaaatacccagcacaatacttgtatatttttagtaccatacagaagtaaaatcccaggaactatgaacactagaccttatgtggtttattccttcartcatttcaaacattgaaagtagggcctacatggttatttgsctgctcactttatgtttacatctcccacattcataccaatatacgtcaggtttgsttaaccattgatttttttttttttttaccaagtcttacagtgattattttacgtgtttccatgtatctcactttgtgctgtrttaaaaaaacctccattttgaaaatctacgttgtacagaagcacatgtctttaatgtcttcagacaaaaaagccttacattaatttaatgtttgcactctgaggtgcaacttaacagggagggcctgagaaaagaatgggagggggctattaattatttttagcaaaatgttgcctttgtcttgtgcaaacatgtagaatatgctctttaatttagtaaaatatttttttaaaaggtagagatgctttgttattgtaatcataaacttcctgaaattcttgtaatttttttcccatacttatcagaagtgtgtttaccaacttattyttgtttgaaagtgtgattttttttttccttcccaacctctcttgcaaaaaaagaaatgggtttctgctaatgaattgagcagacatctaatattttatatgccttttgagctgtgtaacttaatatttggatacttgacaatttgttttattatgtaattgataaaatggtgatgtgtattaatgttagttcaaccatatatttatactgtctggggatgtgtggttatagttctgtgggagaaataattttgtcagtgttcaccagcttgtaaaaacttagtgcgagagctgaaacatctaaataaataatgacatgcatttatcatcattgagattggtttgcttaaaattaacttattttgtagaagacaaaatgaattgcacttcacttaatgtgtgtcctcatctttttacaaataaatgaaggattataaatgatgtcagcattttagtaaacttwtagacaaaatttgttagggtcattcatgaaaactttaatactaaaagcactttccattatatactttttaaaggtctagataattttgaaccaatttattattgtgtactgaggagaaataatgtatagtagaggacagccttggtttgtaaagctcagytccactagttcatggttttgtgcaacttctgagcctcagttytctcctttgcaaattaataattacataccttyatagatttygaaattaatytaaatattagtatytggtacatgawaattttttttgaatagcagttataaatgtaaaggactcaaagtttaagtaaaaagtgatactccaccttgtgtttcaaagaatttagttccacctcttcataccagtttaacacttaatatatttcattggattttagacagggcaaaaggaagaacaggggcctctggaggcccttggttatttaaatcttggattatttgtgatagtaatcacaaatttttggctaatttttaacctgaggttttgttttttttttaaaggaaatgcagcctagtcttgagaacataattttatataatcarttactaaatgttaaactattaccacacagcccataaaacagcatttgcgtttattgagagagaggatgtgccatcatgattaatgaaaactatcttttgagtttgaaaagaaattaatttgcagtgtttggattgtatatatggtgctaaaaataaattaatttactttataaaccttatctgtacattatacgatgtgatgaaatttgctttttatccaaatattttgtatcttgtaaatatggctaattataggaatgcctataatacatcttagattccttatatctaataagagttcaaagagttatgagttgaagtcttgaatgcaggaaactatctgatagtgttctaaaatttggttacttgggtttggatacccttagtgggatgatgtaaatagaggctagctacctaggcttgtctatagcaaccataatgttgatgtaagtaatgcggttactgaatcataagaaaatgccatctctttttagttgaaggaaaactctggaagtaggtgccattggtcattctgcagtgcactgcaaccattgtttcccctagtgccctcttttccctagggcattgctctcctattcccacgccttaacacagctctatacctagaagcagccagcccaggcatgcagtcacatttaatcacatcccccttctagagtgcttcaaaatgatgtagtccc

SEQ ID NO: 1172 - DNA, 1016 bp, Homo sapiens
atggctgcctacaaattggtgttgatccagcatggcgagagcatgtggaatccggagaaccgcttcagcagctggtacaacaccgacctgagcccagcgggccataaggaggcgaagtgtggcaggcaggtgctgtgagaagccggctgagtttgacatctgcttcacctcagtgcagaagagagtgatccagaccctctggacagtgctagatgccaytgatcagacgtggctgccagtagtgaggattggtgcctcaatgagcagcactctgggggtctgatcggtctcaataaagcagaaactgctgcaaagcatggtgaggcccaggtgaagatctggaggcactcctatgatgtcccaccacctctaatggagcccgaccatcctttctacaacatcagtaaggatcgcaggtttgcaaacctcactgaagatcagctaccctcctgtgagagtctgaaggacactattgccaaggctctgcccttttggaatgaagaaatagttccccagatcaaggaggggaagcaggtactaattgcagcccatggcaacagccccccgggcattgtcaagcatctggagggcctctctgaagaggctatcatggagctgaacctgcccactggtattcccgttgtctatgaattggacaagaacttgaaacccatacagttcctgggggatgaagagaccatgcgtaaagccatggaagctgtggctgcccagggtaaggccaagaagtaaaggccagcgggcaggctactgtccccaggagcaccctccctgcccatcgcgtccccctgcccctccctcctgcacatgtcacactgaccacatctgtaggcatcttgagctgtagctgcagatgggcaccagtggctcccattttcattttagccattttgtctcctgcacccactcccttcatacaatctagtcagaacagcacttctagggcaaggcttctcagcccaagctgtggaaagctcctcttgtccaacagagtttaa

SEQ ID NO: 1173 - DNA, 528 bp, Homo sapiens
atgctgatcgtcttcgccgccgcctgcgtgctcgccttcgcgcccggcccggcctcgccccggtcttcgcctccgcctcggccgcagagcttgccccctccccacccgcagacaatgtccgagtccaagaacggccccgagtatgcttcgtttttcgccgtcatggcagcctcggccgccatggtcttcagcgccccgcgcgctgcctatggcacggtcaagaccggtgccggcatcgcggccatgtctgtcatgcggccggagctgatcatgaagtccatcatcccggtggtcacggctggcatcatcgccatctatggcctggtggagctgcctccagctagcgccggcctgagcgtgggcctgagcggcctggcagccggctttgccatagacatcktgggggacgccggtgtgcgagccacggcccagcagccccgactattcatgggcatgatcctgatcctcatcttccccgaggtgctcggcctgtacggtctcgtcgttgccctcatcctctccacagag

SEQ ID NO: 1174 - DNA, 3902 bp, Homo sapiens
cgatggccctgcccagtcccagacagaacctactaygtgcggcggcagctggggcgggaaggcggscgctgsggscgctgcrgccgctgcagcgccagggtccacctggtcggctgcacctgtggaggaggaggtggatttcaggcttcccgtagactggaagaatcggctcaaaaccgcttgcctcgcaggggctgagctggaggcagcgaggccgcccgacgcaggcttccggcgagacatggcagggcaaggatggcagcccggcggcagggccyggcgaggagcgcgarcccgcggccgcagttcccaggcgtctgcgggcgcgagcacgccgcgaccctgcgtgcgccggggcgggggggcggggcctcgcctgcacaaatrgggacgagggggcggggcggccacaatttcgcgccaaacttgaccgcgcgttctgctgtaacgagcgggctcggaggtcctcccgctgctgtcatggttggttcgctaaactgcatcgtcgctgtgtcccagaacatgggcatcggcaagaacggggacctgccctggccaccgctcaggaatgaattcagatatttccagagaatgaccacaacctcttcagtagaaggtaaacagaatctggtgattatgggtaagaagacctggttctccattcctgagaagaatcgacctttaaagggtagaattaatttagttctcagcagagaactcaaggaacctccacaaggagctcattttctttccagaagtctagatgatgccttaaaacttactgaacaaccagaattagcaaataaagtagacatggtctggatagttggtggcagttctgtttataaggaagccatgaatcacccaggccatcttaaactatttgtgacaaggatcatgcaagactttgaaagtgacacgttttttccagaaattgatttggagaaatataaacttctgccagaatacccaggtgttctctctgatgtccaggaggagaaaggcattaagtacaaatttgaagtatatgagaagaatgattaatatgaaggtgttttctagtttaagttgttccccctccctctgaaaaaagtatgtatttttacattagaaaaggttttttgttgactttagatctataattatttctaagcaactwgtttttattccccactactcttgtctctatcagataccatttatgagacattcttgctataactaagtgcttctccaagaccccaactgagtccccagcacctgctayagtgagctgccattccacacccatcacatgtggcactcttgccagtccttgacattgtcgggcttttcacatgttggtaatatttattaaagatgaagatccacatacccttcaactgagcagtttcactagtggaaataccaaaagmttcctacgtgtatatccagaggtttgtagataaatgttgccaccttgtttgtaacagtgraaaattgaaaacaacctggaagtccagtgatgggaaaatgagtatgtttctgtcttagattggggaacccaaagcagattgcaagactgaaatttcagtgaaagcagtgtatttgctaggtcataccagaaatcatcaattgaggtayggagaaactgaactgagaaggtaagaaaagcaatttaaagtcagcgagcaggttctcattgataacaagctccatactgctgagatacagggaaatggagrggggaaagctggagtattgatcccrcccccctccttggttgtcagctccctgtcctgtgtgtgggcggaacatagtccagctgctctatagcaagtctcaggtgtttgcagtaagaagctgctggcatgcacgggaacagtgaatgccaaasacttaaagcaattcgatgtttaagtatgtaagttcttttttttttagacagcgtttcgctcttgttgcccaggctagcatgcaatggtgtgacctcggcttactgcaacctccgccttcccagattcaagcgattctcctgcctcaggctcccaagtagctaggaccaggtgcgcgccaccacgcccggctaatttttgtattttgtrtttttagtagagatggggtttcrccatgttggtcaggctrgtctcgaactcgtgaccgcaagcgattcacccacctcrgcctcccaaagtgctgggattrccggcttgagccaccacacccggcacatcttcattctttttatgtagtaaaaagtataaggccacacatggtttatttgaagtattttataatttaaaaaaatacagaagcaggaaaaccaattataagttcaagtgagggatgatggttgcttgaaccaaagggttgcatgtagtaagaaattgtgatttaagatatattttaaagttataagtagcaggatattctgatggagtttgactttggttttgggcccasggagtttcagatgcctttgagaaatgaatgaagtagagagaaaataaaagaaaaacyagccaggcacagtggctcacacctgtaatcccagcgctttgggaggctaaggcaggcagatcacttgagaccagcttgggcaacatggcaaagccccatctctacaaaaaacacaaaaattagctgggcattgtggcgcacacctgtattcccatctastcaggaagctgagatkgaagaattaattgagcccacgagttcaaggctgcagtgagtcgtgattgtgccactgcactccagccggggtgacagaagagaccttgtctcgaaaaggaatctgaaaacaatggaaccatgccttcataattctrgaaagttattttcaactgataaatctatattcacccaaataatcaagggtgaaggtaaaataatacatttttagacaagcaaagactcaggggttacctccatgtgccctttttagggaagctgttggagaaaatactccagcaaaatgaaggagtacacaaaccagagaatgacatgaatccagcaaataggatccaacacaggcaatattccagctatggagctagctttaaaaaggaacagtaaaaatattaatcggttagctgggtggaatggcccatgcctgtagtcccagctactcaggaggctcagcagcaggrcgacttgagcccaagagttccagaccagcctggccaycttagtgagatcccttctcttaaaaataataacttattgccagatttggggcatttggaaakaagttcattgaagataaagcaaaagtaaaaaaaaaaaaaaaaaaacaaggggaaagggttggttaggcaatcattctagggcagaaagaagtacaggataggaagagcataatacactgtttttctcaacaaggagcagtatgtacacagtcataatgatgtgactgcttagcccctaaatatggtaactactctgggacaatatgggaggaaaagtgaagattgtgatggtgtaagagctaaatcctcatctgtcatatccagaaatcactatataatayataataatgaaatgactaagttatgtgaggaaaaaaacagaagacattgctaaaagagttaaaagtcattgctctggagaattaggagkgatggggcaggggactgttaggatgcattataaactgaaaagcctttttaaaattttatgtattaatatatgcattcacttgaaaaactaaaaaaaaacaataatttggaaaaacccatgaaggtaactaacggaaggaaaaactaagagaatgaaaagtatttgcctctggaaagaacaactggcaggactgttgttttcattgtaagacttttggagccatttaattgtacttaaccattttcatctatttctttartaagaacaattccatcttaataaagagttacacttgttaataa

SEQ ID NO: 1175 - DNA, 3142 bp, Homo sapiens
cgatggccctgcccagtcccagacagaacctactaygtgcggcggcagctggggcgggaaggcggscgctgsggscgctgcrgccgctgcagcgccagggtccacctggtcggctgcacctgtggaggaggaggtggatttcaggcttcccgtagactggaagaatcggctcaaaaccgcttgcctcgcaggggctgagctggaggcagcgaggccgcccgacgcaggcttccggcgagacatggcagggcaaggatggcagcccggcggcagggccyggcgaggagcgcgarcccgcggccgcagttcccaggcgtctgcgggcgcgagcacgccgcgaccctgcgtgcgccggggcgggggggcggggcctcgcctgcacaaatrgggacgagggggcggggcggccacaatttcgcgccaaacttgaccgcgcgttctgctgtaacgagcgggctcggaggtcctcccgctgctgtcatggttggttcgctaaactgcatcgtcgctgtgtcccagaacatgggcatcggcaagaacggggacctgccctggccaccgctcaggaatgaattcagatatttccagagaatgaccacaacctcttcagtagaaggtaaacagaatctggtgattatgggtaagaagacctggttctccattcctgagaagaatcgacctttaaagggtagaattaatttagttctcagcagagaactcaaggaacctccacaaggagctcattttctttccagaagtctagatgatgccttaaaacttactgaacaaccagaattagcaaataaagtagacatggtctggatagttggtggcagttctgtttataaggaagccatgaatcacccaggccatcttaaactatttgtgacaaggatcatgcaagactttgaaagtgacacgttttttccagaaattgatttggagaaatataaacttctgccagaatacccaggtgttctctctgatgtccaggaggagaaaggcattaagtacaaatttgaagtatatgagaagaatgattaatatgaaggtgttttctagtttaagttgttccccctccctctgaaaaaagtatgtatttttacattagaaaaggttttttgttgactttagatctataattatttctaagcaactwgtttttattccccactactcttgtctctatcagataccatttatgagacattcttgctataactaagtgcttctccaagaccccaactgagtccccagcacctgctayagtgagctgccattccacacccatcacatgtggcactcttgccagtccttgacattgtcgggcttttcacatgttggtaatatttattaaagatgaagatccacatacccttcaactgagcagtttcactagtggaaataccaaaagmttcctacgtgtatatccagaggtttgtagataaatgttgccaccttgtttgtaacagtgraaaattgaaaacaacctggaagtccagtgatgggaaaatgagtatgtttctgtcttagattggggaacccaaagcagattgcaagactgaaatttcagtgaaagcagtgtatttgctaggtcataccagaaatcatcaattgaggtayggagaaactgaactgagaaggtaagaaaagcaatttaaagtcagcgagcaggttctcattgataacaagctccatactgctgagatacagggaaatggagrggggaaagctggagtattgatcccrcccccctccttggttgtcagctccctgtcctgtgtgtgggcggaacatagtccagctgctctatagcaagtctcaggtgtttgcagtaagaagctgctggcatgcacgggaacagtgaatgccaaasacttaaagcaattcgatgtttaagtatgtaagttcttttttttttagacagcgtttcgctcttgttgcccaggctagcatgcaatggtgtgacctcggcttactgcaacctccgccttcccagattcaagcgattctcctgcctcaggctcccaagtagctaggaccaggtgcgcgccaccacgcccggctaatttttgtattttgtrtttttagtagagatggggtttcrccatgttggtcaggctrgtctcgaactcgtgaccgcaagcgattcacccacctgtaatcccagcgctttgggaggctaaggcaggcagatcacttgagaccagcttgggcaacatggcaaagccccatctctacaaaaaacacaaaaattagctgggcattgtggcgcacacctgtattcccatctastcaggaagctgagatkgaagaattaattgagcccacgagttcaaggctgcagtgagtcgtgattgtgccactgcactccagccggggtgacagaagagaccttgtctcgaaaaggaatctgaaaacaatggaaccatgccttcataattctrgaaagttattttcaactgataaatctatattcacccaaataatcaagggtgaaggtaaaataatacatttttagacaagcaaagactcaggggttacctccatgtgccctttttagggaagctgttggagaaaatactccagcaaaatgaaggagtacacaaaccagagaatgacatgaatccagcaaataggatccaacacaggcaatattccagctatggagctagctttaaaaaggaacagtaaaaatattaatcggttagctgggtggaatggcccatgcctgtagtcccagctactcaggaggctcagcagcaggrcgacttgagcccaagagttccagaccagcctggccaycttagtgagatcccttctcttaaaaataataacttattgccagatttggggcatttggaaakaagttcattgaagataaagcaaaagtaaaaaaaaaaaaaaaaaaacaaggggaaagggttggttaggcaatcattctagggcagaaagaagtacaggataggaagagcataatacactgtttttctcggtgtaagagctaaatcctcatctgtcatatccagaaatcactatataatayataataatgaaatgactaagttatgtgaggaaaaaaacagaagacattgctaaaagagttaaaagtcattgctctggagaattaggagkgatgggg

SEQ ID NO: 1176 - DNA, 798 bp, Homo sapiens
cattatttataagtagatgcaacacctcatttatayctccttatctcatacagaagagctaagattggcagaaatgatttcacagaagccacttgcttggagcagactaccatgacaagccagtctcaggggatccaccagcttcttcaggcagaaaaacgggccaaggacaagctagaggaagccaagaagattctgcatctacttttcctaaaacraagagactgggactgcttctggaaaaggaaagcgattgaagcaagccaaggaggaagcaatggtagaaattgaccagtacagaatgcagagagataaagagtttcgactaaaacaatctaagataatgggctctcagaataatctctcagatgaaatagaagaacaaacactagggaagatacaagaacttaatggacactacaataagtatatggaaagtgtgatgaaccagctcttgagcatggtctgtgacatgaaaccagaaatccatgtgaactacagagccaccaactaaatgtacatcacagttttcaagaaaaaaaaaggtgtgtgagtgccacctggttgcttatggcttcgtrtttttatgttgagaaatttgaaatgagaaccttaaatttacatttacaggaaatgtgacataactcatacatcggcactgaattaaacaaaacaaaatacaactgttgctatatcttttctagtaataattatgaccttgtcacttaacttggagtaagtcaagaatgcaaaatagtaacatgttttttaacacttgaaagaaaaacatggtcatga

SEQ ID NO: 1177 - DNA, 752 bp, Homo sapiens
cattatttataagtagatgcaacacctcatttatayctccttatctcatacagaagagctaagattggcagaaatgatttcacagaagccacttgcttggagcagactaccatgacaagccagtctcaggggatccaccagcttcttcaggcagaaaaacgggccaaggacaagctagaggaagccaagaagagaaaaggaaagcgattgaagcaagccaaggaggaagcaatggtagaaattgaccagtacagaatgcagagagataaagagtttcgactaaaacaatctaagataatgggctctcagaataatctctcagatgaaatagaagaacaaacactagggaagatacaagaacttaatggacactacaataagtatatggaaagtgtgatgaaccagctcttgagcatggtctgtgacatgaaaccagaaatccatgtgaactacagagccaccaactaaatgtacatcacagttttcaagaaaaaaaaaggtgtgtgagtgccacctggttgcttatggcttcgtrtttttatgttgagaaatttgaaatgagaaccttaaatttacatttacaggaaatgtgacataactcatacatcggcactgaattaaacaaaacaaaatacaactgttgctatatcttttctagtaataattatgaccttgtcacttaacttggagtaagtcaagaatgcaaaatagtaacatgttttttaacacttgaaagaaaaacatggtcatga

SEQ ID NO: 1178 - DNA, 1465 bp, Homo sapiens
gctgtcgaaacctcagtrgataaaagacctagagaatgtgtatcccagaagaagctggccaaggatatgggagcaaccaccatggaccagaagtctctctgggcaggtgtagtggtcttgctgcttctccagggaggatctgcctacaaactggtttgctactttaccaactggtcccaggaccggcaggaaccaggaaaattcacccctgagaatattgaccccttcctatgctctcatctcatctattcattcgccagcatcgaaaacaacaaggttatcatcaaggacaagagtgaagtgatgctctaccagaccatcaacagtctcaaaaccaagaatcccaaactgaaaattctcttgtccattggagggtacctgtttggttccaaagggttccaccctatggtggattcttctacatcacgcttggaattcattractccataatcctgtttctgaggaaccataactttgatggactggatgtaagctggatctacccagatcagaaagaaaacactcatttcactgtgctgattcatgagttagcagaagcctttcagaaggacttcacaaaatccaccaaggaaaggcttctcttgactgygggcrtatctgcagggaggcaaatgattgataacagctatcaagttgagaaactggcaaaagatctggatttcatcaacctcctgtcctttgacttccatgggtcttgggaaaagccccttatcactggccacaacagccctctgagcaaggggtggcaggacagagggccaagctcctactacaatgtggaatatgctgtggggtactggatacataagggaatgccatcagagaaggtggtcatgggcatccccacatatgggcactccttcacactggcctctgcagaaaccaccgtgggggcccctgcctctggccctggagctgctggacccatcacagagtcttcaggcttcctggcctattatgagatctgccagttcctgaaaggagccaagatcacrhggctccaggatcarcaggttccctacgcagtcaaggggaaccagtgggtgggctatgatgatgtgaagagtatggagaccaaggttcagttcttaaagaatttaaacctgggaggagccatgatctggtctattgacatggatgacttcactggcaaatcctgcaaccagggcccttaccctcttgtccaagcagtcaagagaagccttggctccctgtgaaggattaacttacagagaagcaggcaagatgaccttgctgcctggggcctgctctctcccaggaattytcatgtgggattccccttgccaggmyggcctttggatctctcttccaagcctttcctgacttcctcttagatcatagattggacctggttttgttttcctgcagctgwtgacttgttgccctgaagtacaataaaaaaaattcattttgctccagtaa

SEQ ID NO: 1179 - DNA, 1519 bp, Homo sapiens
aaaaaaaaaaaaaagaaaccacagcagctgtggctggggagcccagatgaagtgtggctctatcttgtatgtgagcacacccacattttcactgccattatctgggacagcagaaccaggtttggctcaacagatttctctttccacccatctattgcaggtgtagtggtcttgctgcttctccagggaggatctgcctacaaactggtttgctactttaccaactggtcccaggaccggcaggaaccaggaaaattcacccctgagaatattgaccccttcctatgctctcatctcatctattcattcgccagcatcgaaaacaacaaggttatcatcaaggacaagagtgaagtgatgctctaccagaccatcaacagtctcaaaaccaagaatcccaaactgaaaattctcttgtccattggagggtacctgtttggttccaaagggttccaccctatggtggattcttctacatcacgcttggaattcattractccataatcctgtttctgaggaaccataactttgatggactggatgtaagctggatctacccagatcagaaagaaaacactcatttcactgtgctgattcatgagttagcagaagcctttcagaaggacttcacaaaatccaccaaggaaaggcttctcttgactgygggcrtatctgcagggaggcaaatgattgataacagctatcaagttgagaaactggcaaaagatctggatttcatcaacctcctgtcctttgacttccatgggtcttgggaaaagccccttatcactggccacaacagccctctgagcaaggggtggcaggacagagggccaagctcctactacaatgtggaatatgctgtggggtactggatacataagggaatgccatcagagaaggtggtcatgggcatccccacatatgggcactccttcacactggcctctgcagaaaccaccgtgggggcccctgcctctggccctggagctgctggacccatcacagagtcttcaggcttcctggcctattatgagatctgccagttcctgaaaggagccaagatcacrhggctccaggatcarcaggttccctacgcagtcaaggggaaccagtgggtgggctatgatgatgtgaagagtatggagaccaaggttcagttcttaaagaatttaaacctgggaggagccatgatctggtctattgacatggatgacttcactggcaaatcctgcaaccagggcccttaccctcttgtccaagcagtcaagagaagccttggctccctgtgaaggattaacttacagagaagcaggcaagatgaccttgctgcctggggcctgctctctcccaggaattytcatgtgggattccccttgccaggmyggcctttggatctctcttccaagcctttcctgacttcctcttagatcatagattggacctggttttgttttcctgcagctgwtgacttgttgccctgaagtacaataaaaaaaattcattttgctccagtaa

SEQ ID NO: 1180 - DNA, 1740 bp, Homo sapiens
ctgcccaccagttacaaggctgccccactctttccttcccacacatcccagagaggggattcattctaggagttctggcagaagatggagtctcrctctgtcacccaggctggaccatgagtgcttttttaaacctcrttttaaatctgaaagaagaatgaatacattgttgggaggctgggaagtttaaaatcaagctgcacacagatgaggtgtctggtgatggccctcttcctgatctgctgaaagccacctacttgctgcatattcccatggctgtcgaaacctcagtrgataaaagacctagagaatgtgtatcccagaagaagctggccaaggatatgggagcaaccaccatggaccagaagtctctctgggcaggtgtagtggtcttgctgcttctccagggaggatctgcctacaaactggtttgctactttaccaactggtcccaggaccggcaggaaccaggaaaattcacccctgagaatattgaccccttcctatgctctcatctcatctattcattcgccagcatcgaaaacaacaaggttatcatcaaggacaagagtgaagtgatgctctaccagaccatcaacagtctcaaaaccaagaatcccaaactgaaaattctcttgtccattggagggtacctgtttggttccaaagggttccaccctatggtggattcttctacatcacgcttggaattcattractccataatcctgtttctgaggaaccataactttgatggactggatgtaagctggatctacccagatcagaaagaaaacactcatttcactgtgctgattcatgagttagcagaagcctttcagaaggacttcacaaaatccaccaaggaaaggcttctcttgactgygggcrtatctgcagggaggcaaatgattgataacagctatcaagttgagaaactggcaaaagatctggatttcatcaacctcctgtcctttgacttccatgggtcttgggaaaagccccttatcactggccacaacagccctctgagcaaggggtggcaggacagagggccaagctcctactacaatgtggaatatgctgtggggtactggatacataagggaatgccatcagagaaggtggtcatgggcatccccacatatgggcactccttcacactggcctctgcagaaaccaccgtgggggcccctgcctctggccctggagctgctggacccatcacagagtcttcaggcttcctggcctattatgagatctgccagttcctgaaaggagccaagatcacrhggctccaggatcarcaggttccctacgcagtcaaggggaaccagtgggtgggctatgatgatgtgaagagtatggagaccaaggttcagttcttaaagaatttaaacctgggaggagccatgatctggtctattgacatggatgacttcactggcaaatcctgcaaccagggcccttaccctcttgtccaagcagtcaagagaagccttggctccctgtgaaggattaacttacagagaagcaggcaagatgaccttgctgcctggggcctgctctctcccaggaattytcatgtgggattccccttgccaggmyggcctttggatctctcttccaagcctttcctgacttcctcttagatcatagattggacctggttttgttttcctgcagctgwtgacttgttgccctgaagtacaataaaaaaaattcattttgctccagtaa

SEQ ID NO: 1181 - DNA, 1430 bp, Homo sapiens
gggagcttgtctctcaccttctttctctgggtaacaggctctgcctaccagctgacatgttacttcaccaactrggcccagaaccagccaggcctggggtgcttcaagcctgatgacatygacccctgcctctgtacccacttgatctacgcctttgctggaatgcagaacaacgagatcaccaccatcgaatgggatgacatgactctctaccaagctttcaatggcctgaaaaacaaaaatagtcaactgaaaactctcttggctattggtggctggaactttggcactgctcctttcactgccatggtttccactcctgagaaccaycagactttcatcaactcagtcatcaaattcctgcrccagtatgagtttgacgggctggactttgactgggagtaccccggctctcgtgtgagccctcctcaggacaagcatctcttcactgtcctggtgcargaaatgcgtgaagcttttgagcaggaggccaagcacattaataagcccaggctgatggtcactgctgcagtagctgctggcatctccaacatccagtctggctatgasatcccccaactgtcacagtacccggactacatccatgtcatgacctatgacctccatggctcctgggagggctacactggagagaacagccccctctacaaatacccgactgacacyggcagcaacgcctacstcaatgtggattatgtcatgaactactggaaggacaacagggccccagctgagaagctcatgttggattcccagcctatggacactccttccttctgagcaacccctccaaccatggaattgatgcccctaccactggtcctggccctgctggaccctataccaggcagtctgggttctgggcctactatgagatctgtaccttcctgaagaatggagctactgaagtatgggaggcttctgaggatgttccctatgcctacaaaggaaatgagtggcttggatacgataayaccaagagtttccaaatcaaggtagactattggctaaagaagaacaastttggaggtgccatggtctgggccattgacctggatgatttcacaggcactttctgcaaccaaggaaaattccctctgatcaccaccctgaaggatgctctgggcctgcagagtacaagttgyaaagctccagcccaacccattgctcycattgccgaggcaaacatcacatgcggtgtcagccacagtsgtagctctgrgggcygctctggcaggagctctgggggcagccccagaggtagtggattctgtgctgacagggccagtggcctgtaccctgaccccactgacaagaatgcctcctacagttgtgtgaatggaaagactttcactcagcactgccagcctggtggtgtctttgataccttctgctcctgctgcagctgg

SEQ ID NO: 1182 - DNA, 2025 bp, Homo sapiens
gccaccaggcgtggcatttttattcaggcracgcttaagggagtccggccgtgcccggtgcattgtgggagcggcccgcagcccgttttygggaggaggcggagggtgcaaagccagccggtggatccataaagaacccagccaacccacagagggaggggaggggctgagctgtgaggagagcggggcccaagaaccatgtctaagcgggagtcctttaacctggaaagttatgaattggacaaaagcttctggctaaccagattcactgaactgaagggcacaggttgcaaagtgccccaagatgtcttgcaaaaattgctggaatctttacaggagaaccacttccaagaagatgagcagtttctgggagccgttatgccaaggcttcgcattggaatggatacttgtgccattyctttgaggcatggtgggctttccttggttcaaaccacagattacatttacccgatcgtagacgacccttacatgatgggcaggatagcatgtgccaatgtcctcagtgacctctatgcaatgggggtcacagaatgtgacaatatgctgatgctccttggagtcagtaataaaatgaccgacagggaaagggataaagtgatgcctctgattatccaaagttttaaagatgcagctgaggaagcaggaatgtctgtaatggkcagccaaacagtactaaatycctggattgtcctgggaggagtcactaccactgtcttccagcccaatgaatttatcatgccagacaatgcagtgccaggggacrtgctggtgttgacaaaacccctggggacacaggtggcagtggctgtgcaccagtggctggatattccttagaaatggaataagattaagctagtggtcaccgaagatgtagagctggccaaccaggaggcgatgatgaacatggtgaggctcaacaggacaggcggccttctgatctgtttaccatgtcagcaagcagctcggttctgtgcagagataaagtcccccaaatatagtgaaggccaccaagcatggattattgggattgtagagaagggcaaccacacagccagaatcatagacaaaccccagatcatcaaggttgcaccacaagtggccactcaaaatgtgaatctcacacccggggccacatcttaatctagacagaaatagctgtttggttttgtttttaaatagatctatttcccttatcacttcaactaaagactataaacaacaaaaatctcattgtgtctacacatcggggtgaccttaggtcagtttgtaagtggatacaattaataaaataaaatccactgcctttttttcctgttacattaactgaagatgcacctaatcttgaggcagcttctgaattgagaattatattgttatccaatgctgttgattcattttgaatctttagacacttatctcttgccgcataggctctttttaaaggtgctttcacatagcacagacattaccagtagtcatgtcaaatcgcagttggtgtcttcattttatgtatatttatcaagtaagtctgatttttttattaagcatcttgaatggttttctggagagacagcattggtaagtggcacatgatggtatcccagtcataagagggttgcatgattcctttgagtgtttgatttgaaaagcctagtcttgtctctcaagagcatctcggatccagaacattctccagtagtgcattcagttcaacacagcaagtgcttcactgcatggaaaacattttgaagacaaaaaaatcttatatctttttttgtagccttcctgatatttacagtaatacgattaactgttttatcgatagcaaaaaaggatactttttgcaatgtaattagatgttctatagtgctacaaggaattgccttccaaatggaggttcatgtataatactcatttacaattcaatatataattatgcaaataatttttaaatataatgaataataaagactgttctgtggatggtagtgtttaatacatttt

SEQ ID NO: 1183 - DNA, 2362 bp, Homo sapiens
ggcgtggcatttttattcaggcracgcttaagggagtccggccgtgcccggtgcattgtgggagcggcccgcagcccgttttygggaggaggcggagggtgcaaagccagccggtggatccataaagaacccagccaacccacagagggaggggaggggctgagctgtgaggagagcggggcccaagaaccatgtctaagcgggagtcctttaacctggaaagttatgaattggacaaaagcttctggctaaccagattcactgaactgaagggcacaggttgcaaagtgccccaagatgtcttgcaaaaattgctggaatctttacaggagaaccacttccaagaagatgagcagtttctgggagccgttatgccaaggcttcgcattggaatggatacttgtgccattyctttgaggcatggtgggctttccttggttcaaaccacagattacatttacccgatcgtagacgacccttacatgatgggcaggatagcatgtgccaatgtcctcagtgacctctatgcaatgggggtcacagaatgtgacaatatgctgatgctccttggagtcagtaataaaatgaccgacagggaaagggataaagtgatgcctctgattatccaaagttttaaagatgcagctgaggaagcaggaatgtctgtaatggkcagccaaacagtactaaatycctggattgtcctgggaggagtcactaccactgtcttccagcccaatgaatttatcatgccagacaatgcagtgccaggggacrtgctggtgttgacaaaacccctggggacacaggtggcagtggctgtgcaccagtggctggatattccttagaaatggaataagattaagctagtggtcaccgaagatgtagagctggccaaccaggaggcgatgatgaacatggtgaggctcaacaggacagctgcaggactcatgcacacgttcaatgcccacatggccactgacatcacgggcttcgggattttgggccacgtgcagaacctagccaagcagcagaggaacgaggtgtcgtttgtaattcacaacctcctggtgctggccaagatggctgcggtgagcaaggcctgcggaaacatgttcagcctcatgcatgggacctgcccggagacctcaggcggccttctgatctgtttaccatgtcagcaagcagctcggttctgtgcagagataaagtcccccaaatatagtgaaggccaccaagcatggattattgggattgtagagaagggcaaccacacagccagaatcatagacaaaccccagatcatcaaggttgcaccacaagtggccactcaaaatgtgaatctcacacccggggccacatcttaatctagacagaaatagctgtttggttttgtttttaaatagatctatttcccttatcacttcaactaaagactataaacaacaaaaatctcattgtgtctacacatcggggtgaccttaggtcagtttgtaagtggatacaattaataaaataaaatccactgcctttttttcctgttacattaactgaagatgcacctaatcttgaggcagcttctgaattgagaattatattgttatccaatgctgttgattcattttgaatctttagacacttatctcttgccgcataggctctttttaaaggtgctttcacatagcacagacattaccagtagtcatgtcaaatcgcagttggtgtcttcattttatgtatatttatcaagtaagtctgatttttttattaagcatcttgaatggttttctggagagacagcattggtaagtggcacatgatggtatcccagtcataagagggttgcatgattcctttgagtgtttgatttgaaaagcctagtcttgtctctcaagagcatctcggatccagaacattctccagtagtgcattcagttcaacacagcaagtgcttcactgcatggaaaacattttgaagacaaaaaaatcttatatctttttttgtagccttcctgatatttacagtaatacgattaactgttttatcgatagcaaaaaaggatactttttgcaatgtaattagatgttctatagtgctacaaggaattgccttccaaatggaggttcatgtataatactcatttacaattcaatatataattatgcaaataatttttaaatataatgaataataaagactgttctgtggatggtagtgtttaatacattttatattttgtatagtgatttcaggccttttattttcttaaaatcagtagctatttggcctaattcttagcactattttgtcctttgcgccagtacttttttgtgcatgctttttgtgatctgtgttaaaaac

SEQ ID NO: 1184 - DNA, 1162 bp, Homo sapiens
tccgctgggcccgagcgggctgggggaggggagcgtggggccgacagttttgggggtgaaaaggcaaaaggcgggtgaaaggctgcctcccgagactctccttgcttggaattctgcccactctgcggagttagcagtcacgacctccagcacaggatgtggtaccacagattgtcccacctacacagcaggcttcaggacttgctgaagggaggagtcatatatccrgcccttccacagcccaacttcaaaagcttacttcctttagctgtccattggcaccatacagcctccaagtctctgacttgtgcttggcagcaacatgaagatcattttgagctgaaatatgctaataccgtgatgcgctttgattacgtctggcttcgagaccactgccgctcagcatcgtgctacaactctaagactcaccagcgcagcctggatactgccagtgtggatttatgtatcaagccaaagaccattcgtctggatgagaccacactctttttcacttggccagatggtcatgtgactaaatatgatttgaattggctggtgaaaaacagctatgaagggcagaaacaaaaagtcatccagcctagaatactatggaatgctgaaatctaccagcaagcccaagttccatcggtagattgccagagcttcttagaaaccaacgagggactgaagaagtttctgcaaaactttctgctctatggaattgcattcgtagaaaatgtccctcccactcaagagcacacagagaagttggcagaaaggatcagcttaatcagagaaaccatttatgggaggatgtggtatttcacttcagacttctccagaggtgacactgcgtacaccaagctagctctggatcggcacactgacactacctattttcaagagccctgtggcattcaagtgtttcattgtcttaaacatgaaggaactggtggcaggacactgctagtagatggattctatgcagcagaacaggtacttcaaaaggcacctgaggaatttgaactcctcagtaaagtgccattgaagcatgaatatattgaagatgttggagaatgtcacaaccacatgattgggattgggccagtcttaaatatctacccatggaataaagagctgtatttgatcaggtgagtatcaa

SEQ ID NO: 1185 - DNA, 1197 bp, Homo sapiens
attcagccctaaaacttcaaaggaatgcctatttcactatgagagatggccatagtcatgcctatcaccacatggttcatagaagtatcagtgccatttaaaatgccagagacagagtggacaacctcagaccagccacaagattacttccttaaagaatgaaaatagacagtttccttccaattctaaggatgtggtaccacagattgtcccacctacacagcaggcttcaggacttgctgaagggaggagtcatatatccrgcccttccacagcccaacttcaaaagcttacttcctttagctgtccattggcaccatacagcctccaagtctctgacttgtgcttggcagcaacatgaagatcattttgagctgaaatatgctaataccgtgatgcgctttgattacgtctggcttcgagaccactgccgctcagcatcgtgctacaactctaagactcaccagcgcagcctggatactgccagtgtggatttatgtatcaagccaaagaccattcgtctggatgagaccacactctttttcacttggccagatggtcatgtgactaaatatgatttgaattggctggtgaaaaacagctatgaagggcagaaacaaaaagtcatccagcctagaatactatggaatgctgaaatctaccagcaagcccaagttccatcggtagattgccagagcttcttagaaaccaacgagggactgaagaagtttctgcaaaactttctgctctatggaattgcattcgtagaaaatgtccctcccactcaagagcacacagagaagttggcagaaaggatcagcttaatcagagaaaccatttatgggaggatgtggtatttcacttcagacttctccagaggtgacactgcgtacaccaagctagctctggatcggcacactgacactacctattttcaagagccctgtggcattcaagtgtttcattgtcttaaacatgaaggaactggtggcaggacactgctagtagatggattctatgcagcagaacaggtacttcaaaaggcacctgaggaatttgaactcctcagtaaagtgccattgaagcatgaatatattgaagatgttggagaatgtcacaaccacatgattgggattgggccagtcttaaatatctacccatggaataaagagctgtatttgatcaggtgagtatcaa

(The sequence listing continues in the following parts.)
